United States Patent Application Publication US 2007/0161031 A1 - sequence listing, part 29

SEQ ID NO: 36616 - DNA, 2300 bp, Homo sapien
tcccaaagtgctgggattacaagcatgagccaaccgcgtccggcctacagggctatttcaagtcatctatacccttacaggtttcctgtctacttgtcctatttattacatagagaaaagtgctgaaatcctgaagtataattgtggatttgcctgtttctccttttaatgctattaggttttgcttcgtcctactttgaagctctgttcttagatatacaaacaagtagaattgttccatgctcttaatgaatttttcattatgaaatgtgcctgtttattgctattaatattccttattgtaaaacctactttgatattaatattgccactcccaactctatcagattatattgaggtataattaacaaacaacaaaattcgccaattttaagtgtacaaattgatgagttttgagaaatacatgcagctgtataatcatcatcaccgtcacgatataaaacatttccatctctccaaaaagtttccttctgcccctttgcagtcccctcccccaatgccaccgtcacctgactcggcacctgatgtgttttctgtttctatagttttgacttttccagaatgttacataaatgaaatcaaaataataagtagaatttttgatagagcttctttcccttcgtctaatgaatttgagattcatgaatggtattagtttgtttcttgttattgctaagtagtattccattatgtggatataccatattttgtttattcatttactagtagaataacatttggctttcctccagtttggggccattatattaagctgctataaaactggagtacaagtttttttaatagaattgcgtttttatttcccttgtaaatatggtaagactagtacttgagacaatagtgctcttaagctgtctctctttagtcattaagcttccaattagtcctagaatcagtctcagtagttaggaaatcatgactgcatactgaacactgtaccaggtgaaagagaggaatatataacaaaacgttgagatcgataggtatcgatatatggcttcaaggccgagcagaagccacccgaagcaaggagaaaaaatgccaggaaagctcacaaatatagttttgatcttcatgctactgtgagaattaaaaaaaaaggtgaacataaataacaacctttgaaaatgtcaacacgtgaagctattaaccaactccacatccctgtttagaaattcctgcttactattcgaatatacacttgacatacaattgacggacgttccaacactatatttaattggcagaaattacttcttaagggtacaaagggttttctttatgcacgcaaatgattactgtcgaaggtaatctgggactcgattaacggctgtgttaattattctcccttcagcagacctcagtatccgtttaagactaaagtggctagaattacctgcccacccgggctcccagttgtaactgagacaagcggaggagcctgaggagctgaagacgcacaggtgacggtcgcggatggccggcaggatctgacatttaaaatcgccctgctcatctgggcctcggagcctttgacaggcgggcgtgtcagcgacagtgtggggaaggggctgggctccgccaggcagcgcgcgacgacgcccttgccttggccttcacagagtagaacccgagaagcccactcgcccgtcttggccaacgcccccaacgcccagggctccccccgcagtcggcgggcaggtgtgcgtggtgcgcgagcccagtgcgtgccgggtgcggcgccagcagcggaggggcggcccggcgcccagcggagagccgctggctgggtgggtgtcggcctccccgcctccttcttctccccgccggcttgccggggatgcttgcgcgaggcgccccctcgcctttaagctcccggccccggggggcggtgtgtgtgagtagctgggagggggccgcgaggcgctccgccgagggctcgtccgggtttgtccgccgccgtcacctgactcgtcggaggagccacagctgaggtgggggcggggatggggacgcagctcggagcgctagagagacgcggcggcgctggcagaagaggcggcggcgggcgggtactggcttctggggccaggggccaggggcggtgggcgccgggaccgcggagctgaggagcggggcccggccagggctggagactttgcgcccgggggcaccggggctacgcgcggtcgcacacatccaccggcgcggcttccctcggcggcccgggctccgctcatcctgcggcgggcggcgcc

SEQ ID NO: 36617 - DNA, 2300 bp, Homo sapien
attccactactgttgggtggactattttataaatgtcaattaggtgaagttggtctgcaggactatttctttctttttttttttttttgtgagacagagtcttgctctgtcaccccagctgaagtgcagtggcgcgatgtccgctcactgcaagctccgcctcccgggttcacgccattctcctgcctcagcctcctgagtagctggggctacaggcacccaccaccacgcccagctaatttttttttttttttgtatttttagtagagacggggtttcaccgtgttagccaggatggtcttgatctcctaacctcatgatctgcctggctcggcctcccaaagtgctgggattacaagcatgagccaaccgcgtccggcctacagggctatttcaagtcatctatacccttacaggtttcctgtctacttgtcctatttattacatagagaaaagtgctgaaatcctgaagtataattgtggatttgcctgtttctccttttaatgctattaggttttgcttcgtcctactttgaagctctgttcttagatatacaaacaagtagaattgttccatgctcttaatgaatttttcattatgaaatgtgcctgtttattgctattaatattccttattgtaaaacctactttgatattaatattgccactcccaactctatcagattatattgaggtataattaacaaacaacaaaattcgccaattttaagtgtacaaattgatgagttttgagaaatacatgcagctgtataatcatcatcaccgtcacgatataaaacatttccatctctccaaaaagtttccttctgcccctttgcagtcccctcccccaatgccaccgtcacctgactcggcacctgatgtgttttctgtttctatagttttgacttttccagaatgttacataaatgaaatcaaaataataagtagaatttttgatagagcttctttcccttcgtctaatgaatttgagattcatgaatggtattagtttgtttcttgttattgctaagtagtattccattatgtggatataccatattttgtttattcatttactagtagaataacatttggctttcctccagtttggggccattatattaagctgctataaaactggagtacaagtttttttaatagaattgcgtttttatttcccttgtaaatatggtaagactagtacttgagacaatagtgctcttaagctgtctctctttagtcattaagcttccaattagtcctagaatcagtctcagtagttaggaaatcatgactgcatactgaacactgtaccaggtgaaagagaggaatatataacaaaacgttgagatcgataggtatcgatatatggcttcaaggccgagcagaagccacccgaagcaaggagaaaaaatgccaggaaagctcacaaatatagttttgatcttcatgctactgtgagaattaaaaaaaaaggtgaacataaataacaacctttgaaaatgtcaacacgtgaagctattaaccaactccacatccctgtttagaaattcctgcttactattcgaatatacacttgacatacaattgacggacgttccaacactatatttaattggcagaaattacttcttaagggtacaaagggttttctttatgcacgcaaatgattactgtcgaaggtaatctgggactcgattaacggctgtgttaattattctcccttcagcagacctcagtatccgtttaagactaaagtggctagaattacctgcccacccgggctcccagttgtaactgagacaagcggaggagcctgaggagctgaagacgcacaggtgacggtcgcggatggccggcaggatctgacatttaaaatcgccctgctcatctgggcctcggagcctttgacaggcgggcgtgtcagcgacagtgtggggaaggggctgggctccgccaggcagcgcgcgacgacgcccttgccttggccttcacagagtagaacccgagaagcccactcgcccgtcttggccaacgcccccaacgcccagggctccccccgcagtcggcgggcaggtgtgcgtggtgcgcgagcccagtgcgtgccgggtgcggcgccagcagcggaggggcggcccggcgcccagcggagagccgctggctgggtgggtgtcggcctccccgcctccttcttctccccgccggcttgccggggatgcttgcgcgaggcgccccctcgcctttaagctcccggccccggggggcggtgtgtgtgagtagctgggagggggccgcga

SEQ ID NO: 36618 - DNA, 2300 bp, Homo sapien
ttgaatgtgtcactttaaatttttttttttttttttttttttgcttatgtgtttattgtagtggtcagagtttggaataattgtaaccttctcaaggataggaggaataccttactgtccttatctggaaagcacagtagttagcacattacagccacctcaaaaagatttttttttattttttattttcattttaagttctgtggtacatgtgcaggatgtgcaggtttgttacataggtaaacatgtgccatggtggtttgctgcacctatcaacctatcacctaggtattaagcctagcatgcattagctatttttcctaatcctctctctcctcccaccccacccactgacatgcccagtgtgtgtttttcccctccctgtgtccagatgttctcattattcagctcccacttataagtgagaacatgcagtgtttggttttatgttcctgcgttagtttgctgaggataacggcttccagctccatccacgtccttggaaaggacatgatcttgttcctttttatggctgcatagtatttcgtgttgtgtatgtaccacattttctttatccagtctattactgatgggcatttgagttgaatccatatctttgctatcgcaaatagtgctgcaatgaacatacgcatacaaacattatgcatgccatctttgtaaaataacgattgatattcctttgcatatatccctagtaatgggattgctaggtcaaatggtacttctggttctaggtctttgaggaatcaccacaccatcttccacaatgatttaactagtttacattatggaactgaaataataagccattttatcagaaaggttaacatctgttaaggccttatatttttttacgtagcttaaaatctgttgaaggcttactatatgccaggcactgcaaaacgcattttataagctttattttatttagcctaacaataactgtaggggatgcagacatgcattaggtatctatccttactgattttcttatcagaagcaacccaaatctcaccttcctggcaggtagatcattataggctcttagctactattaataattaaattattttcctatgcagtagctgaatgaatagcagagacaactatagtttacaatcaagatttttgtctaaacttttaagagaaagtccagttttattatttaaaacattttgaaaaaaattataacatttatatatcatcttttcctcgatgcataacactttttacaaagtttagtggtagataagtgaggggtaactcaaatcagagaaacaggggtgcagacgtttgattaacttgtctcatatcataacttttcaagatttcattatcattccacaacactgccctcaaaaaagaattttgtaattaccattgagtgacaaaataccaagtagtgacagaggtgtatagacgaactcaaaagttattgtaggaggacactgataaaatgttggggaaaatcacaaaagacacgagaagataatttagagctctatgcccaaatcacatgactccagtctctggctctcttagccagaacagcgaatcttttacaatttacctcttgttgccaataattttctattatcttcaaataataataggctggagtatgaacctagtttatcaatacttttttaaaaaaccgacattcctctcttaaggagtccatgcattctccccattttttagaaaattgttccatgaagaggaattaagtttattcctttgaattctagtctgcatcccagcttttagaacacgggatgcagaaccagttgatttgccacaggccaagtcctgagtctccagcgaatcaagcaattaaccagtcacttggcctttttgcagaaatccacaaaacgtgtagactcgcttaattccatctcctcctggcctcttcacacggaaattggctgctcgggcgaatgttgtttttctccgcagccatgtgtcgaagggcgattaacattcgctcgacaaaaccctgtcccgggccatttgggagttgcacgcgttcacacccggggctcagcccggtgcgccttcacgcgcagcctttttgtttatgcggctagcagggagaggggcggagaggcagcgaacctctcaatgtgcagcaggccgcgagggctatataaagctcgggtctcggacctactggaactggtcaagattgcccgcgagctggcagcggccttccgcccagctctgcggcgtcatggagaacgcgggaggcgcagagggtacagagagtggagctgcggcgt

SEQ ID NO: 36619 - DNA, 2300 bp, Homo sapien
tctacaaatgtcttgattgtattataaatatttggggcttacaaagaatacatttttcttttcgttaaattgcacatttatatttagttataattttgcaaagaatgacagtatttaattctcaagactgaatcttttaacatctgctatttcctactgatgccagttggatgttgtagttacatatcaatgttatcttattagataatgaagaaaatagacttatgttagaaatcactcatttattagtaaagatttcttagcagatggagaaaaacacattaaatcattacctgtaattgaaaaagggaatcaatcttagggcttttaaattatagatattttaaataaatgatgagcaaagtaactcatattttaatactcctcttcagtccttaaatccagtagtaaaatagtatggatgtttaatacttaatgtactacattgagggatccctagaattaaaacaaaacgtttaaatttgagtgattgatatggagtctaaaaaagtggagtctaaaggccagaagttgatagcatcttccatttctgtacaaaggggagctaagaaatttggaaagcatggaacattcttcaacaatattaacttttccttgctctggttctctgcttttgatattcttatgtaaaagttttctcacgagaagtgaaataaatctcagtgattagtttttcttgtgtagactctagaagaatatgtcatcatttaatgagagagaacacagaagcaatttgcaaagtcaaagtaatacagttaattatagtcatgaggttcttttagctcaaattcagtcttctcataataagcatttcaattgcaaataaaaatggatagaggtgaatgtcataggtggctaccttatttgaatgcttgtatttgaatggccacatatagtcacacactttttcttctgattctgcaaacataaccttgattttttaggcactttaagaactaagtagttaaacagagaaagtttaaagcatgacaatatgttcagagttaggaaaaattagtaattaaaggaggatggggaggattatttagaactatgtttcttctcctgaaaactttctcccttattggattctactctcaagatctatgtgttccccaagggacacacaaaacaatcaatcaaacaaacaaaaaccatcagattttgagcattagagcctggtgtttacctgcacagtgttggtccttttcccattaatatgttggaatagcacaaacagccactgccacttattcagtacctaatattaatcaggcactgcagtatgtagtttacacatgatcctttaatctttaataaacccattatgcagatggggaaaatgagactttgagatactaaagtaacttgcataagacagctcagtcattaagtgcagggatggcatgcaaaccaaatctgacttttaaacgttacttcatcaccacagctggaggtgagctgcatcagtacacaattcccagtgaagacaggaagttacataaggagggagaatttgtgagtgggtgaatagagcagaaggtgactttactaacgtctttcgcgcattcattagccctcagcatgcttaaaggtgaagtttaaggatgattaaaggtgaggttttcttcttaccccacagtagtggctgttgacatttgatatttttgctcttaaaggtgtgagatgctctttgcattacagcctagtgccttacaggaaagaatttcagagaaactaaaattcgttttagtccatatttcaagtagtgtgttttagtccatatttcaagtagtgtgatggtactgcttaacaatgaacagacattgctgttccgggttaacaggactaagaatttgttcccacattcggtcagcaccaaggctaaggaacagcttcactctctaatctttccacgaaatagctgtcaccttgctccggtgctgaagttcgggatgcggaactagctgagcatgcgtacttcctccctgccggccctccctccgtcccgttggctccgccctccgcggacgtgctgcgtcagaatgcgcctcacccctggcgaccccggaagtgggtcgggggcttggcctctgcccggccacagagccggagctggaggtgctgtcccgtctggcggcgatccccgggcagggcccggggccggggtttgaagatgctgaacgtcccttcccagtctttcccggcccccaggtcgcagcagcgtgtcgcctccggggggcgtagcaaggtaagcgggtggctccgtgagtctctcc

SEQ ID NO: 36620 - DNA, 2300 bp, Homo sapien
atggtgttcaaaaactgtatgaattgaagttctattttaactaaataaatttgtctgtcctagggctaagccatgaggttcaggaagatttttctggtaagctaccaaaaaccaaaaattatgtatgtacgtacatatacacatacctacagagagagagatacgaaaaaattgaaaaattagcatttgttttatttttcatgtctatattttcacattgcaaaacaaagatgtgatgttttctcttttttttttaaacttttaagttctgggatacatgtgcaagatgtgcacgtttgttacataggtaaatgtgtgtcatgggggtttgttgtacagatacaaacaaatacattaatttttaaatatacccctccctctggttttgggttttttcctattttttcttccccttattccttttttgtgtgtgagatggggtctcactctgtcacccaggttggactgcagcagtgtgatcttggttcactgcaacctctgcctctcaggctgaagtgatcctcccgtctcagcctcctgagtagttgagatcacagtacacacaccaccacacctggctaatttttttttgtagagacggggtttcacatgtggccccgactggccccccttattttttttctctctttaacctttcttttttttctccttaaaaaaaaaaaaatctgtctcctttttattcttcattcctcgtatctgccctactcctgacatgcagcttatagaaatatactatgttagacaaatttttctttcatctatatatttaaatgtttaatgttgagagagcatactaaattatgaatgttgctgcatataaacatgcagcgtaggttttacacagctatttaataatagaagactcatcatagaatggtatattcttgttttcaagtactgtcatggtaccttacactggtccaatgtttcctcttttccgtatatcattataggctctgtaaattgtataaatcaggctctttaaagacaaagaccatggttttattttggttaagcttcaaatcagtgctcattgaattgaattcatttgactcatctatctttaaaagttaaattgttactgggtgttgtgttcactataggggagagcagaacattgtttctgaagaaaaattaaatatgctttaaatctttaaaagcatgttcaattcataaaatttaaatcagcatatgaaagcacatattttattattttacccatatattgtaaacattttaattattcaataaataaaaaggtaatctaaaatatttttatcaaagattcacatgcactttatcaatttactctattgactaggaactcattctcatgaggctcttcttgtgtttagtaggctcagtattagtctactgaatttagtcatcagaatccttcagattctaaggaatgttaacgaaacaaattagaggctgacatgggcggatctcgaggtcaggagatcgagaccatcctggctaacacagtgaaaccccatctctactaaaaataaaaaaaaaaaaattagccgggcgtggtggtgggcgcctgtagtcccagctactcaggaggctgaggcaggagaatggcgtgaacccgggaggcggagcttgcagtgagccaagatcacgccactgccctccagcctgggtgacagagcaagactccgtctcaaaaaaaaaaaaaaaaaaaagaattaaatttgcttttgtgggggcattcgatgctaatttgtacatctcaacctttttttttttttttttgttagctttatgtcaattagttgccatggctatatttgagcttgtttgaaaaccagcaacacatagtagtttggcccttaataaattagtttgaaagaacttaatctgaatctattaataaaataaagcatataaggataaacaattatgattgtgattgaatatgtaagcaaaatcttatttatcccactaataatcagtaccattcatattagatcaggacacttgtactatttgagaaatactggttttaaaataaaatcttgtatttagtatcgatgaacacaaatggaatttatcttcttttcagtgcgggttgttgagagtgtgggaaaaatagagattgttctacaaaaaaaagagaatacttcttgggactttcttggccatcccctgaagaatcataattcacttattccaaggaaagatacaggtatgctgtgttcttttgttacgttaatttcacattcatgaaattgttgttagttgtacagttgtaccagagtttggaaggc

SEQ ID NO: 36621 - DNA, 2300 bp, Homo sapien
tctgcccagaacaaggccacctgatgccgacagctaaggcagaaattggcctgttcacaccgtagcccctcagaagcagcagttttgtcactctttttcacaatgccctgaagacacttggcagaggctctactgcaggggtgaggaatcacatccctgtgaataggaatgagcaactggaactggtgtggacacttggggaatgattaataaatcttatcacagattgtcaaattatgttatttagaatcaaactgcttgtggatgaggcagaagatacatacacacactataaagatggttttctctaatgaccagtgatgatgagcttttttccatatgtttgttggctgcataaatgtcttcttttgagaagtatctgttcatatcctttgcccactttttgatggggttgttttcttcttgtaaatttgtttaagttgcttgtacattctggatattagacctttgtcagatggatagattgcaaaaattttctcccattctgtaggttgcctgttcactccaaatgcccatcaatgatagaatggataaagaaaatgtggcacacatacaccatagaatactatgcagccataaaaaaggatgagtttgtgtcctttgcagggacatggatgaagctggaaaccaccattctcagcaaactaacacaggaacagaaaaccaaatgagcatgttctcactcataagtgggagttgaacagtgagaacacatggacacagggaggggaacatcatacaccggggcctgtcgggggtgggcggcaaggagaggaagagcattaggacaaatacctaatgcaagcggggcttaaaacctagatgacaagttgataaatgcagcaaaccacgctggcacatgtatacctatgtaacaaatctgtacattctgcacatgtatcccagaacttaaaattaaaaaaaagaagaagaagaaaaatggtgttcaaaatatttcattttacaagtggtaatgaaactgagcttttaaaaaaaaatcagtgatgagatgtcatttccaggaatcctcttttggcaccaccagcttgagttcatcacactgccaccagcctgcatgggtgctgcatttcccctgctgctgtataatggtggttaaactatggttctggggcaccaggcttcctgaccttgaaggcaagctcctctattgactagcatatgaccttgggcagttcctttaaccttcctaagttacagtttctcatcagtaaaatggaaatggtggcaatacctgtctaatatggcatatggagagtagtaaaagaaatgactagtgcagtaaagaacatctcagtgcctgccacacagcaagtgctttctctccagataccagcgtgacttctttctgtctcatctcctttagatctttactccactgtgaagccatctttgaccatcccatttaaaaatgcaccccctacctccaaacattatcccatttcctcccttcttttttgtccaccgcacttcatcactatctcacatactatgtattttagttatttgttatgtttatgcctgtctctttagtagaatgcaagcaccaagcacctgtattcccagatcaatgcctggcatgcaataaggactcaagggaggaagagatgagccagccctgctatgctgaaactactcccggcccagtgctagccctttgggaccccgtttgaacgtctgactgccctttgacacctggaccagtgggcaggaagagaaactaaaatcgaggtagtaatttaagcagcacattatgggggggctctggccttactgaacttgaactcaatgctgccgatttttcataagccttgattcatgataccccactccctcttgctcagctaatgagctcctcctgttacccaaagttgacccgagggacccactgcagagcccgggatggcaaagaattctctgactcaggctctgacccggactcggaggggcaaagtgagcaggaaagggatctgcaaagctcacctcctcttggccaaggcggcctcgcgctggggaggcggctctcgcgctggggaggcggctcccgcgctgcagccctgctccggcgccccgcgccgcctccgctgcgggtcgggagcgcgcgtctccgccgcacctcggatctaggagctactcgcccggccctgggcggtgggaggcggcggcggcggcggcgctcgcgcacctcggaggagccaggagccggaaccagggccgagcccgcgggccggggctagccagccggtaaccacgggcgggac

SEQ ID NO: 36622 - DNA, 2300 bp, Homo sapien
attttggggactgatgattcattttttccttccattttctcctttttggaatgggaatacggttgatccttgaacaacatagggttgaactgcacgtgtccacttgtatgcagattttttttcaaccaaatggggattgaaaatacagtattcttgggatgcgaaacccacctatacggagagctaattttcatatacacgggttctgcaggacctactgtggaacttaagtatgctaggattttggtgtatacagggggcctggaaccaatcccctgcatatactgaaagacaactattagtaactagtatcttatgtcggtcacatcattgtattttgggagaaaataacttattttctagttttacaggtccacagatggagagtttttccccaggatgaatcatacccaggatctcactaatactgaaattagatggttaagataataagatttgggacttttaagctgataagatttaggtaatacatgtgactttgaattgattctataatgaattgagactgtggagtatattgggatggggtgtatgtattgtgcatatagaatggatataaacctttggggccaaagggaagactagcaggctaatggttccccaagcatgtccacatcctaatccctgaaacctgtcaatatgtagccttatgtggcaaaaggcacacactttacagatgtgattaaatgaaggatctcaagatggggagatcatcttaggtaacccaatgtaatcacaaaggtccttataagagagaagcaggatggttaaagacagagatgtaaagtggaagaagaggagccacagagtgggagcaacccctggaagatagaaaaggcaagaaaactgattaatcctgagagcctccagatggaatgctgctgtgctaacaccttgattttagcccactgaaactgattttagacttgtctactctagaactggaagagaataaatttgtgttgctctaagtcactaaatttgtggtaattcgttacaacagcagtaggaaacaaactcaggaaccaacatgagcatgaagcatatgtggcctgctgtgctgtaatgaagatttttgtctctgacccaagactcttgtgtcttctggcagcatccatgagactatggcaagctgatttgcagaaggggcaaaatcttggaccattcacagttcttaacatttagttcataaaaatgatgatatagtcatgggtatttgtctgacgtttaagtatctttcaatcttctgatcaataaatctacttctaaataagataccacttaagtagctgtgaactttaataatagcccatgatttatatttcattaaataaattatgaataatcatactcatattagaagttaaactctggccaggcatggtggctcatacctgcaatcccagcactttgggaggccaaggcaggcagataacttgaggtcaggagttcgagaccagcctggccaacatatagtgaaatctcgtctctactaaaaaatacaaaaattagctaggcgtggtggcacgtgcctgtagtcccagcaacttgggaagctgaggcaggagaatcacttgaacccaggaggggaggctgcagtgagccatccagcctgggcgacagagcaagactccgtctctcaaaaaaaaaaaaaaaaaaaaaaagttaacaaactcagcattctttaatactcttgctctcttgcataaaaaattcatgaaaatagcatctatttataaaaaatatgttaaagtagctttaattacaaaaaaattccatgctttgttttactatttagagtcttaaagaatgatattttctttaaaatacacaatagaaaagggatttcttttagcgaaataatccctaaatctcatgcatggctcagatcaccagaatcccagagatggtacagtcagcactgcctactccaagaagttaggagacattataaacatggtacaactttttgggaaacaaaaaattggatgtgtgaaaataaagaaccagaggaaatttctgtgcagtcaaatgcatttattttgtagcttaagcaagacaggtggtgaacaaattcataatgaaaatgccacccagaggttaacagcttgccatgcatgcaactgtgtgcgcaaaatcaagttgttttaataccagtgtgcagctttgattcctccatgaaattaaagctgtgttgctcacttgtttacataactcaggccaccctgaatatctgctagtggggaatttacaacccactgaccatctcagctcaaagc

SEQ ID NO: 36623 - DNA, 2300 bp, Homo sapien
tgatactactatggtctttaccatagaagtcatttcttttatgtatgctcagcagatacttgctcaacctgatatttctatagaggaaaaaaagacaccgtgtgcttttccttttttcttgaaaattaatgacctctttcattcatgctgcaagcaagacctttttcctcatgtcctcttgaaaatctctgcccttcaactgttgacagttcttccttagcagtatcctcttctgtttttagtttatttaagcaaacttgttatttggatatacttcatgtagccatggggacctgaagcactagctagaaagacatctcattgtaaggcattcttatacaatcttatatgtaccacttggctatctcttctgtttagaagttgtgtatatacacaacttacattgtatatacaggaagatgagactatatatactattttatttttaataactggttaattaaccatgggtatgaagagaagagattagtcacctgtttttcttctttttttccctctcttccgtgattcattattttcctctaattttgaaaattccacttgttagtaatgaaaattacaaaataagcaagaaagtactcaaaaatatgcaatcattattttcattaaattatttgaattcttttttctagaatttgtcagttggtggaaagagaaggtatattagtccattttcatgctgttgataaagacatacccaagactaagtaatttatacaggaaaaagggtttattgtatttacagttccacatggctggggaatcctcacaatcatggcagaaggcaaggaggagcaagccacatttacatggatagcggcaggcaaagagagcttgtgcagggaaactcttgtttttaaaaccatcagatctcatgagactcgttcactatcatgagaacaacacagaaaagacccacccccataattctatcacctcccaccaggtccctcccatgacacatgagaattgtgggagttacaatttaagatgagatttgggtggggacacagccaaaccatatcagaaggctaatagggaaggaagagtgaatgatgacatcaaggtttctattttgactgagtagtgatgtgattaggaaatactggtagtagaacaagttttagtagggaatataatgaattcagttggggaatatgtagatgtgatatagagcaatctagatgtctgttaagttgatattcagaaaagagttataaggacacaagacatagatttgggagtcataagcatatgggtaatagttgaagctaaaagtcttcatgaagttagccaggccaaaaaactagtaagtgagaggcattcaaaagaagagggctgaagatggagccctgaaatgaactatagaccgcaagagttggaaaattgccctcaaaattatggtaataacaaaaagaagaaggcatgcagaagaaacagttacaggaaaaaaaacaatgtttgacttctctgccttttggctaagataaagtgaaaaagataatgtcagatgtctcacatagttgaagagaactaaatacaaatggagttggtcattaggaaattgcttttgatcatagcagctttagcaggatgttggaatacattggattgcaaagttggaggagtgaattcattgtggttgaaaaagtgcaaatgacaagatgcttggtggtacagagaagcagagagaatggtaatggtaaaggagaggtagaatccgtcaaaggaattttttagtttgggaaacttaagaatagttatgcagagggggtcgattaagaatagtaggagaaagaacaatgacgagtgaaagcagattttatgcttaccacatcaggacacgcctcagtttgctaaaagagttgttgagcctgctatgaatccatgctggtaggccatagctgcaaattacctagttagtacttaactctacttttatattcctaacaggttaaggaatgatattagtgttttatcgttctcatgtatttgtgatgtaattatttctggtgattacgtttatttcaacaggtgtttcttatggacaaagcagtagtgacgttgaagccctacatcaagcttattgtcatatagcccattcattgggagatgaagacaaacaaaaaattgagagtaacacagtggaagatatcaagagctcagtgaaaggtcatcctcaagaaaatgaagagaattcaaaaaacatctctactatggaatctggtaaaaacttacagatgaatttttcaattatttgatatcctttctaaagagtt

SEQ ID NO: 36624 - DNA, 2300 bp, Homo sapien
tttcagcaatggagtaacctgatttacattttcaaattatcacattttctattgtgtagacaatgggttagacgaggataggagtagaaatagagaaacttgttagaaggctaatgaagcagctcagacaagaggaaaagatgcctctatcattagtaattaagatgtaaaatgaacagaatagagacacattttggaggtagcaccaacaagtcttgacgaataaaatatgggagagagggaactcccagatttctgtcttgaatgagtaggtgtatggaagtaccatgaagtgtgacagaataagagtccagaaataagccctaagaaattctaacattggccaggcgcggtggctcacacctgtaatcccaacactttgggaggccaaggtgggcagatcaggagttcaagactagcctgactaacatggtgaaactctgtctctactaaaaacacaaaattagccaggtgtggtggtgggcacctgtaatcccagttactcgggaggctgaggcaggagaatcagttgaacccaggaggtggaggttgcagtgagccgagatcgcactattgtactccagcctgggtgacagagcaagactccgtctcaaaaaaatagaaattaaaaaaaaagaaagaaagaaaagaaaaaaagaaaaagaagaaaagaaaagaaattctaacatttagaggtcagctaggatagacagagacagtgaaaacccttgaggggaggctataaatgtgaaagaaaaaccaagaaagagaggagacaagtgtatcaaatagtattgggagatcaaataaagcgctgtcatatatgtacacttacacacacagagacaggattaaaaggtctgacaaaagggaggtaaagtggaaataattcctcagaaaagattggcaagtaaggtgaggagacagatcatttcaaccactgggaaataatagcatgaagagaatgtgtcagaagtgatgttttaggtggggatctcaaggcatgttcaaatgctgttaggaaaaatcccacagccagccagaagtcgaagatacaggattaagggaaatgaccagtggaacaagatcagtgagaagaagaatgggtaaaggctctagatcatatgtgggaaggtaagtctttgatagaaggtggcaggaagtcaacttctcaataaatggtagcttaagatatttcttttattattcatatttgcatcatagtccacagctcctggtttgtacatatttgtattgcaagaaagacttgatgaataaacagttctagctaaagatgaggtcctgaactaagtctaccatcagcaaaacctgcagctgttgtagattttacttacactatgctaaatgttgtcctctgaaactccagctaatgttgcatgctttgaaaaaaagaaaagaaatagaaaacaaaatccaagtcagtaattgtgaaatgccagtaaagaatgcagttttgaaaagtaggggtagcgggaggagcaataacttaataagaatcttgctgtttgcgtattttcgatttcttgcccactaggtggtggaacagagtccccatctaaacgacagtttttttcctcacaggtttgtgtttctctcacaatgcctacacaggtctttgcaggccaaagaaatccaagaaattcaatctcttcaaaattgccccttggaaaaacagagcgctcgaatgacaagtgtggggaaggcgggaggcgacgatgcggagtgcggaaacacaaggaccaggggagctaaactacatttcccagaaagccacgggctggcctacaaccaccgcgccctccaagcctgctggaagcctccgtctcgcttctccagtaaccggtttgccgctgtccccttttctaaggaacgtagagaaagccagggaaggaaaggcattttactgcagcagcgaaggtttagccactagagtgtctttctcagccgtggttattccgaccttcgcttgtaaaggcattgggaaacccacggcccacgtgaccagcccgggtcatgtgactccagaacccggcagctgaagtctgttaccctgacaactggtggacccgcacagaccttccgggaaagcgcggaattcagaggcagaggtaggtggtaaggtgtgaacgctggtttcccacccaaatcgccctggtcgaggccgtgcttcatactcgagcgaagggctttaattttccaggtcattccccttctccgcccggagcccacggcaaatgcgtctttgtcttccctccaattcccgaacccgcgcttctggg

SEQ ID NO: 36625 - DNA, 2300 bp, Homo sapien
cctaacaaaaagtcgagttgaaactacaaaacaaattgtacaaatatatatgtttggtgtcatttaattaaaaagcactgattttattaaatttgttttaaatacatcaatggactccttaaaagcctgaagtaacgattgtaaattgtcaacagtaggacaaatataaacttacttaaatcacagagaagtttttcaaatggggaattttattgcgtcttcatacttatttcattttgcgaagttttaaggggttttaaagttgtccatatcgttaaagacgtacagaatgaaaatcccatgacctacgttttaaaataactaccactctttgaaagaaaaggtgggctgcggaaagggcgtgctttttctgacatttatatgacggactgagcgttaacgtaacattttgcactcctaaaggatttacatatttcttaacctggtatcccctaagaaaaaaatcacggagtaaagtttaaataagcctaagccatatctggcgcagactgagtgcaggaacatttaaatgagaaaggaggggcctgcgaattcttcccagcttcccaatattctgagttgtagcaacattaagcgatacggaagtgggacggcaatttacggaaccttgaaagattcctgattttctaacttgttgaacgtctagtttaaagccgggaacttccgcctttccaggtcctggtgaggaaagctggagactacggggctggactcagctacggacgtcagagagacagagttcagcgtccgtgtggctggcacatccaagccagacagcggcgcttttcactcctggtttttcgctaccttgtaaggaagtgggcgcgggctgcgcggagtcggcgcctcctgattggccggccgtctgggtgatggacagggacccgggctccgcccccgccgctttattgacactaatgagcaagttcttcccaccgctctcctgcctggaagtgctgacagatcaaggcaacaaatttcaattacaatccctaatttgtgtccacagagtgttttttacccatgttagtcctctctggcgcatcagttgaggcagacctcggagcagcaggaggaggtggaaggggtgggagcaaaggagtgcatcagtgagagagcgcgcgagagagacccaggaaaggagacttggccggcgcgtcgccggttcctggatcccaacacaagcgagaaagcggaaacgccaaatctgttttttgcccgcggtggggaagggggcagatctcgggaggccccgagagccttttagtttttggtgggggaagagcgagagcgcgcgtgtgcccgcgtgagtgtatatgagagaggggcgggcgggcgcggggcgggggggatggccgagaagcgaaggggctcgccgtgcagcatgctaagcctcaaggcgcacgctttctcggtggaggcgctgatcggcgccgagaagcagcaacagcttcagaagaagcggcgaaaactgggcgccgaagaggcggcgggggccgtggacgacggaggctgcagccgcggcggcggcgcgggcgaaaagggttcttctgagggagacgaaggcgctgcgctcccgccgccggctggggcgacgtctgggccggctcggagtggcgcagacctggagcgcggagccgcgggtgagtgggccccttcctgcctataacttctctccggcgcgaacctgaacttctgcgagtctgtgggtgtgcgtgcgcgccgcgtccctacatggccaaggccactcagccactagcgcattggccgtgtcagtcgcaaagctcgccgcgcaacctggtcaccctccagacggttcagatactgcttccaggctcgcctcgcgggcggccgccgcccactcggcgacccgcgccttcggccgcggctgtttgctgcgcctagcggtgcagctctgtgcttcctgcatctgcctcccttggggttccagccaatgggtgctcttttttgtttcctaacttttaaaagcacagggcggggaggaggggagcgacggcataccccaccctgaaaccggaacgaatgccctaaaccgtttgtgcaaaccaggaagagggcggcatatttggaaacttggtttcccgaagggtagttgagcggttcccttcccttctcctcttgatttctctgccaaggccgacggcgaccgcgggcttgcttttcacacttttctctgctgggctggaagcgcagggcgccgggagtttggcgaaagcggggtctgaagagccttctagaagatgcctccggcccggccc

SEQ ID NO: 36626 - DNA, 2300 bp, Homo sapien
ggccaccttctccctgttttcatacaaccttcccactgtatcgctctgtgtcctaattttctctttttataaggtcaccagtcatattggattagggcccactttaatcgactcattttaacttaattagctctttagaaccctgtctccaaacacagtcacattctgcggtattggaggttagaatttcaacatatgaattttagggcaacacaattcagcccctatcagtatatcttacaattttttttttctttttaaaaatcactggtatttgctaagtggctgatcactagaattacctggagatatttaaaaatacagattcctggcccctccttagtagactctcatttagtgggtctgaaatggggctggaaatctttacgtttaaaaaatattttaagacctgggtatggtagttcacaccaatagtcccagtgatttgggagactgagatgggagggtcacttgatcccaggggttggaggctgcagtgagctatgatcacaccactatactccaacctgggcaacagagtaagaccatgactcaaaatataaaaccttagataattgagataattagtgaggtttgagaacgacccttataaggaactcctggcattatttattaccatactagggaagatcaaattgaatgaaacaatggtagttgctcagaggaacctcagaaagattacacctagtaagcaccactttgaaactttactgtttccttttatttggttccatgtggttttctgtcttcttcattgcttttcatttctgcatgtatatataagctcttaaagcatccaacacactttgctccacatttataatttaattagctgtgtctattggacttaggttccaaataatttctgacacacatgctcctatctgaaatacaaatatttatcaggcattgaatgttgtatgagtgcagctgtcatgtttgatgatgatgacataaagaagagtgcaataaggtctctcccaaggagttcagggactttctttgttagattgtcaaaagcattagctcttcatgctaccatattattatttgaaagaaaatctgattgttggaaatttgtagtgggattgttgttcccctttgctccatggaaatttatcatattttttggttgttttgactgttatgactgatttactagtgataactgaactcggggtcagttacctcagttctatggctctaatgcctgctttgtggctgccatcttgagagactggcataagttccccagcattctttcccttagcacaacttaaccatgacttagcacattccaaaggtttagctaagcataactgcccctagataagttttaatacttgattgtaaacaacttcatcagtgtgcttgcagaattacaatgaaagtatgtttcatttcaattgaagtaaacccaatggcaattgtcaaaatgggagataatattgctgtgtgtcctaagaagagataatttaggcatttgaacatgaaatgtaatctcttgtttttttttaaaaagagattatgcaaaggtaagaatggggatctttctttttctagaaagtcattgatctatgatcccttgagggtaatataaaaaaagttaattatagattttaaaatttgcttcagatctgttagaataagaaagtgagggaggcagaaacaaagtggaatggattcagtcattgagaggagaggcagagttcagtttgcactgtaagcttcaaagtgttagcataagctgtctactgctctttggcttgttattcatttactttttcttccagtcatttcttaaatcatttatcaaacatttatggagaatttatctagagttatagagataaatacaaagctatatctattcttagtcgcaggggctcaaagtcctgggagagatggacacatcaaccaatagtaatagcaggtgtgatgggtgtatatggagatatgcccagggttacgaagagcctggaaaatagatgaccaaccagcaggctgggttagggtgtggtttcagagaggaagcactggactaagacttgaagaatgcattggaagagcaaatcaggcagaaaagaggacagagtcattttgctcagaagaaacagcatgtgcaaatgtgccacaaccattcaaagcaagttgctgcttaagtcttgcccacaacttttcatctgaaaagtggagtagctgaagcagccaatgctggtggttataattcttgaggatgcaacagtaagaacggtaagaaatattctgcatgtcaaggg

SEQ ID NO: 36627 - DNA, 2300 bp, Homo sapien
actgctgtgtgaagaagtcaaaggaacttcatgttgacttgaacaagaaattaaaggaaccccgggccttggcctaaggacagactggaaatggtggtttggagagaagaaatgaggacaaagggaatgtgtgaggaacagtggaaggtaaagttggctggataaaatgagacttcaaaatgccagtttgcgaagcttgaacttggtgcaataaacaatcaaaggccattttagatgtatatgaaaacaaatggcatggaaatgatattgaagcagaaatctggtagcatccccagaacaggaatttcagaaactattgcagtggcttaggtttaaaagacaagaaacaacaaatgatcagttccccagtgatcagtgataggtcatgttgataccgtgtacccacagataccaggcaatgagaaaggcacataatctctgtagcattcttcctaaacatccacagcttcagtccaatcatgagaaaacatcagacaaacccaaactgagggatagtatacagaaaccagtactgttcaaaagtgtcaaggtttttgaagacaactgactgagaaactgtcacagattagaggaggctaagaacacaggaaaactaactgcaatatggtatcctgaattgggtcctggaatagaaaacggacattagtggaacagttggtgaaattaaaataaaatcagtaacacagttaatagtttcgtatcactgttaagtttttagtttcattggttatataagctgttaacataaggcaatatgggtgatgggtatgtgggaactccctttattacctttgcaacttttctgtaagtctaaaatcattctttttttaagttaaaacagcaaaactaccagttcttttacctgcttctagcaggtgctcaaagagggacagagcaaaaccttgcaaagcatgacattagagggtgtcccagaagcaagggtcttctgtagccccaggcactgctgctcccaaactgcatggcctttcttggcaaatgatttacaatctccgaacctcaggtcaatgtcttaaaaacgggcacagaatgtcttttcaacaaatggtactaagaaaactggatatccacatgaaaaagagtaaatgtggactcataccacatatgaaaattaactcaaaatggattaaaggtctaagagtttaaattataaaactcttaggagaaaacatagaggaaaatcttcctaacattgtatttggctatgacttcactgcgacaccgaaagcacacgcgacaaaataaaaataaaataaaataaaataagaccagaaaagcaaagaagggcagcatcccttcccgtcctgatagctgccggattttaccccaatcgtgtttctgcttccaggagctgtccgcgcgtcgcctctgttttatcactaaggttttaattgtgaataaacaaggaactggattcgaatgatttcttagtttctgagatttttttgtctaagcatcgtagacttcgtgcgttctcaacccaacaggaagcgtcacatctcagtgagcttcggctctcacagcccgaaactgcaaggagctcctctgcccggcctctctttactcctcctctctgcccctcagctcgctcatctttcttcccgccccctctcttttccttctttggttctttgaagtgatgagctagcgcaaccacaaaccatacattccttttgtagaaaaacccgtgcctcgaatgaggcgagactcagagaggacccaggcgcggggcggacccctccaattccttcctcgcgcccccgaaagagcggcgcaccagcagccgaactgccggcgcccaggctccctggtccggccgggatgcggccggtacccgctccccgccgggaacaacctctccactcttcctgcagggagctggtgccagccgacagccgcgccagggccgctccgggtaccagggtcggatcgggtgacgtcgcgaacttgcgcctggccgccaagccggcctccaggctgaagaaggacccgccccggccttgacccgggccccgcccctccagccggggcaccgagccccggccctagctgctcgcccctactcgccggcactcgcccggctcgcccgctttcgcacccagttcacgcgccacagctatgtgtccccgagccgcgcgggcgcccgcgacgctactcctcgccctgggcgcggtgctgtggcctgcggctggcgcctgggagcttacgattttgcacaccaacgacgtgcacagccggctggagcagaccagcgaggactc

SEQ ID NO: 36628 - DNA, 2300 bp, Homo sapien
tcagatatttctacggaaggcagaaagataaaggccaaaaaaagatcaggcttgcctagctcttgggtttccaggaaactgacagactcctgatatctgcaactagtgctttctctccctgggcggggcgttctccgccaccttgtggacatttggggaactgcaccgccccagcatctatgatcagaggaactgacagaggctgccataactacctggtcccctgaaataaaaaccaggcaccaggtttgcccaaaggaggaccaacacatagcagaatgaggctgagtaggatgttaaccttccatgctggtcttccattatcacgttatctgccactgtcacagacaacatctgcatccgctacagatggagatggaacaaaggctttcactggatctcaagttggatgcttctgtaaaagtaaagttccaagacctttttcttttttttccccagtgacagcaagaaaattggatgttactattggcaacaactatttcctgcttgtgaagcgttggtatttgcagtgcttctgccctgtggttattgagctgaaaggggggctgctcttgacataggagcatggcaggattggattcttcataacatgctacccagcttgtcttatgtgaaaagagaagcccagaaagagcttgggacacaaagatgcaaatcctgggtttgcatttgatttgttaagtgtcctttcacaaccagcttgcagactttaggggaaaaaaaatacatggtaggcttgtgggtagtggagaaaacataagctccagtacctcacagcctgggttttcagtctgcctcctcccaaccctcatcacataccagctgtgtgaccgtgggtactctgtctatgacaatcaattttcttgtctgcagagtacagataatagaggacctgccccatgggaagcttggaggactaaatgagattaagcccagggcctggctcatggccgattctcgtaacaggtccatgtgtgtaatcaacatgtgctgaagttctctggaccctctgtaaatatctaataggaacgactagccatgggtgtgatgagggagatgctagaaacagtaatggggtcaaatgaatctgtcccatagtctctaatttgaaacagctgaactgtgccattgtctccttggaggtaagatataagccacagagtgcctgaagcaggtctacagttaaggaacttaaatgtgctaagtgattaaaggctgggctgcctactccctgtatggcgacactctccaccctcctgcatactctccactactccaggcagtggtgggcctcctagcctctgggtgatgagcagctcccacatctcccctttgagacagaggcctgcagaacctgaccagtgtgagggctggctggggtcaggagtgtgcctgctggttggccctcaaggtgaatgtggctcttctaaaagacacctgaagggatgcagaatttagcagcaaacgccaagaacagctctttgtcatctctgcatcttctactaaagattttaagctccgaagtatatgtctggggtttctagagattgctattcccttataagggaaaaaatacacccttattgtatatttattgagcacctacaatgtgccaggcaccccagctagggagtttagatatttaatcctctcagctgccctgtaaaatagggattgtttaaaatggatttcgcccaccttataggcaaggaaactgaactacagtatggtaaagtggcttggctaatccacctggctagtgagaatggagccacagtgaacctggaggatactcttcacggcgttccatctttgtgtgccccacagcacaagcacaatgcccgggtcttaggaagagcttggtaaatgactgctgagttgagaatggtaggattcatgtaccaaaagggcatttggaaatgggcaaatgcccagatagggctctgaaagactagctatgtagagcaacagatggcaaatcatcaatttaaaactctgtcatccagccagtagcccgctggcctacagccagccatgtatgtacaagggctgacttgatcagctgtggctcttttatttcaggcaatccaccttccaaagaggtgcctgctgggaagtacccattcatagtcacttctgatgatgggcggaaggttcctgtagtccaggcctatgcttttggcaaatacctaggctatctgaagatcgagtttgatgaaagaggaaacgtcatctcttcccatggaaatcccattcttctaaacagcagcattcctgaa

SEQ ID NO: 36629 - DNA, 2300 bp, Homo sapien
tgcgcctggacaagtatctcattttttatattgattacatgttgaaatgataatattttggatgtgttgggttaaataaaatataaaattaatttcacctgtttctttttactttgtaaaaaatgtagctactagaaaatttaaaattaatgggtaacttacattatatttctgttggagagtgcgaagttgaggtctgttgaagaaaacttctaacaagagtattatttgtgtctttgacatgtcattcattcataaaaatgaaaggacttgtataaaacccttggtccagtacctggcacatactggtgctcagtaaatattagctctcacatttaaaaacatattttgatatcttataggtaggaactgggctaggccctagtgattaaaagtgaagatatggtccctttctaccaggaactttagtctagaagtagaggcaggcatataaacaggtaatcacaatataatttaatgcaggcaataatggaaaaaaattaaggtatatagaattagtatagaggagaagttcataactattgagagggaaatcagatcggagaactagaggtttgccagactaatagtgtgggaaagggtatttcaggatttgagtagagctttcaaaaggaaagagaggcttgaaacaaggtgggatgttcagcaaactggagagtaaaatgtgagggaggatgtgggcaatgaggaaacaatattctagtagctaatatttaatgatttacttactgtatattaggcattgtgctaagctcattctttatttcatgtaatctatgtataacctatgaagtgggtactattattgataattttaccaaaggtaaatgaaatttagaattttaataattttctcaagtttcatatttggttgattacagaactcaataaaaaactcaggtctggttaagttcttaatcaggattttatgtggccctttagaaatgagactatcaaatgactttaagggctatgctgatggagcttagattaattgattctggaagtcagtgattttcttgaattttcacatgtgactcatagggtacactgggagtgaaaaggaagtgatgcagctgctgcatgccagcaggtccccttcaaaatcagtgcaatttatacctttcttattttcatatattcaggtttgatatgttgaggatttcatgcaagaggatgatgtggtcaaatgtatgttttaggttactttggcaactctatttaggatggaagggagtgagcttggaagcagggagttgagaggccattgctgcagtataaggggtaagaaaatgagtacccgctgggcgtgttggctcacgcctgtaatcccagcactttgggaggccgaggtgggcggatcacctaaggtcgggagttcgagaccagcctgaccaacatggagaaaccccatctctagtaaaaatgcaaaattagctggttgtggtggcacatgcctataatcccagctacttgggaggctgaggcagaattgcttaaaccctggaggtggaggttgaggtgagccaagattgcgctattgcactccagcccgggcaagaagagtgaaactccgcctcaaaaaaaaaaaaaaaagaaaagaaaagcactacttaggatataaaatcagtaggacttggtgattggctggatgtgggaaataaaggaagaagaaatgtttaatgataactcgttctagtctgttctctctatcctattcattgttatccctgtttatatgtattttcatttcccaacacatataaacaatgcttagtttttgtactaaaatgtctaaattattgttcacttaatatttaaactagagaattcacaaactttattattgctgccagagaaaatatatgatctgattttggaagcattagattagatatgtcgttttgttccctccctactgcatttgtaagttactgcccaatgttgcaactccttgtaaaaattatgacatactgcgacacccaaatccaagaaatggaagatttaacacccagggtttgttttattttgttttgttactttttcacttatataacttatgtactgatttgagtgtacaggtaaaattttcgcaaagcgaacatatgtgtgtaaccagcattcagatcaggaaacaaaacgttaccggcatcccagaactcccctttatgttcctctctagccactatactcccttcagaggtaaccactaacacctaattttgaccccttacataaatcttagctgcttgtttcttcactgtattctgaaaatactg

SEQ ID NO: 36630 - DNA, 2300 bp, Homo sapien
attgtctggctatataggctcttttttgtttccatatgaaatttaaagtatttttttttctaattctgttaagaaagtcaatggtagcttgatggggataggactgaatctataaattactttgggcagtatggccattttcacgatattgattcttcctatccatgagcatggaatgtttttgcatttgtttgtgtcctctcgtatttccttgagcagtggtttgtagttctctttgaagaggtacttcacatcccttgtaaattgtattcctaggtattttattctctttgtagcagttgtgaatgggagttcactcatgatttgactgttagtctgttattggtgtatagtaatgcttgtgatttttgccattgattttgtatcctgagactttgctgaagttgcttatcagcttaagttgattttgggctgagatgatggggttttctaaatatacaatcatgtcatctgcaaacagagacagtttgacttcctctcttcctatttgaatacgctttatttctttcttttgcctgattgccctggccagaacttacaatactgtgttgaataggagtggtgagagaggggatccttgtgttgtgtcagttttcaaagggaatgctttttgcccattcagtatgataatggctgtgggtttgtcataaataactcttattattttgagatagattccatgaatacctagtttattgatagtttttagcatgaaggggtgttgaattttattgaaggccttttctgcatctattgagataatcatgtggtttttgtgattggttctgtttatgtgatggattatgtttattgatttgtgtatgttgaaccagccttgcattccagggatgaagccgacttgatcatggtggatgtgctggattcggtttgccagtatttttttgaggattttcgcatcgatgttcatcagggatattggcctgaaattttctttttttgttgtgtctctgccaggttttggtgtcaggatgatgctggactcataaaatgagtttgggaggagttcctctttttctgttgtttggaatagtttcagaaggaatggtaccagctcctctttgtacctttggtagaatttggctgtgaatccttctggtcctgggctttttttggttggtaggctattaattactgcctcaatttcagaacttgttattggcctattcagggattcaacttcttcctggtttagtcttgagagggtgtccaggaatttatccatttcttctagattttctagtttatttcagtagatgtgtttatagtattctctgatagtagtttgtgtttttgtgagatcagtgatgatatcccctttatcattttttattgtgtctatttgattcttctctctcttctttattagtctggctagtggtctattttgctaatcttttcaaaaaaaaaaatcggctcctggatccattgcttttttgaaggttttttttgtgtgtgtctctatctccttcagttctcgttttcagtgttctttatgtctgatgaatatagggtttttcctttttctttcagattgaagaactacctttaacatttcttgtacagtaggtctggtgttcatgaaatccctcagcttttgtttgcctgggaaagtccttatttctccttcatgtttgaagggtatttttgctggatatactactctagggtgaaagtttttttccttcagcgctttaaatatgtcatgcactttatatcctatgtctctcctgacctgtaaggtttccactgaaaaatctggtgccagatgcgttggagctccattgtatgtcatttgtttcttttttcttggtgcttttaggatcctttcttggtatccttgacctttgggagtttaattattacatttcttcaggtagtcatccttaggttaaatctgcttggtgttcctaatcttcttgtacttgaacattgatacctttctctaggtttgggatgttctctgttattatccctttgaataaactttctatcctgatctgtctctctgcctcctctttaaggccagtaactcttagatttgccctttcaaggctattttttcaatcttttagttgtgttttgttattttgttcttttgtcttttctgtgtattttcaaatagcctgtcttcaagcttagtaattctttctattacttgatcacttctactattaagagactctaatgcattcttctatatgtcagttgcatttttgaactccagaatttttgcttaattcttttaattatttcagctt

SEQ ID NO: 36631 - DNA, 2300 bp, Homo sapien
aagtgatccacctacctcagcctcccaaagtgctgggattacaggcgtgagcgactgcacgcagcccatatgattaacttttgtccatggattcttacctacctcttttgggaactgggtcagtttaggtttctaaggtaggagagccatctagtaggagcaggttaaactagatttctgaggtcatctacttatggtcataacatttagtgttgtgtgttattaaaaagtcataggatgccatctgatctgtataccatctaacctgtaccctgtatttcttttatgcagagaaggtaggaaatacaggtaaatgttacctgagtggttgggtttatgagtgaagctgtttttgcatatgttttggtgttttccatttgttactgctgtagtcagcaaaagtgattttaaacactagaactgtcttgaataaaaccatgattatgtatcccttttccaggaaaaatcttttggaaggtgccagatggtgtatgtagcatgcttttcagtgtatatgtgtgattaaaaaaaaaaaaacttatgtgtgtattcacgtacacacacacacacacagatgataagagtatctctgaaatgttgttatacaagaaaacatgggcccttctgagatggggtatactaggtacatctattctgaaataaaaaataattttatatgaagttgatccttgaacagtgcagagattagggccactgacccctatgaagtcagaaatccgagtggaataccatgggatccatacaaagtaccactaatgatactgggagtactcccaagaagcagagaaaagtaatgacattacagaaaaagtgaaatgcttggtatgtactatggattgaggtttgcagctgtgattgcctgccatttcaagataaataaattgagtgtaaggaccattgtgaaaaaagaaaaggaaattcatgaagctgttgctgcagctatgccagcaggtgtgaaaacttcgtactttttgcaaagtaccttttcatgttttattgaaaatttagcttttatgtgggggcagaattgctatgagaaaggcatacatataaactaatgctattcaaaaacaagtgaagtcattgtataacagcttaaagcagaaggaaggagaaggatctaaaactgggtaatttaatgccagcaaaggatagtttgataattttaggaagagatctggcttaaaaaatgtcaagagaaccggagaaaaagcctctgctgaccaacaggcagaagatgagttcccaaacaccattcagaaaatcattgaggagaaagtattaaatatatcttcctgagtgggtgtttttttgtaaaagcaagtttattaagaaagcaaaagaataaaagaatggctacaccataggcagagcagccctgaacaagcttttaatgctgatgaaagtgacctgttttggaaaaaatgtcacaaaggacatttattagtaaggaagagaaatgagcaccaggatttaaggcaggaaggtgtacgcaaattcttctattttatggatatgcagttgggttccttgtctatgaagtgtctaacccccgagctttgaaggaaaaagataagtaccagctgctagtcttgtggttgtataaggaggcctggacaacaagaatcattctttctggattaatttcattgatgctttgtccctgaagtcagaaagtaccttgccagcagggattgcctttaaaaattcttttgatactggactatgcccctggccacccagaaccccatgagttcaacatcgaagctgtggaagtggtctacttgtccccagacataatgtctctaattcagcctctaaatccaggggttcataaagaactttaaggcattacacatggtactctatggaaaggattgtcagtgctgtggaagagaactccaatagagagaacatcatgaaagtttggaaggattacaccattgaagatgcagtcattgttatagaaaaagccgtaaaagccatcagacttgaaacaataaattactagtggagaaactatgcccaggtgttgtgcgtgacctcacaggatttacaccagagccaatcaaggaaatcatgaaagagattgtggatatgacaaaaaaggtctttcagcataaggatcttacagaaattcaagagccagtagacatcacaccagaggaattaacataatataacttgataaagatgagtgctttggaaccagtgctagacagtgaggaagaagactttgaagaaacagtgccaggggccaaatgcagtggctcatgcct

SEQ ID NO: 36632 - DNA, 2300 bp, Homo sapien
aacttaacaaggttggggaaaaaatttcgagctctgtgcgtgtaaaggtgggttctagaccataggctaaagacatgtaatgaaataaaggttatttccttagatgaggtccgtagtgacagaaattgaattatgtttcatgctttaggtgtggaaattctctgccataaagaatttccttatggctgaagtttattatattttttttccttttctaatcataagagcaatttggaaatttaaattatctattgtccagttaacttattctaattgcctctaagaaatcagatgggaaagaagtcttttaattggatgttgtagtgatgtctgttttgaacagaactcaaaacattttgtctttaaaatatactggctcttggtgaaaagagtaatttcaaaataaggctttaaaaggaagcaaaagttttaaacaaaaggcaacataatttaccaggcaggttaataacttacattatttgtcatgagattagttttttaaaaggtaatttacaaaagtgtaaagcactcaagtccataggaggcacttgatacatgtagatccactcaacatacacctattttagtattaacagataaagatacttaaaaactgccaaagtgaaattaataaatgtttaaatatgtacctagaaatattaaaaaatggtaagctttccaatgatgttacactgtagtcttttaaatggtttagtcacaaacagaaaagtgtatttgtgatgtttagacaataatagctaatcgtgaggatcagtgaaattgtttacttttatacaccactgtggagttggtaccaccattctacaaagcagtttgactgtatcaagaatgtttgtttttaccctttgacccagtaattgtattaaagttgattctaaataattagaaatgtgcataggtttatcatcaaggatggtaatatcaatggactttagtggttagcaataatggaacaggatggtacattctgataaaggataataatgcatcattaaagatccatgtttttgtaatacgggaaaatattcatgaaactacatacatcattaaaaaacatttgtttccccactttgaaggataagatcctaggaaagagagatgacaggcacaggctctgtctttagaacgtgttcaaattccggctttgttagttttatgatcctaagttcctttctgtctcagtaatttgcctgtataatgattgaaactatagtactgtacctacaccatggggtgaatgcatgaaggtcaaatgaaagtgcttagtgtctgtaccgcctaagtaaattttcgcgataatagtcttcctgcatctctcactgtagcggacaatacagaaaaaaaaatttagaaatgtgatgaattagtaaagggaaaaccccatgagactctataagagggattttacctaatctgccaacctgcctcttccaagcactcggattttggttgggctcccggagccggcgtgaattgagctctacccttgcccgtgagcgcgcaaaagagattttgttggtggggtggcggcctgatgagttgtagtctttattctagggctgttttactcgccacccccccagcccccaacacaccccttttaaaataccgactcaaaggcgtcctcctatccccctctcccttaggcgtcacgcaaagctcggacctgctcccacccggagccgagtgtacggtgaggcgcggagcgttgcggggtcggggaagcgctaccacccgctccatccctctgcgggttcgtgtcacgaagactacagttcccagcgggctccacgagctccggttgcccctcaggcagcgcccggcggctacgggggtgctgtagtttcttccgggctccctacaaccttcttccctctcctccgcaatacaggcagttactgggtgctggggctgtcctttgatttccggaaatggccggtcgccagtgttgtcagagtttccacggaagactgcgcgctactccggccaggagggcggagcggcgagacgctagaggctttgcgctgggtgacgacttcgggcacgttctacggccgttcctctggtcggctggggaccgcggccgcgcacgcgcggcggggggcgtggggctgggcccagccggacgcgacctcagcctgcggcggctaactgccggtaggcgtctgtgtgcgccgccaagtcggtggggcggggacgcgaggtgtggatggggggtcgccttgacctctgcctcagccagtagcgcagtctcggcctcgccgttacggagatggtgc

SEQ ID NO: 36633 - DNA, 2300 bp, Homo sapien
gggggaagatcacgtgctcagtttcttgaaatgcccatctggagtgccagaaagcccacataaacattgagggcgtggctagagaaaggaattagatgtcagagaacagctagagattttaatttgggagctttgcccaggttaaggcactttaaaaaattttttttaatacccaggaaggtctaaacaaagtgttacatgtttcagactcatttttattctttttttttttgagacggagtctcgctctgtcgtcctggctggagtgcagtggcgcgatctccgctcactgcaagctccgcctcccgggttaacgccattctcctgcctcagcctccagggtagctgggactacaggcgcccgccaccacgcctggctaatttttttgtatttttagtagagacggggtttcaccgtgttagccaggatggtctcgatctcctgaccttgtgatccgcccgcctcggccttccaaagtgctgggattacaggcgtgagccaccgcgcccggccaatttttattcttgtttaatccatggtatgactcttattttcatagttttctattaaacattttgtttttcatgtatatcattaaccacgacctctgcattgtgaacaaaaatccctatggctgaagcagctgaatatcacatatgtttgatagtaaggaatctggggtggtggagatctcaaatccttactaaacaggttggctatgtggtgctttggctaaaacatacttcatatctgatccaagtagctatgaaaataatctagcattttatgtgcttgtgcactttgaagagtgtttatctaacttttcctcaaaccactgatttgttatcatagcacagagctcatctggggaaccagtaagctcttaaaaataagctttttaatcaaaaggacattgtttctatttttcattacagctgccctggataaaattagtatccatatcgcgtctgtaattcaaatgcctttgtcttgtctttcttgtacctagtaaacgattataaaggaaacgtcatttcacagaagatttagttgccaaggttttttttaaaagaaacacagacatttttctcaaagttgttctaaccacgcagctttgtgctgtttcaagttgctcaaactgtgccaggaggaagcccttaactgcttaaaaggccagggactgaaacggagtattgcacaacccttcaccaccgggcggtttcgcttccaaatctggccttcgtgtcatcccaaggcaggagccgctcctcgctccactggagccagccccgttcccccttcaaaagcagccggggtttccgcgtccaagcctggggcgcccctcccttcgccgaaggttcccgtgaaagcggagccgcgcggctgcgaggagggcccactgtccagttggggagatcgagtctccaagggcgactctcgcactcgagtaccgccagtccggcggaccaaaggtccgcgggtctccgcgccgctcccctcccccttggccccattgtctgcctcgccccgccccgggggacacgtgcgcctgcagcttcccgaggaggagagcgcggggcggtggcagcggcgtggacaccgcctggaacggctacgcggccgcggagccgggggcgggggccgggcgcgcacagaccggtgggtgccctccgggaagcggcagtcgcactcagcgcccacagcactctgccccgccagccccggaccgggcagggatggggcgggcgggagctcggtgggggtggcgtgcgcatggtgtcgcggggagggggtggggtggggcggggtggggagatgccagtctcctgacaaaggaaaacgagtgggacacgctgagccggcccgccccgcctggaggggagagggagggggagtgtcgggaggggaaggggcgggcctttcattcagtctcggcccctcggccgccaccgtcggagcggaagggcggggtcttgtgcctcccccacccccaacccaaggggtgaggagcggggaaggcggcgcggcgtgggggcggagcccgcgggcgcgcgtcccgaggcgtaggctacgttgtcacgtcagcgcgggagagagaaagagaggagccgactcggcagggactgggggaccgggccgagagtgcgagcgagcgagggagggagtgagggagcgtgcgagccagaaggggaaaggcggccactcgtgcctgagcgaccgcagaggggagtgggagcagtggggtaaaggagcggggggcgggaataagaaaggccgagagaaggcggacagaggctag

SEQ ID NO: 36634 - DNA, 2300 bp, Homo sapien
tttgaacattatgctttcaaggttccaggttcgggcccagaaatttgatattttttaacttaccagattttaactggtaagtcagggtaaggaatcactgttttatatggcttttgaccaggtgatgtttgtggtcttcagaatggcagaaactctatctctacgaaaaatacagaaaaattacagggcgtgatggcgcgtgcttgtagtcccacatggttggtgggctgaggcagaaggatcacttgatcccgagattgcagtgaacagagatagagccactgcactccagcctgggtcacaaagtgagaccttgtctggaaaaaaaaagtcatctatatgtactgatatggaaagatgtttatgatatttacaagacggacaaacaagttgcagaacatatagatcccatttgtatgtgaaaaacgaagtacatatatttgcatttgcataggaagtctcaaaaactgttaacagtggtattgctgaagagtacaactagggagaagattcccaggcatgtggaaagatactttcactttgctttttttgttaactctttttaaaaatttttttaatacaatagagacagggtcttgggctcaatcctcccacctcagcctccaaaagtgctctaattacagacataagccaccacacccggcctactttgcttcttatatccttttgtactgtattgtttgttttactatttactatgagcaatatgcaaatttatgtaagacattacaaagtaatacaaaaaccgacaaaatgcccggcccagtcaatacttcatcatataggttcctgttagagaaaagtgcttttcactactatctttgaatgtgaagtttgatcttcattctaattttctaaaaagccaccgaatgtatttgttcattcattcattcatttaaccattaccgacaacctacttaatgctaggcactgttctaagaaaaaataaacagcagagcacgaaatcagatgtgttgctcccacactctagcagaatcggaccgtaatcaaatgcacacataaacaactttaataagtagtgctttgaaatatagaagtgaagaacgacctgaattttcaaatactgaaatgttcaaatgtcgtgtgcacacacacacacgcagacatattcactcgaacatgctaattaatcaaagcactgcttttgaattttgtgtttgtcgtctggataaagtattcagggatacttctcaaattaatctttctctcgttttcaatataactaattgagtacaaagaagttaaaaattagcaaagcatttcagctgtgtgaccttaggcaaattacctggctgttttaagcctcagttttctcctctgcgaaatggagtattgaacctcacgttcgctgtttgagggagacttgtatggtcacgtttagtgtaaccggatgcctggcacgaggaagcgtgaggaggaatggatccccatggggccttgatgcccgccctgaggccctgcagggccgcacgccggggctgttctcacgtggcgctttccgctttttcacccaagcgtttctgccagccaactgccctttcccggagtgctgcggccagggctcgcccgctcctccggcggcctccgctgggggcccactacagcccagcgccagccagccagccagcccagcttctcgaatcggtcctaagctgaggccgccctgcgctgcaaaacttgtgtccactctcggacccaatctgtcctggacggacttggctcgtggcaggcgaaagcgtcgtttccaactgcagctgtttgaattctggcgccacacccgcgccacgtagggccaagtcggccgccagactcgtaagagacgcttcgcagtgcgcctgcgggcgcgcgccgggaaatggccgggcgcgcggccggcctgcggcgcgctccacaacgcggaacgggcctcagaagagccaccgcgcgcgctcccgctaattcgcgaccacacccctgtctacttccatgtccaataggtgcgagagggcgggacggcctcgttctgactccgggaggctatataaggagctactggctgcgcacttcggtcttttacgtcggccttcgcgagcgtctgggcgggtggtaggtgagtgggtattgcgggctagtatccgagcaaaagatggtggcgcaggccgagttaagagctttaatcctgtgaagacatcttagtgaagagtttagagtgctgagagttgaaagcttgcacgtgggaaacgtgcggccggactgccacatgtactgaggttgagtcg

SEQ ID NO: 36635 - DNA, 2300 bp, Homo sapien
tgcaaaaaggctgaaaattccaaaaaccagaacacttcttctcctccaaaggatcaaaactccttgccagcaagggaacaaaactggacagagaattggtttgatgaattttcagaagtaggcttcagaaggtgggtaataacaaactcctctgagctaaaggagcatgttctaagccaatgcaaggaagctaagaaccttgaaaaaagattagaggaattgctaactggaataatcagtgtagagaagaacataaatgtcctgatggagctgaaaagcacagcacaagaacttcgtgaagcatgcacaagtatcaacagctgaataaatcaggtggaagaaaggatatcagagattgaagattaacttaatgaaataaagcatgaagacaagactagagaaaaaagaatgaaaaggaatgaacaaagcctccaggaaacatgggactatatgaaaagaccaaatctacatttgattgatgtacctgaaagtgatggggagaatggaaccaagtaggaaaacactcttcaggatattatccaggagaaattccacaacctagcaagacaggccaaaattcaaattcagggaatacaatgaacaccatgaagatactcctggagaagagcaaccccaagacacataattgtcagattcactaaggttgaaaagaaggaaaatattgataagggcagctagagagaaaggttggtttacccataaagagaagcccattaaagtaacaacagatgtctctgcagaaaccctacaagccagaatagagtggtggccaatattcaacaattgtaacaaaaataattttcaacccagaatttcatatccagtcaaactaagcttcataagcaaaggagaaataaaatcctttacagacaagcaaatgctgagagattttgtcaccaccaggcctgtcttaaaagagctcctgaaagaagcactaaatatggaaaggaacaactggtaccagccactgcaaaaacataccaaattgtaaagactatcgacactatgaagaaactgtgtcaactaacaggcaaaataaccagctagcatcgtaatgacaggatcaaattcacacataatatattaaccttaaatgtaaaccagctaaatgccccagttaaaagacatggactggtaaattggataaagagtcaagacccattgatgagctgtattcaggagacccatctcatatgcaaaacacacataggctcaaaataaagggatggaggaagatttaccaagcaaatggaaagaaaaaaaaagcagggggttgcaatccttgtctctgataaaacaaaccaacattaaaccaactttaaactaacaaagatcaaaaaagacaaagaaaggcattacataatggtaaagggatcaatgtaataagaagagctaactatcctaaatatatatgcacccaatatagtaacacagattcacaaagcaagttcttagcgacctacaaagagacttagacttccacacaataaaagtgggagacttaaacaccccactgttaacattggacaggtcaatgggaccaaatattaataaggatattcaggacttgaactcagctctgaaccaagtggacctaatagacatcaacagaactctccaccccaaatcaacagaatatacattcttctcaacaccacattgcacttattctaaaattgaccacataattggaagtaaaacactcctcagcaaatgcaaaagaatggaaatcataacaaactgtctctcagaccacagtgcagtcaaattagaactcagatttaagaaagtcactcaaaactgcacaactacatggaaactgaacaacctgctcctgaatgactactgggtaaataatgaaattaaggcagaaataaataagttctttgaaaccaatgagaacaaagacacaacataccacaatctctgggacaaagctaaagcagtgtttagaggaaaatttatagcactaaaagcccacaggagaaagtgggaaagatctaaaatcgacaccctaacatcacaattaaaagaactagagaagggaggagccaagatggccaaataggaacagctccggtctacagctcccagcgtgagtgacgcagaagacgggtgatttctgcatttccatcttaggtaccgggttcatctcagtagggagtgccagacagtgggcgcaggccagtgggtgcgcgcaccctgcgtgagccgaagcagggcgaggcattgcctcacctgggaagcgcaagggttcagggagttccctttccgagtca

SEQ ID NO: 36636 - DNA, 2300 bp, Homo sapien
tatgccagatgcccagggctccaggcaatccttatagtttttctaactgacaaggaattctctattatgaaatggggatgtgatttacatatacctgcaatcttaaagcactcatagaggccactggaaactcaaatgggtaatacaaattgaattagcagctcttgattaagagagcattgattttattaaaactggtagaatatatgccagaagttaattaatagcttgaaaataatcagacacttcataaagctgaacatctgccaaaaagcgggtattctgaggtatgttcaggaaagtttccaagtgtataatatttgtttccatagttccttatgttgtaataaccaaaaaataggtaaatcaattttaaataaagcaatttaacaaactcatatttcctttatattttggaggaactccaaacttgcaagagtagaacaatgtccttacttactctcttgggatatctaaaatatcttcagtcctataagattcttttttaaaatgaggaatgattcttgttctgcttatttttacataacacctttatcatcaaacaaacttcaagatgtgtcatctttagtaggaaaacatatttccacctcatcctcctgttagacttcagtctacttaagcctattctcagtttaatgggattaacagaagcaaatcacaatttaagactatagtttaccaaccttcctttctcttgttcagtgaaattcccctgataatccatcagtcaacccctgctggccttgagaggcgctctagaaggcaggagaagggcacacaggctcgctttttgaactgaagaagggtttcatttggtttagaattgtcaaacttcaaaaaataaataaataacttaaagtgtttttcaaatcagccataaggctacaaaccagaaagaaaagtgtgaggcaggtgtttggggcagctacccaagttgcctacatggtttccaaggtcctttcaactctaaggtttgtgtatcaggctgtctacagatcatactgtctccataagattgtctagttcattttatggctagtttgaacaatctgattttcttttttacaatggcaggggctcaatccatgttaggcttcaatgttgagtcacccaagttctccacagagaataaccaaccagccgtaaggaagcttcttttagcaatgccaggattctgcaaagtccctcccagcttaacttttctgaccttgcggcagcagaacaacaaaaagaacagcccctggcaccctcagaagagcacaaagccctctgacaacctgagatggcgcccaggtagacttccctcaaaaaaaaaaaaaatggcaaggctgcttcagcaggtctttcagccccaaccactccactctccgtctccttttcttcactgctttccccacctctcttccccccttccactttgacccaccccaattttcgtccacttctccctcaccccttccttgtaatctctctccttgaggcatcctgtggatgttgactgtaatctcccctggaggagggctaagaaatgcacctccagagggtctgtttgccattggaaccgcgtagagaaagcgtgcaaacccgtcaactgctcccgccgttcctctccctcctcaacccaggctcgctacagaagaagggagtagggtctgcccccttgttgtatctattttccccttctccgccagggctgtggccggcaaggggctcaggaggtgagtcccttgcccacacctccaaccccgctggcccggtttataacatggacagccctgccctctagtgtctgcaaccgggagccctaaggcgccatcagctccagaatttctcttttataacctaagcaagacctggagtacctcggagctgcgacctccagttcacaataccacctgcctcacacccgggctcatcttttcatcccacacccaccacccccctctccgttcacggtgtcccgggaggctgcgacctgcgtagatgatttagcagactgcccctgcccatgctcctgctcctgctcctcctcctcctcttccccgctctctccctctcgcctcctcttccagtccaggcgcccagactcggcgaagcgcagcgcctgccaccagcggtgcctcgggctgcccggcgcgccgcgctcccaggttctgtctcgccgcaccccggcgggcactggcgcgggcaaggacgctggcggggagaacgccctgggctcaacgtactccagaatcgaatgttgagagaagcagtgctctgatccagctcaggagaaa

SEQ ID NO: 36637 - DNA, 2300 bp, Homo sapien
aacttgattttactatgcttgtgatgctgatttctgtggaatttaaaacttgttagctggtggatacacattgttaatttgaatactcttcattataaaaataatctgctaagttttcatccctggaaattgttatgaaagcgaaaacaagcacgtaagggaatatttgaacatgcatatacctaatgaccagagtcatggctacactttaaaaggctcctttctagctctgttactagaagtctcaattgagatctatagcaatccttggagcttctgcagcccatgtcaggtgatgatgacacaatagttaagttctatcaacaatgatgaatcaggatttgagtgagtttctctatatagctctcttagtgatgaaatacctctatgcagcaaaatagttagtggtgaggtgctatgcaattttagaaataagcaacatactctgttttaaatatgatacagaaactgagctgagtcccacttaggaggtgggcttcatcatcacaactccgtgggctggaggctaaagctctgaagggaggaaaaacagaggcaggcatattttgtgcatttgttaaatgggcctcaaatgcctccattcatttatttgttgaagacagggtcatctcatttaattcagcaggaaagcaactgtaccagaaagagaaaagctgtctcaatcttctctgtatttcaaaggtatttcacatatgctcctcatgaaggagaccgcacagggaatcagacccacgtgcctgctttgcctctcttgcgcaggattaagtaagggaagcccctgattcacaagtgcatcctggctgtttaaggttatgcatattgtgtctgaatgtacaactatgataaatatatattctggagcaatgttaaattcagcttaggacgatgtactgcttagagctttgagggaaaacataagaatgataaaatgagcctaaattattttggaaaaaacactgctcccccaacccatttgacgatctattatttcctcctgggctgctccctccccaagagatttggtgcaggaggcaaggaaggacaataagaaaggttaggaagaaacaccttgggatgctgacaccatctgccttatccttctaactcaaggacaagcagcgttgggttgaatacaaggtcctttcttccaaaactgggcacaggcagaaatatacatatagatgcaaaaccactatgatcctgtgataggagctggaatcacttccctttagactcaatttcctttccttttcgttaggtagggggtcagcctctcaccttgcagtattgggtggagatggcttaagaccaaacttctcatcttaactcttacttccaagatttattttgtattttaaaaaaaatgagcctgcctcattacctccacacctgggcattttgtttatcaggactgagcacagtattattttctgagggctggagcaacagtgcagtcctttctaatcaaaggttttttaatcagctggctttgaaatcacacagttcttccggggtccctggagcacaccacctccctgtgatttctactcaagttttccctggccccccccagcacccgttccatacctatttaatctttaagctgcctctaatccttttgcaaggaagcaggatgaaatgctcaaaccacagttatacacaatgttgattctcaggttcacacatttgaggaattgtttgaacaagaaatgctctctgtactataatccagggtgcaggcacggtgcccgggcgaccctcagtctccctccgacaccccgcatcccaactcccgccgcctttgcgcctcaaagctggcaaacatccccaagccagagctggagtacctggagtgggtgggggtaagaagggaagccaaggtcgtcccggaaggtgtgcgcccctcaccttgtggacggtgcgtgcagccgcgccgcactgggcaaaccggcacgtccagctggctccagaagtctcactcggaacccgctcctttttctcctgagctggatcagagcactgcttctctcaacattcgattctggagtacgttgagcccagggcgttctccccgccagcgtccttgcccgcgccagtgcccgccggggtgcggcgagacagaacctgggagcgcggcgcgccgggcagcccgaggcaccgctggtggcaggcgctgcgcttcgccgagtctgggcgcctggactggaagaggaggcgagagggagagagcggggaagaggaggaggaggagcaggagcaggagcatgggcaggggcagt

SEQ ID NO: 36638 - DNA, 2300 bp, Homo sapien
tctctcctatatcctggtgatgtgctaagggttataatcttgattttttggatgctttttagccagtcctgtatttggtgcctctctaaaatgtagagatacccgttatctgttagtttctgctgaaactagattagattaggaaatgtcccatttaatattcaattgtaagaagaataattggaattgtgaagaggaaagaaatctcatagaattaataaaaatgaaatgtaaatgtgtcatcaataacttacaatcaaggtagaaaagcataacaggaaaatatgttttataattgtgagcattgcaatgtgagatactgcagacagttaagcacagataataaacacaccgaatgctatcttaggcatctattttattatatgagctctttatagggtatgcatatgaaacgacaatctacaggaaacatattagagagtataacttagcaaagtgttcacatcaatagtacagcatttggggggcagttccaagatggccaaataggaacagctccagtctacagctcccagcatgagcgatgcagaagacagatgatttctgcatttccaactgaggtacccggttcatctcactagggcttattggacagtgggggcaggacagtgggtgcagcccattgagcatgacccgaagcagggcgaggcatcgcctcacccgggaagcgcaaggggtcagagaattccctttcctagccaagggaagcagtgacagatggcacctggaaaattgggtcactcccaccctaatactgcccttttccaatggtcttagcaaatggcacaccaggagattttgtcccatgcatgactcggggggtcccacacccatggagcctcgctcattgctagcccagcagtctgagatcgaactgcaaggcagtgaggctgggggaggggtgcccgccattgctgaggcttcagtaggtaaacaaagcaaccgggaagcttgaactgggtggagcccactgcagctcaaggaggcctgcatacctttgaagactccacctctggggcagggcatagctgaacaaaaggtagcagaaacctctgcagacttaaatgtccctgtctgacagctttgaagagagtagtggttctcccagcagggtgtttgagatctgagaatggacagactgcctcctcaagtgggttcctgacccctgagtaccttaactgagaggcacctcccagtaggggcagactgacacctcacatggctaggtacccctctgagatgaagcttccagaggaacgatcaggcagcaacatttgctattcagcaatattcgctgttctgcagcctctgctgctgatatccaggcaaacaggatctagagtggacctccagcaaactccaacagacctgcagctgagagtcctgacttttagaaggaaaactaacaaacagaaaggacatccacaccaaaaccccatctgtacgtcacaatcatcaaagaccaaaggtagataaaaccacaaagatggggaaaaaacagagcagaaaagctgaaaattctaaaaatcgagcacctatccctctccaaaggaacacagctcctcaccagcaatggaacaaagctggatggagaatgactttgatgagttgagagaagaaggcttcagatgatcaaactactccgagctaaaggaggaagttcgaacccaatgcaaagaagctaacaacattgaaaaaagattagacgaatggctaactagaataaccagtgtagagaagtccttaaatgacctgatggagctgaaaaccatggcacgagaactacgtgacaaatgcacaagcttcagtagccgattcgaccaactggaagaaagggtatcagtgattgaagatcaaatgaatgaaatgaagcgagaagagaagtttagagaaaaaagagtaaaaagaaacaaacaaagcctccaagaaatatggaactatgtgaaaagaccaaatctacgtctgattggtgtaactgaaagtgacggggagaatggaaccaagttggaaaacactctgcaggatattacccgggagaactttcccaacctagcaaggcaggccaatattcaaattcaggaaatacagagaacgccacaacgatactcctcaagaagagcaactccaagacatataattgtcagattcactaaagttgaaatgaagaaaaaatgttaagggcagccagagagaaagattgggttacccacaaagggaagcccatcagacgaacacctgatctctcggcagaaactctacaagccagaagagagtggggg

SEQ ID NO: 36639 - DNA, 2300 bp, Homo sapien
atatctgctaaatattttaatgaaccaatgatcaccacaattgtttctctgattaagcagtattatattttcttagtcttatctttcagagattcctgatgtctaaatcccagcgatctaacaaaatatcaacatttactatacattcaataaaagtataataagtaaataaagaaatgcactaatatcttcatgtgtcctttcatgtttcttaaaatgtatatgcacaaacagggcatggtggctcaagcctataatcccagcactttgggaggctgagatgggggatcacttgaggccaggagtttgagaccagcctggccaacagggcaaaactcccatctctactaaaaaaaaaaaaaaaaaaaaagccagcctccgtggctcacaactgtaatcccagcactttgggaggctgaggcgggcggatcatttgaggtcaggagttcgataccagcctggccaacatggtgaaaccccgtctctactgaaaatacaaaaattagccgggcacagtggcatgtgcctgtaatcccaggtatttgagaggctgagacaggagaatcacttgaacctgggaggcagaggttgcagtgagccaagatctcaccactgcactccagcctgtgcaacagagcaagactctgtctcaaaaaaaaaaaaaaaaaaaagtacatgcacttcctattttaacttactaccctaacacctgatatgtttaccagcctgctaaggaacaaagaactgggttgccactcagaaataaaatttcgacaaatgggtgatgatcaaaatttctttctgaaaaccttaccggttaccagtgtgattatcttttttaaattacaggctccattaggagtagaacttttttgagtagctatgatctccaccatggctaatataatttaatatttataataccattgtcctcaaggtaaggaccacctctcagtataaatgctcaacagatgtggtgttgaagcatggcactactcttaggcatttttcatttgtttgtttttttgagactgagtctcgctctctatcgcccaggctggagtgcagtagcacgatctcagctcactgcaacctccacctcccaggttcaagtgattctcctgcctcagcctcctgagtagcttgggattacaggcgcccaccaccatgcctggcaatttttgtatttttagtagagatggggtttcaccatgttggccaggctggtctcgaactcttgacctcaagtgatctgcccgccttggcctcccaaagtgctgggattacaggtgtgagccaccatgcccggccatcttaaacattttaaaaaacaaagtgaatatgccaggcatctgacctagaccatagttctgagccagatctgaatgtgaagaacaaaatctgatgcctctggtatttcagagtaatgcccagtttcaattggtgcaatgatgccctttccttggcctctattcaattatagcctggctgccagggactaataagatgagcgtttttcagccaggcataaagcaagtaaatagaaacttcagtctgggaataattttgtctttcccaaatcctagagaagtgttctcccttttctttttcttttgtttgtttgttttttattgtccccttctaacagtaaaaagtttctgatcaaatgttcccaatatatggataattattgatttataaattgtatacatgtattaccatactaatgtatctgtgcttttataaaatccatcaaaatggaaacttaaaaagttatataaaaattaatataaatagaagttcttatattttcttctcttgccctaataaatgtcttataagtagcccactggctgaaaggactcacacgctgctaggtgtggtaacagcaaggctctccaatgtcaggtcaccaaacacatttggccccaactcacccaatggcccactctcttccattaatgctgtccaaagcaactggctttactttgaagaaaaatgataattcagtgattgaatgatgatttaaaaggctttatttgcagtggaacaagctaaatgctgtattcattccaaatgaaaagaactagactgctgattgtactgtaggataaggaggaaggcagtaaagctgcagtatatccttgaagcgtgtcaaagtggtatggtaaggaaaaggagagttttatctcacaaagccataaacactaaacaacttaattttccattccagaaaatcagcagtcatcaagacagcacttggtaaaacatttaagatttgtgataataacaagtactgc

SEQ ID NO: 36640 - DNA, 2300 bp, Homo sapien
acccagagtaaagaaaatagaaaatagaactatcagatatgggataaaactgtcaataataaatggaagcagccacatgaaatagtgaaacttagaaacatgtttttgttaacagtactttccccaattataaaagtaatatatgtttgttgtagaaagtacagagaagtataatttataccataccaacagagattctctaagcacaaaggcaggggttcctctaatttttgtattctgtttgttattttaaggagaatttcaacagggatggagacttaaatataatttgtttgtatatacatagagtatctgcagaaacacaagtaagaaactggaaacattgcttctgagtagaataattgaggaaatggggaagataagtcaggtgttaaaggcactgacttttgtattatttatgtagccacatcactaaaaaaattaaaaaacagtatgtaaactttaaaaacacaataaacattttcataagaattccctaatattcataattcttatatagaaatgtgaaataaaaataaaatccactatgaaatcataagccaaacaaaaataatttaataagagcatcctagaaacattgtttctatgtaatcattcagataaaaaagaaataaaaggatgtaaagaaggcacaaataaaagagaaagaatagaacaaagaagagtgaaatgcctagatggaaagattttcaaaataagtctgctacattgaaaatatactgccagttggttgatatttaaatgtagaaattcttgaataatggtggcatcaatcatcactaggaaggcccggcacggtggctcatgcctgtgatcccagcacttttggaagccgaggtgggtggatcacttgaggtcaggggttaaaccagcctggccaacatggtgaaactcctgtctctaccaaaaatacaaaaattagccaggcattatggcgcacacctgtagtcccagctactcggaggctgaggcaggagaagtgcttgaacccgggaggtgtagactgcagtgagattgtgccactgcactccagcttgggagacagagcgagattccgtctcccccactcgtcccccaaaaaggagcatcactaagaaaaggtgaatggttgggatgcatactggaaggaaacaacggaaatctgaaaaggtgtaagaacctaaacaaatttgtttatcacagaaaataaatcacaaaacaactttgcgttctttggcaagtttctttatgttaaacaagaattgctttttgcatcacatagatcttctaaactctttgttgaagaggtccttggtagtctgtatctaagccagttccttacggaagtggcactgagcggagtagataaagataggaacttttgaagggtcataatctctgtgtgcaaaaaagaagccacagtagtctgaagagctgtgcaggttttagggtgacactgggttgggaaccttggagctaagtgtcccacacctggcaagccatgacatacatattttctgttcaggcagaaactgagctttacaaaagtgaaatgagaaaaaaaaaaaaaccaaaaaccaggcacgtatattgagaaccattcagtccttcttagaattgcctcatacctttctcatgcatctttattaaattcagatgcaaattaattttagaaaagtctaaataggtgtgtgttttatttttctgtttcctaattaaatagtggtataagcctggaaatgctctatatctattttcggaaatctatagctcttgtttaggtaaatatcaggtacttagctaattaaatgtctcttgtttataggaaagtgtcagctttcaggatgttatgtgtatggctcaataaaattacgtacaaagtgacagcgtactctcttttcatgggctgaccttgtcgtcaccatcacctgaaaatggctccaaacaaaaatgacctaagggttgaaacaagataagatcaaattgacgtcatggtaaaaattgacgtcatggtaattacaccaagtacccttcaatcattggatggaatttcctgttgatcccagggcttagatgcaggtggaaacactctgctggtataaaagcaggtgaggacttcattaactgcagttactgagaactcataagacgaagctaaaatccctcttcggatccacagtcaaccgccctgaacacatcctgcaaaaagcccagagaaaggtaatatgaatgaaataattttgggggactttaattgaggagtaaaatatttgagaatatgaggaagattccaaagtctc

SEQ ID NO: 36641 - DNA, 2300 bp, Homo sapien
attaaaatttagaaatataggaaaagaaaggcactttaaaatatttatttctctctgattctttggagaaatgctgtgaaccaactccaggattctctatagaaacaggctgggtgtggtggctcacgcctgtaatcccaacactttgggaggccgaggcgggctgatcatttgaggtcagtagttcgaaaccagcctggtcaacatggtgaaaccctatctctactaaaaatacaaaaatttgcctggtgtgttggtgggtgcctgtaatcccagctacttgggaggctgaggcaggggaatcgcttgagcccgggagacagaagttgcagtgagcagagatcgcgccactgcactccagcctagggagacagagtgagactccgtctcaaacaaacaaacaaaagaacaatgtataacacatttatgcttccaagattttattttgctttatttcacaattattttcatcttggttaaattagaaggataattgaggctctattaaaagcatgttctttaaatattattctccttatttgcatttggcttttcctcaaatggaaaggaaaacgatatccaaatagacaattttttaaaatccctccttatttaattacctgttcatataaatatatgaaaatatatatgctagccttttttttttttctgggaaaaactcaaaggctacaattaatcctcttaaatgtgagtcccatgttttctctgcttttggaatcacttcaacatgtggcacagcacctgccttaatatttttaacattatattgactccttttgctgttcctctcgaagaaaatgtcttccttggaaaagtgtggtgtctaaccgatcccaatagcgctttaacccatgctctttctctttgcatctgtgggcacagcactggttcccagactctgggggtgggggtggggggtttctactggaccaaacccaggatagactccgtccctcacttctgagatccagaggctgcctgtctgtggctgggctgcccagccctttggaagagagtaggttgatggagcctcttcgaaatcaggcagcagtgcccgcgccacggcctctgcaggacagactccagcatccccggggtgggtttccggaggccccgctccccgccgcgccctggaaaggctccagaatctctcggcctggaggcccctggcggcctctgctcccaagcggggagtcgcagccaggctacagcgggcttgatcctcagtgctgggtggaaaaaccgcggcggcaaacgccgggcctgcaactgctgggtgtcggcgttgctggttcgcgggcggcggcggcggcggctccgcgacaacagaggacgcgagcaaccggcgcagcgcccagcagggccttggcggggtggaggggcgcaggctgggttagcggagcagagcggaccgatctggtgccctccgtggcccgaggcctgcggaccttctccgttctccggcccagggcgagagcggggcaagagacagcgccccgatagtggcgcacgctctccgccatccccgggcctcgcgctttcacctcgcgtgctggggcgagggcggggctgcggggtgtactgggtcgggggtaggaaggacctgccaggccttagccctgagctatccgtcatccgctaacgccgcgctccctgcatccctggcttggcccccaggctctgcgccgcttgtctgtagcagacacaactcagctcccttactgtcctcaggcccggctatttcaagaattccagaaaaagagtgcaccggcgtgtgcgggccggtgctgcccggaaaacccgtgaagcaggcacgcacggcccggatgcaagcacatctgtcccctcccccaaaggtctccccagctttattgatcgcgtgggtgcgggtagggatctaaatttgtctcccagattttctctgaaatcgagtctcttgggagtgaaggtccatatgattacaccacgtccttagcagtcgcgttgtgttcaaaatgggcatgggtgctcgcggcgcggatactgagttccccagagacgcggagtcttttgccccaggggcttattcttgttttctcaatggaacaggtcttcgaatctccccaggaacatctcagtaagtaggggtgtgcgtgtttgtgtgtgtgtcagtgtgtgtgtgtaaatggttcctatgagctgacagtttggtatttaaagaacaaatggacataagcacagaagtcatgacttttctatggataagattgagatttctgagatttccaagacaaggttga

SEQ ID NO: 36642 - DNA, 2300 bp, Homo sapien
gccatccatgctgatggacatttaccagatagtaatggtgctcagaatcaatttgctaatcaagtctccatagttttagggttgttatgtgcaagaggtaggaatgacctacattatcaggcaattctcttaaaaatcaatatctggatatatatgtctcccacccctcaacccccattttttctttctttctatagattaggtgtggtgtaaaccattatacttgaagtggaaatgagcttgctaacctgtgataccttaccttggatttacgggtacatttggctaacctcatatttccctttttgcattttttcactggaatcctaagataacataaactggtgaaacctggtttgggtatctaaaatacttaacttgggaaagtgaactgaaaatattaaaaatcattagctgccttaattgttcctttttcaactcagtgatactattatatcctctcttctcagcctttgaatgtacttcccagtctcttccatgagtaaacatttgaagattaaacatttgaagattctaccttgttaatatgtaatattaactgatactgtttttcataaggggtttaactgtgcctggtcaccttatataatgccgctttaaaaacatcaccatcactgatgcgttataaaacatttattctggacaacatagtatgtagaacactttccattaattactagaaatcttttgaagaggacgctgcccacaatgggaagtatttttattttagatccttgtactaaaaaaatatacttcactcagagtaaatgaaaagactgggtgcctcatcaatatcattgtttctaaatttctgtagactattcagttgcaagagagataggtcttttgtctaatgctctaacggtaaaaaaaatattagttttattaagaactttagggttaagctcttggatttttgtagcacctcttctactcttttgttcaagtgccaagtattaattcttttcagcttgtaagtaaaatgtggttcagaatgctacctctatttgtagcattaggaaaaaaaaatgctgtagatatttataataattctcgacaatattgttttattttagcatcaatttcctctcctccgttatgatttttaatggagtccttattggtgttttttttttccttgacctactttcttttcaatagctttcatatatagcctgttgtcattgttggtgatttctgtagagtgtagtagagtctaaatcacggtgaaacagagtagttagttatcacttattctagaaatgttttcgtggtttaaaagtcatctggtctgttcatattctgacttcttttaaactatgcttttcatgaatttgctccgttctccagactgaggattgaacctcattctgctctgacccaattgttcttttcctttgttgcctccaccccctagagaatgtgtttccaggggacaggcgttcttggtgctgaagaggaggagagtcaagtgagacgagatctggtacctcacgcactagatccctcctctccggcctggtgagaagtcagagacaattttgacagttcatagtcctgccttggctctcacgcttgcggtccatgggcgggttttaccttctctctcttcctctgcttctggcctgcttacaggccaacagcaaatgcagccattgcccgagaccactcagaactctccctgtgccatcctcttggggaacaggaggatatgtccgtagaagacttcgtggactggggaaagccacgccgggatcgggacgccggagagggtcgcccctccctaggctttttcccgtcgcggcgcccacgtgaccgagagcaggccttcaccagcccgcccctttcggccgctgctgcccacttcccgctcggggtaagtaaaccgccgttttccgcaccgccccaaccccgcccttctcctttccccttgccttcacctccctcgggctctctcgcgccactctccccacccccatatcttccccatcgggccctttgtacgtgctcggcgccgtgcaagcgcgcccggcacgtgaccccgccgaacgtggcattgtgttatcacgtgacccaggtgcgtacgcgacggagcggggtgtgaagatggcggacgaagaggccgagcaggagaggttgagttgcggcgaaggcggctgcgtcgcggagctgcagcgcctgggcgagcggctccaggagctggagctacagctgcgggagagccgggtaccggccgtggaagcggccaccgactactgtcagcagctgtgccaggtgag

SEQ ID NO: 36643 - DNA, 2300 bp, Homo sapien
gataggtctcaatcaatttagaggtttatttcaccaatgttaaggaccatggcctgtgacacagcctcaggcagtcctgagaacatgtgcccaaggtggtcgggctacagcttgattttatacattttagagaaatggaagttacaggcaaagacatgtatcaatacatgtaaggtatacattggtttggcccatctcaaagcagcgtgggggtgggcttccaggtcaaagatgaattcaaagatttttcacattttcaattagttgaaagagttaagctctgcctgaagatgtgaagccagctggagttaaggtaagcgggggtgttgtggcagccaaggttctccttatgtagataaagcctccgggtagctggcttcaaagaatagatgtgaatgtctcttatcagaccttaaaagatgtcagactctctggaaaagacctagtaaggggccaggcacagtggctcacgcctgtaatcccagcactttgggaggccgaggtgggtggattgcctgaggtcaggagttcgagaccagcctgaccaatatggtgaaactctgtctctattaaaaatgcaaaaattagctaggcttggtggcatacacctgtagtcccagctactcgggaggatgaggcaggagaattgcttgaacccaggaggtggaggttgcagtgagccgagatcatgccactgcactccagcctgggtgacagagtgacactccgacactccatctcaaaaaaaaaaaaaaaaaagatctagtaagggaaagagattttctatagaatgtaagttttccccaacaagagacagctttgcgaggccatttcaaaatagtcaaataaatatattttggggtaacatatttttatttctttcaggtcccactatgtgtcacgtgatgttattccagagtcaggttggaattttcttattgctacagtatattttaccagtcttacgatctccgttttaatgttaatgctggtcagttgtgtctaacctccaacgggaggaaggtataatgaggcatatccaaccgcccaccccttcccatcagggcctgaactcatttttcagggtttttttgagattaccttggccaagacagaggtccattcctttcaggggtgggttggtgatggtggtgcttagaattttatttttggtttttgtattagtctcttctcacactgctagaaagaaccacctgaggctgggtaacttataaagaaaagaggtttcattagctcacagttccacaggctgtacaggaggtatggctccagaggcctcaggaaacttacaatcatggtggaagaggaaacaagcacgtcttaccgtggtgcaggagagagagagaaagagagagagtgtgaagggggaagtgctacactcttataaacaaacatcttctgagaactccatcatgggaatggcaagggggaagtcggccccatgattcagtgacctctcaccaggcccctccttcaacacaagggggctattattccatatgagatttgggtggggacacagagccaaaccacatcagttttcacgtgtatcccaacaaacttaaacatcagcaaagtatgtgcaaaccagcatccctatatctattcttgtctcaactgcacctgcatacatcctgcatcttggactctcaaggccctaacgtaatggcagagtattaactctacacttaaatgactgttcccctaaagtaggggtaggaagaaatcagatctagctttctttcccaaatcagaatgctttccactttcatgaaataaacatacttctaggagatgtctccttttatttatacaaacatacacaccgaactggaacgtaatttgaagttgggaggtggaaaactaaaggtcaaaaagggaagaaagcaaaaacgtcccttgcacacttcagcccgcagaccccaaggaggggcgcgaggtcctcagaaccggaaaggctagcactggatgggtccccgcagccccgcgccgctgcgccgcagcctccggaagacaggggacgctgtggcgccgggcggggcgccctccgccgctctctctagcaggcggggcggcgaagcggggcggggcgtctcgggcgaggagaggaggtgaccccgcgaaaggtaagcggcggcttcggtggtgttgagtggctgggcgccggcctggaggggccagggcggccgcaccatcacgctcccgtctctgcccttcccagctgccctgccggtctccctcccagggagggagcgtcctctcggatagcccaaatcttt

SEQ ID NO: 36644 - DNA, 2300 bp, Homo sapien
atgtacaaaaatcacaagcattcttatacaccagcaacaaacagagagccaaatcatgagtgaactcccattcacaattgcttcaaagagaataaaatacctaggaatccaacttacaagggatgtgaaggacctcttcaaggagaactacaaaccactgctcaaggaaataaaagaggatacaaacaaatggatgaacattccatgctcatgcgtaggaagaatcaacattgtgaaaatggccatactgcccaaggtaatttacagattcaatgccatccccatcaagctaccaatgtctttcttcatagaattggaaaaagctactttaaagttcatatggaaccaaaaaagagcccacatcgccaagtcaatcctaagccaaaagaacaaagctggaggtatcacactacctgacttcaaagtatactacaaggctacagtaaccaaaacagcatggtactggtaccaaaacagagatatagatcaatggaatagaacagagccctcagaaataacgccacatatctacaactatctgatctttgacaaacctgagaaaaacaagcaatggggaaaggattccctatttaataaatggtgctgggaaaactggctagccatatgtagaaagctgaaactggatcccttccttacaccttatacaaaaatcaattcaagatggattaaagacttaaacgttagacctaaaaccataaaaaccctagaagaaaacctaagcattaccattcaggacataggcatgggcaaggacttcatgtctaaaacaccaaaagcaatagcaaccaaagccaaaattgacaaataggatctaattaaagagcttctgcacagcaaaagaaactaccatcagagtgaacaggcaacctacaaaatgggagaaaattttcacaacctattcatctgacaaagggctaatatccagaatctacaatcaactcaagcaaatttacaagacaaaaacaaagaaccccatcaaaaagtgggcgaaggacatgaacagacacttctcaaaagaagacatttatgcagccaaaacacacatgaaaaaatgctcaccatcactggccatcagagaaatgcaaatcaaaaccacaatgagataccatctcacagcagttagaatggcaatcattaaaaagtcaggaaacaacaggtgctggagaggctgtggagaaacaggaacacttttacactgttggtggcctgtaaaccagtacaaccattgtggaagtcagtgtggcgattcctcagggatctagaactagaaataccatttgacccagccatcccattactgggtatatacccaaaggactataaatcatgctgctgtaaagacacaagcacacgtatgtttattgcggcattattcacaatagcaaagacctggaaccaacccaaatgtccaacaatgatagactggattaagaaaatgtggcacatatacaccatgtaatactatgcagccataaaaaatgatgagttcatgtcctttgtagggacatggatgaaattggaaatcatcattctcagtaaactatcgcaagaacaaaaaagcaaacatcacatattctcactcataggtgggaattgaacaatgggaacacatggacacaggaaggggaacatcacactctgaggtctgttgtggggtggggggaggggggagggatagcattgggagatatacctaatgttagatgtccagttggtgggtgcatcgcaccagcatggcacatgtatacatatgtaactaacctgcacattgtgcacatgtaccctaaaacttataataataacaaataaataaataaacaaaacaaaacaaaagtatctttccacctcttggatgtagtactgtctctgaaaaaaggggaaaggctttgctggcgacagcctgagtactgacaatctgagtctcatctggcttcccccaatgtcatggactactgttcggtgccgaaggcttactcaaagacagacgcattggaagcctccaaaagaaaacttcattccgttaagttctacacattgtgttgcagggctgaaaaagcacgagtgtccgcactatgacaaaagaaaagcggcgtctcctcaaaacaccaccatgttcccctatgagtctggtgagccaagacactaagaaactgcaggaaacgagagagttctcggggtgggggtgtccatggatgaagcaccgaacaaactggagcccgcaaggtgagtacgggaaatgggctctgtggggccagagagcttcaccgacttggggtgcg

SEQ ID NO: 36645 - DNA, 2300 bp, Homo sapien
tagctgttttcaagtacaaaactaatacaagtttcaattttaaaagctgcagaactaatcataaagtcaaggcatggcaataacttactctgacattaccactcacctaagacaaaaccagttaatgtccagcacacttccatcagaactttcttagtcttcccactagtttctccaccttcttctcttactttttgtttccactgcagctgtcactcatttacttacatatgatattgaccaatctctagttattatcactttgaggatctatttatttttaagctgcatttaaaaacctcatttactgtgttaaaacagtaatgacataaaacatacatacacatagattagcaaggatgctgggaacctggcattacactgctcttggctaagtaattttgtgattaatttgtgtgcgggcctacctgcaaaataattaatcaggcacccctggctgtgcaatctgccccactcttatttcttcttcatttttccatcacccacttcttgttcccttttccatgcatgattaagaaactgttatttatcttttcttaaaaaaaaaaatagaggagagtagaacatttcacaggtgcctgtaaaaaaggtctaaactaaggggtatttgcttcatttgtttctctctggtaaaatgttctttacctttttcttctgtccatcctcctgtgacggaagcgtgcaatggaaaaaggaagaagcaaagataaaggactgcccgtttacccaactccatgagagtcatttacatctcaaagtgtaagaatagtaagcccctgaaattaataacacacaatgtgagaggctgtacagatggtcctacaccgagagtcaggactagtcatttttgaatgattttcccttctttagcaaaattcttgctcagggagttattccagaatacttgactacctattaatatattgtacatgcaaattagactaagatataaagaatataagaattactttgagggaaacacttaatcttcaaacatacattttagaaataagcacctcaatagaagacaaaacaaaatgaccagaatcataaaatgttaacgagcaggaaccttattaataatgaaagcatttcctttaaaagacagagaattataaaatgggcaaaatattttaatgaaagtataatacacttttttatagtttcacatgccacattatcttaatacttaagaaactaacttgaactttggggcagaaaaccttaaaaataatttaaattagtttaaacaagtttgggatagaatcagaggacttcatggcttgaggggaaacatagcataacctcagattctcactttgctacttataagctgtgtgtctttaagtgacaactctgattctcagtttctacctttataaaaggagcaatactatctattgcatagataggtactaaatgtgtgcattaattaagatgacacattttaaaagatgcagatgttcaatgaatggtagctactttcatactcaccatttagtctaactcccccttctaaacccctttctgagaaacccagacccaaggagatgtccttaccaggagggtgcgatcacctaggtctcccaattaccagcccaccaatatttcaccacctcaccccatcttactcttgaattgataaaaggcctttgcatgtatattacaatatttaagaaaaaaaattataatcacttaagttttaaaaattgattatatatatgttgtttttaaggtaaaacatactttctaaaaaagtatctttcctgccgggcagggtggctcacgcctgcaatcccagcactctgggaggccgaagcgggtagattgcttgaggtcaggatcacttgaggtcaggagtttgaaactagcgtagccaatatggtgaaaccccgtctctactaaaaatacaaaaattagctgggtgtggtggtgcgggcctgtaatcccagctcctcgggaggctgaggcagaataatcgcctgaacccaggaggtgaaggttgcagtgagccgagatcgtgccactgcactccagcctgggcgacagagcgaaactctgtctaaaaacaaaacaagaggggaggagccaagatggctgaataggaacagctccggtctacagctcccagagtgagcaacgcagaagatgggtgatttctgcatttccagtcgaggtaccgggttcatctcactagggagtgccagacactgggcgcaggtaagtgggtgcgcgcaccatgtgagagccgaagcagggcgaggcattgcctcactcgg

SEQ ID NO: 36646 - DNA, 2300 bp, Homo sapien
gtctgcccacaacatactcctacacttggatcatgtaggggttgagtttttcccattgaactacacagccattctgcagccattggatcagggtacagttggcacagtgacagctcacttctgaaagcagttggaacaactctttctaaatgtagagcatgaagagaaaaatggagaaaagcaacatgagtaagccattgacatgattgcagagacttggtgatctataaagttatctgtaatcatgaaatgttagcaaaacacaggcatgattcctgtggaatcccctgaggtcctcctgtaagaagactgcaactaaatgtggtatttgaaccaatctagcactcaactgctgctgtcattgatgtctcaaaccagtttaattttgaagactgtgtggctacagatagcaatttaactatttcccaagttaccaaatcctgaagttgctacaggagtgctaactgatgtaaaaattgaaccagaaagccgtggtgatagcgatgaagaaggcaacaatgataatcatgatatgcatgaggaataagtgatggaaccagcaacagtgaacatttctgaagcctttgcaagtatagaaagtgcttagaacgttcctttttcttcaagcagatgttcctcttgaggtgcatacccaattaaatgatatagatgaacattcagcgactactgcaacacaaagtattttgaaaagccaagttcctagttttctccttaactacgaagttgtgaaaatattgattttataaagtctataaaatagtaagcttaatgaatacttatactggccaggtgtggtataagtatacaggcatgggatcatgcctgtaatcccagcactttgggaggcagaagcaggtttgctttgttgccaggagtttgagaccagcctgggcaacatggcgagaccccgtccctaccaaaaaaaaaaaaaaaaaaaaaaaaagccaggtgtggtgcatgcctgtagtcctagctacctgggaggttgaggtgggaggatcacttgagcccaggtgtttgaggctgcaggctgcagtgagctatgatcacgccactgcacgtgcattccagtctaggcaatcgagtaagaagactgtctcaaaaaaaaaatacttgtgcaaacaaagccccaatgtgtgtttaagtatgaatgtttggctcttaacttttattttataacatttactgtacagcgattgcagcatttcccccaaataattttactatattgtcatttatgtccatctttggaagctttctttctctacctcccctctttcaaccctcacctcccatcccagcattagatggcagagaggataaaataagcttttgcctaataatacctagaagagaaaaatactcccaaagtgctgacatttcagctaggaaaacaagaagacaaaagacacacttggatttaataggatagatttacagtagctaagataaaaaaggatattcagattaaggagatagcagggcataacctacccagaaagttgctgattggcaatggaagagtaagtacaaacagctccttatccttactgcttgggaaaatgagttcgtgtgtgggctagtggaggaagacagaggagcagtgggggaaactggccaggagtgaatctgtaggagaagataatgagcaaaggaatgctggtcattctctcaggttggtgttatggaggggctgttgaaaggtgaggaggagtgaaagcaaggaactaaggaaaggaacggataacctactggcctcacctactcatagtcttggttgcatatgatacgacgtgactcagagcaacaaacaattctccagtcttctataaaagcaggaaaacaacctttgcccaccacttttattttgagatgaaaattaaaataatgaacaaaattaacaaattaaagttaaagcaccatttacaaagtacattatacaaagtaataagataactgacaatcacatttggtatgtatctgggttggaattcaaagaaggaatttaagaattactttttaaagaaatttatcagagaagcacaattatgaagggaaaaaatatattattttgtttttagataataaatcatcattgatcaagatgtcttcagcacctgagcctccaacattcaaaaaggaaccacccaaagagaaagagtttcaaagcccagggctcagaggggtgcgcacaacaaccttatttcgtgctgtgaatccagagctcttcattaaacctgtaagaaatacatccaggataagactttgtgtttaatcca

SEQ ID NO: 36647 - DNA, 2300 bp, Homo sapien
cacttacagttgtatgtattgggcagggtatttagcctctcaatctgtttccttatgtggaaataaatatactaatacctatcttacaggttgttatgagactttaatgaagtatttgtatctattataaatcctggcacataatagtaaatgtgagttcattttgcccttggccatacttgagcacctttcagtatgtgtaggagaggaaatattatctctaaataacaccctaattggatgggcacagtggctcacacctgtaatcccagcactttgggtggtcgaggtgggcagatcacttgaggccaagagttcaagaccagcctggccaacatggcgaaaccccgtctctactaaaaaaatttaagcaggcatggtggcatgcgcctgtaatcccagctactcgggaggctgaggtaagaaaattgcttgaacccaggaggtggaggttgcagtgagctgagatcgtgctactgcactctagcctgggtgacagagcgagactctgcctcaaaaaaaaaaaaaaaaaaaaaaaattttaaagtaccctaataaatgggtaaaagaaactatataacctttaaatagtagctggtagcataaaagtagatacatatagataacatgaggacgtttactgtacatacgtatgtatatataataagcaaatcaaattgtactataggtttccatctctcttttatccccgtaagagttttcagtctgaccttgagccttgtaggtattttcctaagaactctcacaatacttctctgatcctctcttcctttaaaatggtaaactaagggtgatttcatttcactcctgatatttgaaaatataagaagctggagagcagaggtgtttggaaaaaaaaactaaaatgtagggggagatcaaattggaatcatcttctaaaaacatcaattccaaaattgtttcttagcatttagtaagtgcttagtatgaatgattcattatgatctctaaagtgacttttcatacccaggacagtgtatctccattcttagatataccttaatgattgattccttatgccttatggaatatctaacccaaaccttaagtggataagttaaatctattgttagaaattaatcttttctattcagtgacctttgtcattgaactgttttaagttaaaaaagaaagaaagttgaaattgtctgttctttataagcattttgaaatgtccgtagaagagctagtgagtatttcataggacgatagttctcaatcctggcagtgcactatatagaactttgaaaaaaaatattaatacagatatccaaacacagacccactggatttaatactaatctaacacagagccactaaattaggacctctacggtcaggactaagcatgtgtattttttccttcacgtttaaataaccttttttatttcaagatagtttaagactcacaagttgcaaaatagatcagagttcccctgtacccttcatccagcttccattgatatcttacataatcctggcactttgtcaaagctggaacactggcattgaaacaatactattaactcaggtacagaccttatgtacacttttttcccccggcatagagttttatgaaatttatcatgtgtgtatattaatgtgccatcaccacaatcacaacatggagctgttccatcaccacaaaggaactccctcgtgttaccccttagctgtcactctcttctccccaaacttgaacccctgacaaccactaatctgttctctatcactataattttatcactgagaatgctatctaaagaatcatagattatgtaacccattgagattggctttcttcactcagcacaatgcccttgagattcatccaagttgtttatcaatagtttgttccttttacagtatgtgcatttttaaaaaaagctttgcagggatcctgttgtacaatcagggttgagaacaactaataaaaccaatgggatttaaacataaaagaggatagtgatagcctacacttgtatcacatttttatgaagttcaatacgttgatggtccatgcttagtcacattttgtcctagaaaatcttttctaattatttctacacaatgttgggcttttgcagtatgtgtccatctccaccgtaatatatgctgccctgtgtttttaagattcgctgatgaactagtaggagactctgtgccgccaaacatatacttttaattgctagtgacagaaacataactcagaatagactgcatgaaatggaatttcttgactcttttaacagagaaac

SEQ ID NO: 36648 - DNA, 2300 bp, Homo sapien
atgttgcaaaagaagttgacattatggaaatatatagagcaaaaattgcaagtcctgatgcattgcttcccctacaccctccctgcctcccagagacagttattttaaacaatagagtctatatccttccatgcccttttgatgtgtttacagccatatgtatgtgcataatcacagatcagatcatacatatatatattttaagaaaaccacggtaactatttctatatatgtaatgattctttgctggaacaggacagcagttaggagctcagggattgtcaggtgcaagagaaaaaccataatttccagatttttttaccaggtcatttacctgcccatgatcactgatttgtagcagcagagctgagactgagacctccctatttggcctcctagtctgtgactggtcccttttgctttgctgcttgagttaacaaacagatacatttctatataattaatgggtaaaatctttttcattagaactctttagaacagggacacaggtaagatcctggaggaggtacagataaatgagaatgagagctgcagctgtgacagtttaactggtacctctcttcctgcatagactgcaggtcattgtggaggtagaagaggaagatgagaggggataccaggagggggttagggaatgagtcatggcccaatgcactggaaggtggatcctcttttcttttctctcctgccagccatctgcaggagctctgtctcacctgtgggagcctctgggtcccctcctcacacacacttgcggtctcctccctctcttgctagattgtttttgcgccccctccagccctttcctctgtgaggtttgatggaaggttttcaatgtctgccttttattgaatctgtagactaggattaaggaactgccatgtgtactgttaaaatatatccagctagaatgcccattttgtttattgatgtttcccaagtgcctggaagaaagtctggcacatggtaggcattcttgaaatatttattgaacaaatggtttaaatttcttccaattagtcgaagccactcttcagcacaccagatcttatttctagaaagtactagattcctctgttctttagagaatttgcagaaactaatatatggagagagaccactgttgagaattctatgcagattttttattttactataaactttcatcaagacttaaggattcagaacatttatatatcatgagaaatttgttaactatacagaaaaccgttttgtggattgaggtgattagattctaaacagattgcccaggagacactggactctttctcttaaagttaaaaaaaaaaaagtccaggggcggtggttcacgcctgtaatcccagcattttgggaggctaaggcaggcggatcacgaggtcaggagatcgagaccatcctgtctaacaaggtgaaaccccgtctctactaaaaatacaaaaaattagccaggcatggtggcgggcgcctgcagtctcagctactcgggagactgaggcagaagaatggcgtgaacctgggaggcggagcttgcagtgagccgagatcacgccactgcactccagcctgggcgacagagcgagacttgtctcaaaaaaaaaaaaaatctgtttgtaaaggttctaattgttttctagcccaaggcaaggcatgaatgaagtgaccactcaggattttttgtggtcatggctgtaattcctactgacagcttcccttattcaattcccagcacatgcaaggccttttgtatactccctgcatctgggtgtcccttcctaggagattgtatcatcctacatatcttcaggcaaagaccctggagggttaaggccttaaagggaaactaagcaaactgccaaaggtcacagaggaaagaggtgacagggcctgatttgaaccctggcctttatgatgccaaagcttatgaccttccattatgctacctgctttacaggtagagaagctatgtgagttttctagagggtttgttcacttcaccagagctcatcaagtaccttctgtggatgtggcacaaattaagagcccttcctcaacattgtgtaaaatcactagagcatggctgcccccaacaagcaaggctggatggactggtacaaatagcacataggtgctgcaagagttcaaagtcctggaaagatcaagcagtatgggtggggtatgtagtgaggtaggttttttggaggaagttagtcgtgggttgggccttagagacaaggtaagaggtcccacttgtgagagaggcaaacgaatgagaaccg

SEQ ID NO: 36649 - DNA, 2300 bp, Homo sapien
tcacaaaaattaactcaaaatgataacagacctaaatgtaaaacacaaaattataaaacctataggatataacagaaaaaaactagatgaccttgaatttgatgatgattttttaatagaataccaaaagcatcatccataaaagaaaaaatggataggttgggcttcatgaaaattgaaaacttctgcactgcaaaataccttgttaagggaatgaaaacacaagccacagacttggataacatttttgcaaaacacatatgtgataaaggactgttaaccacatcatacaaagaacccttaaaactaaacaatatgaaacaaaaaacccaacttttaaaatgagcaaaaaatttcaacagatatctcactaaaggagatatatagatggcaattaagcatatgaaaaggtgttcaacatcatatgtcattagggaattgcaaattaaaataacaataacatactactacacacctattaggatggccaaaacaatacatttacaacaacaaatgctgccaaggacgtgaagaaattggaattcttttctctgctgacatgtgggaatgcagaatggtatagccactttggaaagcagtttggcagtttcttacaaaactaaacatagtcttaccatgtggttcaacaattgtactccagtaaaaagatcagtggttgccaggggttgggggaagggagggatgatagagcacagagcatttttataacagtaaaactattctgtatgatactgtaatggtggatacctgtccttatacatttgtcccaacccatagattccacggcaccaagagtgaatcctaaactatggacttcaggtgataatgatgggttcatcaattataacatgtgccaccgtggtgcaggatgtcagtagccagggaggttaggtgtgtggggatagggatagacgggaactttgtactttctactcaatactgctgtgaacctaaaattgctctaaaaaataaaatttattaatttttttaaaagtggggacaaagtcttccctggaacctgtcacaagacatgcctatgacatgcttttggtgtctacatatcaagccagcttttttccacttaattaacatctcatattcattaaacaattattaataaaatacctaccatgggataggcattgttctaggtactaggaataaagtagcaaatgaagcagatatttaaaaactcagatatttcacatctgggaatctgaataaattacatgcgatacaaaaaattcttatactcaaataactccactgttatttataatggtgaaaacttgaaaatatactacataatagtgggaatacttcagtaaattatgacacatccactcaattgcatattatacagctattaaaaatacagcccataataagatataaaaatgtctgtgttgtaatgttgactgtaaaggagtaacataagatatggtaagaatgtagataaggtgagtcattacatgaacatgttaacaacattaatcctttgttaatgaatctatgggtggcagatttgtactcccaaattttcataaagagcatgtcttatttttataatggaaaatgtcccaataaaatatttttaagcctagacacttaatatttgaattgactagccaaatcttcatgcttttaatgtcgtaggtgtgtatctaataattgctgaagctggaatttccttcgtgtgcagtcagccacacctcgctatacctgtcaaaccatctcaattatccactccaattgtcatgcctctcgtgggttagttgtaaatggaacacaactctagcatgacattgcgacttaaaagagcatatccagtatttcgatgatcattctggaaatatatttcctcttcaaagtttttacctgtcagtgaggcatttaaattggggcattctcttgtttctgaagtctgataaaatcttgaccttagaatatttattggtaatatttattcattcacaaaattagttcttagcatatcctatatgtcaggcattagtctagagctggggctagaaaaatgaataagattgggttcctgaccccagcccaggctcacactgtagtaaagggaaacagacatgaacactaggtgacatggagtgttaggggcgctatggtagaagtctgcagagagtgcaatgggcgtccaaatgaggaagtgatcacttgcacaagagtgggaggcttggctggaaaggcttctctgaataggatgacatttgatctgtgttttgaagggcatcgttggcaaggtaagtaat

SEQ ID NO: 36650 - DNA, 2300 bp, Homo sapien
gccaaagcaagtcacatggctaaattcaaaatcaaggattggggaagtatactccaccaaagtccatggcaaaggtgtggatgctaagaggcatgaaggattagggagaataattcaatgtagcacaaaacgctaaataatacttccaaagtcatacccattgtagcagtcagggattcagtttggctgaatgtagcaaaaaacccaaataatagtagcttaataaaataggagtttatcttctctcatgcaaagtctggagatagccagtcaagaagctgatagggctgttccatgacgttaccaggaactcaggttcctttttcatttttgttccaccatccttaagatgtgaccctcatgtttatgttcacagcaaggctgctggagcttcagccagcatattctcatttcaagtagaaagaaaaggaaaggcaatagacataaaatggaagtgctttccctgacacctcatccagtgattacacttacatctcattggctagaccatgtcacaggccactctcactgagaaagaggttgagagatttttttttttaaaagagaacactgtcattcccaacacagggttaaattagtaacagaaagagaagaaaacattgacattaagtaggaattaacagtatcaaacatacttcagggagtatttgtgccaggatttgcccattagtttaaaactatacttaatatgatggtattattcttaccatcttaaaagatatttaatattctaatatataatatatgctcatggaagacattttggtagctatcttaaagtataaagaagacaaatcagccataagccattacaaagttacaaccactgttaaaattttgctatctcaccgtcctttggttgctttaccttgtatacttacagtatatttgtatatctaaattgggttcattctctacaaatagccagtctcatctcccttgtatttttaaattttgttttatagatcataagacaatatatactcattatggaaaaatctagaaaaaacagaaaagtataaagaaataaaagtaatttacctataattccatccttagatctaattgcttgctgtgattttgaaaaactgacctacactttttgtgcattatatgtatgtcaatatagtttaagtcatattatataaaaatttcgcatttggcttttaacaaatataagacaaacacaaggtttttgttaacataattttaaatacctgcctgatattttacttaaataacgtgtttagatttctaaggctgtgctattataaatcttgttactctgaacatctatttttacacaagcttcttccacattccgggaacattttctagaaggcggaaataaaattgtgttatattatgatgtatattcttgagtttttgtgttgattcatttcctagtaatcagggaatgtccttaagcaaagcatattctgcatatttgtttgcagtttgagaaaaattactgtttaaaaataaaaccttgttgtttgatgctctccttctaatgagtatttaatcctttttcacactttcacgtctgaaggtgggcctaacgatattatcgttaagggataaaacctcattattttgactcggacactaatgtgttcttatcatgtgcttcttgaatgagcagttttctcttcgggcatcttggagcgttctgttacagacttcctttgaacaacgggacatgaaataaaacctcgatactttttacttttgttttttaaaactagatacttttacaagaactctatttgcccaggatacagcccttccgttttcccagcctctccaactggctcctccctctcccccaccccgctttcaaagccgcctcatcattcccacgctagcaagttaatatccttatttacgagaacttgtgtttcacagtcttaaccacggaggttaagatgtctctgcctgaaattcctttgtttttaaagtttttccagcccatcttttgggggaaagaccctcaaagtgggaccccgccccacccccacctggccccgccccctctggtccggagccttccatctccatggttacgcggcggtggctgcgagcgcccaactgctccgaccgtcgcggtgagggccccaggacagaagcagacagacacggctcctgctgtcgattccgatccaggtcagcctactcggggctccgcgcccttgacccggaggcgtaccccgccaggcggcgagcttggggcggctggcggagctcgggcggctggaggaccgcgtcctgcctcgtcg

SEQ ID NO: 36651 - DNA, 2300 bp, Homo sapien
caccccattagagaaacattgatagtaggattgagggtaccaggctgattgagtaaatggaaaagctgaaaacggatatttcatattgatgaaagaaattgagtctgtcatttaaaatgggtgatggaatggggcaccattttatccttaggaagtctttgccctctttcatcctttaaaatgaggaataggaaaaatgtctagctctcctatggctttcttccataattattttaaagcatccattttttggctcagatccctaattagaaagcttgttttcatgcccattgccaaaaagttactgctggatgcttaattattaaaaatggacatgaggcaatggcataactctcagtaatccagctttgatgcgtgataagttttattatgtatcctataatcaggtatcagtaatttaaagaatcatataagtaactcagacccttaacttgctgctaaagaaaaacgttatttaacgtctgatatctttattctatcattttgttttccttttttttttttctggtttattttagctgctctacagagtgtttttcctcaggcagagcttgggacatttctaactctttctaagaaggacaaagaacgccagctgaaagaactcaccatgattgttactggaattcgtttatttaacagagactgtggaaaaggaggagaaggcattgatgattgtaggtatatcattagattaattctaaaggttatgtatgtttaaaatttaacttgcacagtgaggaaaataataaacaacacaccactggcattcttaaatttaagatttgcattttttactgtttccttaagaataactactgtttataatgtgtagtgatttttacttttgctggggcaagactttacattttatgtaccatgaagctagtaggagaaagtgaatcagtgaaagcaatgaagggtcctgctcaaagctaacctcccagttcagcagggctttgtgttcattactgcaagtccgtaaccaaaagggagtacaatttagttatttaaaaaataaaaatcttcctgaaaacagttcctggtgcagttaatggaatgaaaagatccacgaggagatatttcaaatctctaaattcgggggcatttactttgtggttatatacttaatgcattctttataagtttgaaagtacttatgaaatatttaatgaagtacctaccagtagaagtaacttccttatgaaatttggtactcctgtaggcccactgataaggtgttagtgtctttcaccaaatcactaatctagtataaaagggtaattttttctattttaaaaactgttctaaaaagtcaaatttccattttcataaatgaccctcccttgctagactattctgtcatttttcaccatccagatgagtttcttaacaaacgttccttttttttttttttttaataactagaaaagaagatatacaaaaggaagggtcagtggcttttctggaagcacatggttaacaacacataataccaaactctgcctattctctgaactcttctatatttagtggcaaaagctgacctactgtaactgggttatcattctgttaatatcttttgtttgaacttgttttagattctttttttttttttttttgagatggagtttcgttcttgtcgcccagattggagtgcagtggcgcgatctcggcttactgcaacctccgcctcccgggttcaagtgattctcctgtgctgggattacaggcatgcgccaccacgctcagctaatttttgtgtttttagtagagacggggtttcaccatgttggccaggatggtctcaatctcttgacctcgtgatccgcccgcctcggcctcccaaagtgctaggattacaggtgtgagccaccacccccggcctagattttctttatgttgtgggacccaggaaacacatgcctcattattactaatttgattggggagaaaaaccctaacttaatgtttaaaatgtaactactttctaggcttcttctccttaattgtttttagtctcctttatggctgccttttcatactcttacaaacagtgccagctgttctccatgtagcaatcccagccaccatgcagcatattgattaccagcttgagactgcccggagccaggtataccgctacacagccatccttgagaaggcagccaacgacccactcatgagggctgaacttcagccatatatgttaaaagaagcgctatataatatacgacaatatgaggtcttccttcagatcattttggtgagttaagttc

SEQ ID NO: 36652 - DNA, 2300 bp, Homo sapien
tagctgggattagaggtgcacaccaccacgcccatctaattttagtatttttagtagagacggggtttcaccttgttggtcaggctggtcttgaactcctgacctcaggtggtctgcctgctttggcctcccaaagtgctggaattacaggcgtgagccaccatgcccagccagaataacaatatttcataagtgatcaagacatttcatatctaattctttttttattttcaggaaatccagcaattggaattttaaaatataaagaaaaatattacacattcaatagtaaagatgctgcatattcatttgcagaaaatcctgaacattatattgacatagttagagaaaaggccaaaaaaaatacagagttaattcaactattggaacttcatcaacagtttgaaacatttattccatattctcaggtaagcagggtcaatattttatgaatttatgacatttaaaaatatagttaatttaaaagttgtattttgttgtagaatgcttcccaggtccacacagagagagtcagatgagggtctttacaggttgtctgaaagggattcatatctgaagatgaaaactaattgaatcaaagaataatgaaaacaggatatggagtcaaattgatgaattaggaaatggggaaaatctgaatcagaacaacttcattgacttataaataattgaagctgcagtatatttctgtatctgaaattggaggagctcaacacagataacacagatagtaacttatactcagagctgcaaaacaatttaacaggtttaaattgtagtagtctgaaaggccacagaatggatctcaaggtgggtttcttgtatgtctgtgcctattgattaattcattcatcttatttagtaagccacttattgtgtgtcagtaattattcttggcataagggatttcatgaaacaaaacagataaaaatctctaccggtttggaactcacatttgaatgccgtatattctaatgttcttcctctttgtctctcattttcgttgttcatctctttttttgttctttttagaggcaaggtctcactctgtcacccaggatggagagcactggcacaatcatagcttactgtaccttccaactcctgggttcaagggatcgtcttgcctcagtctcccaagtagctgggactacaggcaggtgccaccatgcctggctaatttttttaaaaaacttttttgtagagatggggtctcgccatgttgcccgggctggtctcaaacttgtggcttcaagttatcctcccgccttggcatcccaaagtgttgggattataggcacgagccaccatgccaagcctgttgttcatctcttaagtggtctttctttctctcctgtctcttgttgaattcctctcttttaaactcactaaaatgaaaacattttgaaatacatggtttaaaatgtctgttgtttcctttttttttttttttttttttaaccaagtcttgctctgttgcccaggctggagtgcagtggtgtgatctcagctcactgcaacttccgcctcccaggttcaagcaattctcctgtctcaactttctgagtagctggaactataggcggacaccatcacgcctggctaatttttgtatttttagtagagatacggtttcaccatgttggcaaggctggtctcaaactcctgacctcaggtgatccacccaccttggcctcccaaagtgctgggattacaggcgtgagccaccacgcccggacttgtttgctatttttatcaacattttaactctaaagcaggtgggctttgtgccattgacctggccagcagagatccaagcagtaagtagtgagaggactgttgggctggtgacagaggagcacagaggatggtctgaacacacaggcaagaagaccagaaacaagctagggactaagtcatctgaggagggtggggggaagtatggtagtcaggaccatggacagctcagttggtgctgctattctgacatcgtgatgtgctgtgttctgacattgtgttattctgacatcgtgatgacatcgttgatgtagcactccagctcccctttccaatgaagctattctgcagagtcctaggttcctactgttgtgatgagagattggtctcgtctacagtgcctttctgtatgtgagccaaatagtaggtaggcctacaatttttgtttccactaaaaagttactctgaaaatgtactaatttaacttcattataaggcttgtcagttacccataatcctgcgaggacgtgttaatacctcag

SEQ ID NO: 36653 - DNA, 2300 bp, Homo sapien
ggattagagttatcagtggagtaggcaattgtcaaactctcttttcctagagttggcttgagtggaaataccattgatgcaaagcaagcataaaatggtagaaataggtacaaaccatcagtgactggcaggaaaaggaaagagggattacggtaatgaaaaaagaaaagagaggcaagggatagttaagctcaaatatgaaatgtctggatacacatgattattactcatgtttaattcctaatccagacattgaattttacattatctccctgtatccttttatcaattataaaatgtgacaattattggctttttagtcatattatactgtaggaaataattgctttaaaataacaataacttgggaggctgaggcagcagatcaggaagtcaggagtttgagaccagtttggccaatatagtgaaaccccgtccctactaaaaatacaaaaaattagctgggtgtggtggtgtgtgcctgtaatcccagctactcaggaagctgaggcaggagaattgcatgaaccctggaggcggaggttgcagtgagccaagattgtgccattagactccagcccaggcaacaatgcaagactctgtctcaaaaaataaaaataaataaaataaaaacaataacttagcaaataggttttggatgcttaatagcacaatgaaagaaatatgcttaaactgtcagggaaataattttcttttggtatctatatctatatatgttctttatggttaactgcttactattctttaaacattaccacatttaataatctattatatagctaccatatttgaattcaattataacctccttaagccttttggtatttgcttcctcacagcctttttatttaattaagttcatacttttactttattaccaatggatacagtactgggcttctttttatatacatcattgagactagggtagctctgatacatgagcaggaaatggaagagagcaggggattgaggcaaatactgtagttttctagtgacaatcagaaatcattagggactcaagtggcattagcaatggctgcttgaagcactgtaaggttatcttatcaggcacaggggcttgtatctcatatgttaaggattgctgctgctttctctaaccagagttgtaaggaaaactaggcacacatgaaagaaagacattaaatcaatatttttttcctccaagactgaggataattcagagtgagaaagtaaaaattagttcagagtaagactgtaaatagctgcttggtcattaattgagctgggataacaaacccaggtaaaccctgctgcaaagttaatgggaaataactaagtatatgctgacactataaagtataatagcaaggcccttctttgagtgtttgctttctaattcactgaaaaactttgttctctaaaatcatatactctaggaaaacttgctgcttgaaattacatcagtaagaatgaaacaccctacttttgcttggggggatctacatcattttcatacaaagaagcagcctcaattaaggggctcctgaatacaacattccacatctatggtaactttgtagttttcaagaaacaggatcctgagactgttctacagtccctattggatacatatagtcctgctttgagtttatcaaacactgcttcctttaaatttcacctaatcccatccttccctaaaattctataaatttatcttttttgtttcctgagatacctctggtgttcagtttccctcattggaatgtgttttaggtggttcttgcagtgctataaagaaatacctgagcctgagtaatgcataagaaaataggtttaattggctcatgattctgcagcctgtacaggaaacacagtgctggcatatgcttctgggtaggcctcaggtagcttttactcatggtggaaggcgaagtgggagcaggcacatcacatggccagagcaggagagagagagaaagagagagagagacttttaaaacaccagatcacctgtgaactcagagcaagagctcacttatcaccaaggcgatggcccaagccattcttgagggttctgtcctcatgatccagagctcccaccaggccccacctccaacattgaggattacaattcaacatcacatctgggcagggacaaatacccactttatatcagaaggcatcagtaagctcaactttgtcagactatagtttggcagatttgtcctgttggtattgggctaactgggttaggacaaagaggcatgaaaatctagttaagtttgatgccagtg

SEQ ID NO: 36654 - DNA, 2300 bp, Homo sapien
agcatgatgttatgtgaaccagaaatgccacaaaaatggctcagcaacatttgacccaccactttaattgggatctctgtgtgtgtgtgtgtgtgcgtgtgcgtgtgtgtgcatgtgtgtgtgtgtaaaatgcgcttcctcaccagaaggaatgatagttcctagttgattctaccacctaggacaggaaaaaacaaaacctcttgttgccagaaattaaaacatgcttcaaaaagctagtgcaggccaggtgtggtggttcacacctgtaatcccagaactttggggggctgaggtgggaggattgttttaggtggggagttcgagaactagcctgggcaacaaagtgagacgcccccacccacaatctctacaagaagaaaaaaagacaaaaaaaaaaaaaaagtaaaaacagctggtgcagacttgaaaacagaggcaggcttacaagtgccttttggaacaaattgagcatttagaaattatacttaattgatgtaagctgacactataatgatagtccaaaatgggacaagataaaccatacaaagcagtagctgtaaaacgaaggactatatgatataatatttttaatttttaaaattaatttcacgtacatatatgaatattgtttaaatgtatgcataagtacatacacagtagagaactgaataattctactagtggaaactgtatcaattacaataagggaagattagcaccagtgagcacacttactaccaggtagaggaaaagtccaacactattgcaaaatgagattaatcaaatgtctgcctctacaaagtcaactctggtctcctgggagcccctcccaatattaatatgatgctaataaggcatgcaaaatgttccaacaatgttaacagaccagatatatctatatgtatatttaacaagacaatggtatacaaccaaccctctaaaaggacaattttggggaaagaacatgctgcagaaggtgtgggctgctgggcagctcagaatcttgcatccctattcctgtaagtgctgaggtattttcatattattttaaaccaatccacatatcttgaacatcatttatttcaccaatgaattatttctaatatcaattatgatagctaattaacatcccctagtgaaagtggagattatagtggttaaaatgcctgttgatatatctaattttttttgttttttgagacgaagtctcgctgtgtcgcccaggctggagtgcaggggcgcaatctcggctcactgcaatctcccgggttcaagtgattctcccgcttcggcctcctgagtagctgggattaccggtgcgcgccaccacgcccggctaattttttgtatttttagtaaagacggggtttcgccatattggccaggctggtctcgaactcctgaccttaggtgatccatctgcctcgacttcccaaagtgctgggattacaggcgtgagccaccacgcccggccgatacatctgattttttaaaggccgttttgttgtgcgaagatcattagttagaatgcctggctgggtaaatacaaccgatgactgctgacgatatggaacaggcacaagacttctgaacgatatgtagaataaattataacttatctagaacacaaggtaacagtggaagataatgagccaggtggaagttacaaatgttgccgcaagtagtttctgttactttacgagttctgggagcttctctaacagctttgacaggagtgaatccccaaggctaaacccaaatccttatttgccgcctactcacgcctttgtgaggactacgattcccagacggcaacgctcccttcactcaacttccttagctggcggggagacgcagtttacagaactacctccccaaccgaatttcacacacctgtcacctaggacgcggccgggaaggcctcccttcgatccgcgttctccccattttggggtgtagcttggattcctgagcccagttttagtgcgtggccgaccgggaggccggcgaggcgctctaggccgagcggcttcgtctctatgaccacaaggggcggtccccggtgtcctgcgcgggggcgcggagggggcgggcgtcagttccgcggggggctgtcggggaaccatggctgccccgagaggtgagaactgggtctgctgggagtggggagtccgcggggggcggcggcgggcgagcatctgcgctggtcagcccctgtcgggcagcggagcaccctggttgcccagtgcctctggggcctggctgaggcgtcaggagtttgcgtggagccgctcccg

SEQ ID NO: 36655 - DNA, 2300 bp, Homo sapien
aggtcaagagatcaagaccatccagcaacatggcgaaaccccgtctctactaaaaatacaaaaattagctgggcatagtgggtgcctgtaatcccaggctgaggctgtagtcccaggtactcgggaggctgagacaggagaatcgcttgagcccgggaggcggagtttgcagtgggcagagattgcatcactgcactccagcctggcgacagagcgagactctgtctcaaaaaaaaaaaaaaaaaaaaaaaaaaaaaacatgctctatgctcggtggctctcaatttgttttattttctctctctctctcttttttttttatgctgcacccatttgagagaaagataaacctctaattaaaaacattcactactttgggcattgttaaaatgggaggcaactgctctctccctaagccgtggttcttaaacactagctgcagacttgaatcacctgagaagcatttaaaactgcttaagcccaggccctttagcctgaggttgggcatcggcctagaagttataaaaattatcaggtgattcagatgttcatccgagcttgataaccactaccgaacggctacccaggggcagaaaggtgtagtacagtggtctctctgcacattagatcacctggggaatgttttacatccttctgcccagagcccacgttgtactaattaaatcaaaatatttgcacatgggagccaggcgggttttcctgaagatttccggtggtcattcccatatacggcaaagtattggaactgctggtgtagtgactaagaacattgaccatggaagactcaggtttaaatccagcttctcctctgatagatttttaagttttcttcacctcgtctgtaaaatctggaaaattatttagctaccgtatagatgtgtcatcaggatgcaaggtattaatacatatggagtgctgagaattgtgtttggtatattgtatgtattcagtatcagtaaatattagtcttttttttttttttttttttttttttgagacagtctctcgctctgtctccaggctggagtgcagtggtgcgatctcagctcactgcaacctctgcctcccaggttcaagtgattctcctgcctcagcttcctgagtagctgggactacaggcaccagccaccacgcctggctaattttttgtgtttttagcagagacagggttttgccatgttggccaggctggtcttgatctcctgacctcaggtgatctgcctgcctcggcctcccaaagtgctgggattacaggcgcaagccactgcgtccagccaatattagtcattattatgttattttagaatatctcagggtggggtattttgaatacctctccccgcctcaccaccatcctaggcttagcaccatgtggagttagtaaacagtacgtgtctgagccatactgcttaacattcaacaggaattccttaaacatacttttataaagttgtggtttggtaagcgaaaagttctcatttttgcaaaataatgcctgctcattttaaataattaagcaatacaaaaggatgcaaagaattttttaaactaccccataaatcatcaacactgacttttatttttaggtatatttctatgcagatatacaggcagaaaaaaggaaggaaaataggaaggaaaactggataaatatgctttttacaaaatccaggctgtattataatgagtttttattttcagagtgttatttttaagttttacaatggaaaaatgtccaacatattgaaaagtaaaatagtactattattcctcatgtgctcattactgaaatgctgttttgtttttattatttttatttttaaatagagatggcgggggggggggtctcgctatgttgccccaggctggtctcgaacttctggcctcaagtgatcctgcacctcgacctcccaaagtattcggattacaggcatgagccaccgcgcttggcctgaaatgctgttttaaataaaaatgttaaaagtagttttgtttgaattcagtgaaaaaccaaagtgcagttcaaaaaattattgatgtatttcctaaatgaggtttttacagtaagaaaagaaattgtgaaaaacattacaattcgtagtgtttttacaaaaagatcttcatgtttcaaatttagacagcatcaccgtctaccataagggatgaagacattggcactctcacaaatgatataattttcttccacctttaccaatttatgttgggtaactttctcactcaaagtttataacatttatagtctgtttagtaaccatatc

SEQ ID NO: 36656 - DNA, 2300 bp, Homo sapien
cggcctctcaaagttctgggattacaagtgtgagccaccatgcctggtccaatttacagtctttacaaagaacacagcctttgcaaaactaaacacaatttgtttctcatcatggcactatctttacttaagggctaagaatggaaaacgtccacccttacacacagcttagatactaaggtccaaaactaccttccctgatatggtttactgtctacattaacatgaatttattattttttgtcttcattagcataactttactgttctagaagacttctgcccaaataacttaatcattcattataagaacttcatgagaaatctattagcttttcacgttttttatttttattttttgtttacagggtctcgctctgtcacccaccctggagtgcagtggcacaatcatagctcactgtagcttcaaactcgtgggtccgtccaagtgatcctccagactcagcctttcaagcagctaggactacagaggtgcaccatcatgcctggctactttttaaaaaaaattttgttgagacggggtctacctatgttgtccacgctggtctcgaactcctgggctcaagccatcctcccaccttggcctcccaaagtgctgggattataggcatgaaccacatgccaggcctattagttcttccaatagaaaacctcaatagtttatgccttaaggcttcttgcactctttgcttttcctatcaatcttaaaccgctgtatcagatcagagtccaaccctaatcaagccatcttcctccaacaccctcctaccctctccctctgaaagaccagccttaagccatacccatcagtaaaatctgaccttgctttcccagtttaatacactaccaaagctctcagtggtgttcttccttatcccagtgagcaataaattcagctgtcttaacaaaatgtcatgttggtgatatttggcgaattatcaccggacagggcagtacatctataaacataaagacaaggcagagggatttccccacaaatgtctagaaatactgtaaaaatgagccaagataaattatacaccaggctaattacgtccactagtacatccattaatcagaaggaaatgggttagccaagaccacaatagaaagtttccttgcaagggtggccaatgagtcttaaaaattctttttgattaattccacatttatactgcaattttgcccagcgcggtggctcaggcctgtaatcccggctcttagggaagcagaggagggaggacagcttgagcccaggagtttgaggcctgcctgggcaatacggcgagaccccgttctccacaaaaaggaaaaacaaaacaaagcaattatattgcaattttgtaagcccttcctcacaacagagctgttcaaatacgaccctgaaccaagaaaaactgagtctcagatagctcttatatctttgggcgttaccaaaaacaattctagggtaggctgcctaagtgactgcaagagaaataagcagctttaaaatgaggtccttctgaagaacaatccagatccatcatcaatgtcactaaagtgtaaagaacactaacttctatggggtctaatcatggtctaatgacttgccgccacccaggtaaagcattcatagctgtggggtgggaaggagagaagaaagcaccaggtacctttcaaagtttacttttcaccgagacaaactgatcccagccgacgctccacaggacttctgaagctccaccagctccagagaagggggaggaggtggtagaaactaacaggattccgtgggacccaccctccagctgactgaggactggcccgcagcggtgaaaggcctttggggtccctagctcctcagggactcctctgcgcgctccgggatccatacctggcaagcaatagcgcggcgaaagccgcacgccatgtccacctctacggaagtgcgccgcagtccgccagttccggcctcgccccacctccttatacgacccgcctccccgcgccggaaacccgccccggagggtgatgccagccaatcaaggagccgtgtggctcgccactaacctctgccctgcagccgcgagggcgcgcgggaaatcccgagtgcatctggaatacgcagagtcagtaagaccatggctacgtcctcgatgtctaaggtatgtggtggccgatgcgcactgtggctctaccgctgcctcattcccctttgaagaagggatgaagccgaggttacgtaggcatcccttccctggctggagaggagggagggagcggcgtactgagctgag

SEQ ID NO: 36657 - DNA, 2300 bp, Homo sapien
tgagatagaggaaggccaacagccagaaaatttcacgatgaaagagacactaaaatgttttgatatgtttaaggaccgggcgtggtggctcacgcctgtaatcctagcactttgggaggccgaggctggcggatcactcgaggtcaggagttcgagacccgcctggccaacatggtgaaaccctgtctcttctaaaaatacaaaattagctgggtgtagtggggcatgtctgtaatcccaactgcccgggaggctgaggtgggagaatagcttgaatcggggaggtggaggttgcagtgagccgagatcgcgccactgcactccagcctggtaacagagcaagactctgtctcaagaaaaaaaagaaaagaaaaagaaaaaaagcttgcagttccataaattcatgaaatagttcttaaagcttcttattcatgtaaggtctcatcccaatacagacatttgttataataccaaaaatgctttcctgaaaaatcttactttctgcaagatacataaaaataagaggtgcttatgcaatcaacaggattaagggatagaccattcaaaacctacagaacattataaccaggacaaaataaaaccagtaccatttctaataaaaatactacctttgaatctctactagcataaccttaaaccccagggcttgtcctttttccttgagatgtagtctttaaaagcactgcttctcataaaccgttttaatcaaaataaaaaatcagatccatgacatagccttcttcatcaatccattgttttaacatagggagaatgtagcttcttcatgtgcatttttcagctttctcagacagcttaacttcaggggcttcccgctgcacttacaatagaactcaaggtcttactttttgtggtccagaacagcgctgtccaacagaactttctgtaatgatagaaatgtcctatatctgcactatctaaaatggtagctgcagccacatgtgatgattgagcacttgaaatgtggttagtgcaacggagaaactgaatttttatttaatcttactttattttaactcaaatttaaatagccacatgtggtgagtgactaacacattggacaatacagctctagggcttatcttcttaccaactacactatgtcttgcaatttcttgccatctaggtagccaacatgaggaggtctataagatatcccaccacacacacccgcatccacattactttttcattctcatttttcatgacgctcccactctttgtctactttctgattatgatttttaaattcctctaatatgccattttatttctatcttctgggccgaagaaacatgctgttctctctgccctcctcgccctaatccttaacctaacttctactcatttttcaggtctcagcgaaagggtcactttctccaaaaagcctccgctaacccccgacaacctatattaggttcttcccactcttctgttgtctgcctagaactcttttccttgctaacacttaaaatttgtgatcgtcagtttatctatgtttaccgactttcttgactgcagaaactgaatctgttttgtttaccactgcatcttggtacctaacggagtgcttggcgcacagtatttgtgagatggaaaaatgagagactgggccacatcatcaggacatccgacctccaccaaccagaacttaaaaatcctcctagccataccacaaggcagatccgcgtcctcgctccccaagcaaagttggcctcaactgatctggagcaaggacgcctcagctcagtacgccgctccctccctcctctccagccagggaagggatgcctacgtaacctcggcttcatcccttcttcaaaggggaatgaggcagcggtagagccacagtgcgcatcggccaccacataccttagacatcgaggacgtagccatggtcttactgactctgcgtattccagatgcactcgggatttcccgcgcgccctcgcggctgcagggcagaggttagtggcgagccacacggctccttgattggctggcatcaccctccggggcgggtttccggcgcggggaggcgggtcgtataaggaggtggggcgaggccggaactggcggactgcggcgcacttccgtagaggtggacatggcgtgcggctttcgccgcgctattgcttgccaggtatggatcccggagcgcgcagaggagtccctgaggagctagggaccccaaaggcctttcaccgctgcgggccagtcctcagtcagctggagggtgggtcccacggaatcctgttagt

SEQ ID NO: 36658 - DNA, 2300 bp, Homo sapien
gccatggctcacacctgtaatcccagcactttgagaggccgaggcgggcagatcacctgaggttaggagttcgagaccagcctgaccagcatggagaaaccctgtctctactaaaaatacaaaattagccggcgtggcagtgcatgcctgtaattccagctactcaggaggctgagacaggagaatcgcctgaacccaggaggcagaggttgcggtgagctgagattgcaccattgcactccagcctgggcaacaagagccaaactccatctcaaataaaaataaaaataaaatttaccctctgtaattttgtttcaaactgttaagaatatcgattaatttggaaagatttgtatctttacaatagtgagtgttaaaatgtctattcatttattcagggcttttttaatataggtcatacacatatattataatgtgtattgctgtgtatttagtaggttttgttaccattttgaacatgggcttttttttcattatgtagtttaatataagatattgattacattatatggatatgtatatatgcatgcatatatattttttattcacttacttttttacactctctttttttttttttttttgagagagggtctctgttacccatgctggagtgcaatggcatgatcacggctcactgcagccttgacctcccaggctcaagcagtcttcatacttcagcctcagtagctgggactacaagtgtgcgccaccaggctgagctaattttttctattttttgtaggaatgagggtctcactttgttggccaggctggtctcaaacatctgggctcaagtggtcttcccatcggcctcccaaactgctgggattacaggcatgagccaccacgcccagctcttttacactctcttttatttgcagttcttagattttctaactttacagtcacatcatatgaaatgattaatttcatcctccttcttaacatttataccatttctttttcttaatttattgtagcatctagactccagaatgatgctgaataatagtgatgatagcaggcagcattgattctgtgtgtgtataattttactggaaaaaaaattttaaataatgactttattggggttggttaagttattatttctaatcagccttatctcaagtcttgtcattttacattaaacaagagaatacttgagaaagtgtaagatctttctgctctgggagcaaaacataatctttggctaagaataagaggactagactgggtgcagtggctcacgcctataatcccagcactttgggaagccgaggtgggcggatcacctgaggtcaggagttcgagactagcctgaccaatatggtgaaaccctgcctctactaaaaatacaaaattagccgggcatggtggtgcatgcctgtaatcacagctactcgggaggttgaggcaggagaatcgcttggacctgggaggcagaggttgcggtgagccgagatcacgccattgcaccctagcctgagcaacaagagcaaaactgcgtctcaaagaaaaaacaaaaaaagaataagaggactaataactatttgaatccctggcagtttacatctgagtaccttctccaagtgacacattaagagttatgactaatgaagtttgcttccaaagttatatgaaataatgccctcttttttggtctcctggataataggctaggtttggccttccttgatattcagttatttggagctcaaagtggacaagagctgttgctgcccctatcctgggaagctaatccttcacatgctgctaacttgggttagatcttctgccagcagaacctcacccgtctttcccctccaagcaagtcagtgccggtgattccttggacaccagaaatgctaatcttgtctatttgaataggcctaaaggtcaggtttaacagattgttcaagtgtatctgactttgagttaactttcttctcataactctatctgggcaatagaaagccacaaattttaaatctcaactgtaatcaagtatgaaatgtcttggcttatttttccttgaccagttagctgcctttcacagataaagattatatcttagataattattgtagaaagaggaagataaagttttatacttttaaaaaaaccctgtggaaatttactatttggtctacccttaacaattgccatatttagtggttgtctactttttgttgttgttgttggggtttaaattttagttcaagtaaccagttcaatttctcagtaatcatagtctacttagctttgtttctttctcc

SEQ ID NO: 36659 - DNA, 2300 bp, Homo sapien
actacatttagctaattacatttgaaataatcctattcctaagtaaagtcatattctaaggtactggaggttaggacttcatatgaattttgaagtccttgaattccctcaaacatagggaatttaactcacaacatcacatttcaaatgtaggttttataacttatgggcaaatcttaatttcagaaaatattaccaagtgtttagaatttactagaaatttacctagtaggtgtcttagttaagctgctgtttcattaaatgcttatctttttcaaaagattttccaaatgtaggaaatgtaggatatttccaaatatcctaaattaaaactagaagggcttacttgttgacacagtgtgatcaggactgctgatctctgaagcactggacaattctataaaattgtctataaaaaagaatatattgaactacttctaaatatggtttaaaaataatagacaaaatggctataaaacatctgttactgaataaagaagaatacatgagcactggaaatcagtatttataatcatttgacagttggcattcacaaaattgtttcatattgcactggtgatagtttctacatatatcactttttttttttttttttttttttgagacgaagtctagctctgtcacccaggctggagtgcagtagcttgatcttggctcactgcaacctccgcctcccgggttcaagcgattcttctgcctcagcctcctgagtagctgggactataggtgtgcgccaccacgcccggctaattttttttatttttagtagagacagggtatcaccatgttgaacaggctggtctcgaactcctgacctcgtgatccgcctgcctcggcctcccagtgctgggattacaggcgttagccaccgcgcccggcatcattttcttttcttttcatttttttcagacagagactcgctctatcacccaggctggagtgcagtggcaacatctcggctcactgcaaccttcgcctcccgggttcaaatgattctcctgtcttagcctcccgagtagctgcgactacaggcgcgcgccaccacgctcggctaattttgtatttttagtagagacggggtttcaccattttgaccaggctggtctcgaactcctgacctcaggaagatccgcctgcctcggcctcccaaagtgctgggataacaggcgtgagtcaccatgcccggctacacagatcactttctaaattagcgctgtatttgattcttattttaggtatgtgactaaaagtacaacttctagaaacacttttttccccttccgcttacaaaatggatccatccaatatctattacctaaacatttcactgtcttttgattagttttgtaacaaagttcacaatatatgcaccaatattcaacagaagtaatgcaatgtctgataccacttgctttttacccaacgcaaaacaatttgattctgtaagtcgttcaagtcctattcatttacagaagcaaagctggctttacagaatttcattagtggatgaagcagctacctccgaagggtagagcatcgagttgaatcaaggatcctgtaacctgatactattactgttgttctgtctgccagtcctaaataggtttcataatctcattatctcctatcctctccatgtgaaaggtcttgttttgggtactgtcgctaccgaaattaagctaactttgactagagattggtttattatatttcccagatctgaaatcactgtgggagcaactatacggagaatcttaaaagatttctatgtcgcttagcctgcttttgccacgggttcgctttcccatctcccactgtctcagaaccttctctttttttctcttttgcttagttcctcttacactcaagctgtgtagggggatttaaattccaacccggaactcggaatcgcgcgccttgcatgacggaagtcgtagtttctgtgactcctcccttcccgcctttcaagccgattcctcccggtacctaaaaactacaactcccaaaatgcatccccggtttggcccgcccccgtgcgcaagcgctctgaggccgccggatttgaatcggcggcgttgttattgacgccatattggggccggcggcgggtgggagagttctacgagggaggggaagcggttggacgtgttcgcttgggttcctgctgcggcagctacctcgcaatctctctgcatcgatcgccgctcgcaagctactgaccgtactcgggcgtattaggagccgcgttccagcctcacaccccacggtgctgttttcga

SEQ ID NO: 36660 - DNA, 2300 bp, Homo sapien
ttcatgggaagaacagcactacacattcatgtccttgcccccaggactatgtaaattcttttgctttctattttaggggcttcagtcatgttgacaatcatcagatcaccatatggcatcttactaaatggacctgatgaacaaagagtggcaagtaccaatgccctagtagaatcatgtgtaccagagagtgggagataaatctcatgaatattcagggaattgctacattggtgaagtttgtagggatccagtggtctggaacatgccaggtcatcccttccaagataaaaaatgagaggttgcacctcacacctgctaccactaagaatgaggcacaattcttgtctccctagcagctttgccctttagtaacaggagataaatgtatttttaaaattatctcagtggccctctggctttcaaaacaagctttgaattggtagtagtttgtcctgagtctatcattttcttttttgaaggcttttgattctgttaatagcagtaaggccattccacaattttcagtcataactgctcccatactttttaagtaccacagccattgcatatcccattgcctcaccttctagctccacctaatatcaattaatttcaggtgaaagacagtacttgcgatatcattgcacattgggaacttccaccccacttaccgctaatactggaaaccctattgctttcagagctctgagtaatctagtaccaaaatctcatcctaagggtctgctctcaagggtcaccccttgataccaactgtctgataggcaggattctaagatgattcccaatgactcttgcttttgtataatcctcttcccttcaagtgtgagggtgtatgttacattatatggccaaagggattttgctaacgtgattaaaattccaagtcagtggagcttaagatagggtgattatccaggtggtcctgaactgatcacgtgagtcatttaaatctgggtctaggggtcagacgccgagagaggtaagagagttttttttttttttgctacagagttttgctcttgttgcccagactggagtgcaatggtgcaatctctgctcactgcaacccaggttcaagtgattctcctgcctcagtctcctgggtagctgggattacaggcatccgccaccatgcacggctaattttttgtatttctttttttttttttttttggtagagacagagtttcaccgtgttggccagagtggtctcgaactcctgacctcaggtgatccacccactttggcctcccaaagtgctgggattataggcatgagccaccatgcctggccaggataagagattggaagcataagaatgattcaatgtgccattgctggctgtgaagatggagggggtcatgtgataaagaatgcaggtagcctctgggagctgagaacaggccccagctgacagacagcaaggaaatggcaacctttaccctacaactgcaaggaattgaactctgcccaaaccaggtgagcttggaagaggattctaaactcctgatgagaacacaactcagcctacaccttggtttcagtcttatgtgaacctgagctataaacccaactgcactggggtagaatgacctacagaattgtgacctgactaataaacagggattgttttccacaacaaagtttgtggtaatttgttaccagcaataagaaaacgaatacattctgagcttttgttgcttagaaagcagtgcctgaggccaaggcttatgtgctacaacttaattagggagggcaattccctagtagggatcgggaattagggaaaagtagagtgaggcagggaaggagggaaatgcaattggaggatagctattaagaacaactgatcccttgatcttggggaactgttattgaaagggatatatatgattgcttctcaggacagtcctctgatgtgttaaagggagaattagttgttggctcctgtttccctttggtcaaagaatctttccagtgggtgttaatcctcctgcactccctgaatgtacatatgcagacatacccagcatcaacgggaaagctgcgggacaggatgtcagaggtgtgcatgaagtgaggtgctattggcatgcactgagtgaagttggttgaaatttacacagagttggctgccacaatatgggctgagctggaacaagaggtcagaggccacagagaaaggtaaggctgagaggatctgaagtggcaaataacaggtgactcttatgttggaatggtctcttgttgttcctttttaatgtggagaaagctga

SEQ ID NO: 36661 - DNA, 2300 bp, Homo sapien
tttgttatttctctcacattcatttctcttttcatttttatggtaatcctttatttaggccttgattatcttgtgcttatatcacacatacacaaattggtcttccttttcagaatacaaattggtcttcaagggtaggtagtgcagagactggatagaggaatgattttcccacataccaaatgaggccaagcaaggtaaggtcagaccaagataggtgagctatgtttgggcagagtggggcagaggagtttgggctctaatccccacctcttggaaattggagatgggggtggagatgcttagttccaggcaggatgaggtgggtcagaggagcatatcagggatccagggtggaattcctgctccttagtatctgcaggttagagtagggtcagtccctctagattctgtgccctgcccttctggctaaacacttatctttcatttatttgtggctagagagagtactagagagacagtaaaagtttgttgaggacagatattatactttttcttataacttacatgcgtgacatggtattttataggtgatttataatgctgctattagagatattaatagtctttatttcagagttaaatctttcaggtcctctttgagacccatctggctccctttggagatgattatttgttagattattaatgtttccttgagtcaaattacatattttagagtttatgggacttcctctgctaaaaaaggatactatcttcaggaagcaatggatcctaaaattgactttgaaacactcaacaatttgccagcaacaatactatatatcatctttttaaagtttgtgtttgacggcataatttttgacttatttctctcaggattcaaaaaagaaaaattttgactcatttagccatgaaacaaaggcctttacttctcaagatcaaatctaagttttccatgttaacgtccctcataatcttgtcaagcgctatattttaaggtattttaattgacataaatgttcccgagacttctcaccaataccaatttgaactttaacactgaaggtgtttagcagtccttgtattttcaaaattagaagcctttgcaggagaaaatattcaaatacaaaatttcaacttctgcttcaaacaacctattttgttacaaataagtgtttctgaagaacctcttaatacttttctgttaccccccttatctgttagtctgctgagactagatattcaaatattccaaaagccagagtgtatgcaagttcactttcatctcacttgtcataggaatttaaacattaagcctcaaagtatggcaccctatatgtcttttcaaaaacaacaacaaacaaccacattgtgactactagatgaggtaaaatttgtaataacagaatcaaaaaagtcaaccctaacttttcagcgcttgaactcccaatcacccccactaaaggcttcttcgttaaccttgaatcataagaatcactgatcatcgagtaagtaagtgttcgggagatatgactgtgagatccagctttgtaaataatttctggatttttggggcgagtcatttcatctctctgattcttaatctcttcacttaaaaatgagggacttggagtatcagatgatttctaaatttcttcttactcaaagtctattattctgatcccaaagaagaaatcgaatccttctcaatacatcccaaattggatattctggataagaaattttgaaaccaagtcacacgaagagtatgtgagggataagaagtctagtttggggaagggtaaacattatgtacgaaaaagaaatgtcttaaaagaaagcaggcagggtgagcgaggaggctgaagagtcgctccataaactgaggcagaaggagcagccgacagcaacgcctaccgcacccggaaggctcaaggaggcgccctgggcagggaacttccggttgcggggaagggcggcgtcctctcctagggacttgtcgcacgcggcttctcgtcgcgttccgtcttgcacgcctcgcagcctagctccgcgcgagttccaggcgctcagcaccggagcagcgccccggcaaccattgaggcgtcacggttcgtcacgggattcggagccgggcggctacgggcggggtgtcgcagctctcttcgacgtacctgtcctcaggagccgcggcggcgactgcgcctcggacggccgtcggggccgagaaccatgagccccaggggcacgggctgctccgccgggctgctgatgactgtcggctggctgcttctggcgggcctccagtccgcgcg

SEQ ID NO: 36662 - DNA, 2300 bp, Homo sapien
cacttgtggtgataaaatgccaggtcataagtcaaattttgactccattactgattattatccttgagctctaaatggaaagtcagtacaattcagctgtcaggctccaggtttcccccaaccctgaacaacagaataacaaactaaacagttatctcggctggagtcactactagatgagattccgagtgattggctctggccacaggtcacactggcccatcaacgatcttaggtttctgcttggaatttcatagaattcagtgaagaaacccaacgtcaatcagaagatatttgggatgacttagagacacaataatcagattgttcctctttatgaaaaagcaaaagctggtgtggctgagttgagatacaagatttccatggaatacctttcacaggttgatgctgaccaccacgaaggtatagatcaacatgtgggaaagtgctccttatagaaggagcaccaccagggtgtgtcagtgttgtttagctgagtgatgttgaacagctctgccactccaacagctcacgccctccagctacaggggagggtggtagcacccaagtgaaatcctgtggcctgaaagcattctaggagtccagctcccccaggtttcttgtgactgaagatgtccttatcacagtcagaggaagcgctgccttgatcctttcttttaattactagcagtcatttgaaactgagctgccaggtggaggagagactttgaagttattgtcatctggcctcttgggaaatcagagtctgcgaggtcataaggagagaaaatttttgcaaatatttcctactgccaggggtgtgaggtgaagggaaaatctaacaaccacgacccctaaaagaaaaaagcaacagatgttgaagcctcctccctttgaatcttgcgctggagctgtctctgccatggaggtgggctaaaaatgcctgtgagtagagccttccccaagcagcagggttaaggctcagcactaatcccacatctactatctatctcccagtcattcttccatctatcgatgggtccatcagaactttattgataaccttttctaaccacccacctagtaggacttaatcatttcagcggtggactctctctctcaatggagtcaaatggtcatttgcttgacggaaatacttctagtctaaagcagtctagggggattttcaaaaactgcactagtgctctgcgggaagcctttgtacgatttggcctgacgtttccaaaacggttttacagccttccctcctccaggaccttgaactcaacaatcttccttctttccctgagaggctcgctttcacagattctcaccacgtagttcaaatatagggtccagatatagtacggttgctgttggggtctgatcaggggcgggaagacctggaggtcggtaaaacggagcggtgcgggatgatgtctgggaacaccggcaaggtgtcataaaatgaacgccaaggcggccacaagaggacggccgggaaccgaacccagcgcccagcacggggcccttgtggccgacgtgacgtggctccgtcaggtggaaaccgtgcgatcctctcccgatccaactcacgagagataaagatgtctaaataaccacgaccgccgccgcacaccctgcagggccccgggggcggaggggaggggagcgcctcctcggcagaagcggcggcccaggcttgtttggaggttcgcaattcaccatgataaatgtaaagaccaattaaggtttgatccgtgcacacaggaggcagacggcggctgatagtggaaacaattaacgagcatgtcccctaattcctgccgcggctgctgagcacaccgcggctccccaggcgcccgccgctgccgcccccgagtcccagagcccccagtccggccctggagtggggcgtcctcctccagcgaaaaggtgcgaggagcggggccccgggtggccggggagggggcgcgccgggccgggaggcgcggagccagccgcctacggagcccaactgtttgcatcggggaccggcgggcggggcgcgcccgagtggtctcgccgggaaagggcggcgggcgctggagaaggcgcctggcgcgaagctgggcggcgccccgagggcggaggacaggtggccgcgcgaccgcagccaggtagcgaacggctcgggggctgcgcagcgcggtcccaaagctcagcccggccccgggcccagctcgctgccgcctgccacgggagcggccttgcgcggagggagggggcgcgagaccgcacccccgggcccggcgcgcctc

SEQ ID NO: 36663 - DNA, 2300 bp, Homo sapien
tatttccacagcatttgggactctaacaaccctggtgacatctcctcccagttcagcagtcaccattcctctttgggattacaaaaaggtgatagcacgcctgggcctcattataacaagactccagggggtgtggaaagagcttttctccagtctaaaataattgtgtcagctgtaaaaactgtgtactgaccccctttgtatcaaagatcatattgtgatgaagaggcatctttctttctttcttccttgtagttacattcccaatgctggaagaaaagatttccctgtgtgattaccttgaggggtaccagcactgttaataacaagtcagtccagcccagattctaaatgttaatagactgacgggcctgggggagagttttcagctggggaagcgggctggcagcagcccatctcccagcattgactcatgcctgaatcacagccaggctggcaggatgttgttttggggaagttcacaggcctgtcaaaaacctgctgttgccattggctgatattatgcaagattccaaatgatatttatttatattctcctttgagtttgttttgtggctccccctcccccctacaggcactagagcttcaagtgaccaaaaagaaaaagaacatttaaaagataggcaagagctcatcaaaaataaaaggcactctgccaccgaactcccttcagctctcaggtcagagcagtgccaagcaatttgctctaattcattaaagccctttcttcactcttccattggacaggtgcaattgagagacaggcctggggataaggcagagcccccgtttagatttccacccatggcaaagaaaaacgtgcagttgcatgcaggcatattcctttccacacttgtaaaatatctttataacttgctgggctaacagattaagcatttaacttctctgatggggtttagcctaggactgggaggatttcctttgtttcatgtctgactgatgatgggtgtgagggcggggcagtgactgtgcagctcttagaagattcaaggagacttgagcttttcaatctcagtttctcccactcctggagtctgtaggagtttaactggagagctaaggaaattctcccaactgtatattatgaagcactgataagttcctttgcagaaacttggtaggcagaaagagtgtgagtgaattcatttatatgcctaatttaagacataattgagaggcacagtgttctaatagatggagttctggctgaggaattaagaaacctgagttccattcttagcacagatgatggctcagtgcagggaaatcaagggctggcactttccagaggaatttgaactctagagacagtcaattcaggacacaattattcagaaatacagccatgatccccattatctagagctttcattgttccgataaaaaccaaatttagctctccctaaattcttagcaaagtcctaataaaaaatggtatttgagttgagcctctagaggggaaaagaaggtattatttagcattcactcttcaagggggagctttctttggaacattgttcaaagcagacctgtggtgtggaggaggggctcccccaaccctggtgatggggaggcacaccagggctctttcaagtcctgcctagggcactggacacagctgtactactgcctccctgaaaatatgaccttggccattagcctgagtgcttggtagttgtttccatctaaacagcacactctgggaagatgtggggaaaagcaagagagatcagattgttactgtgtctgtgtagaaagaagtagacataggagactccattttgttatgtactaagaaaaattcttctgccttgagattctgttaatctataaccttacccccaaccccgtgctctctgaaacgtgtgctgtgtcaactcagagttaaatggattaagggcggtgcaagatgtgctttgttaaacagatgcttgaaggcagcatgctccttaagagtcatcaccactccctaatctcaagtacccagggacacaaaaactgcggaaggccgcagggacctctgcctaggaaagccaggtattgtccaaggtttctccccatgtgatagtctgaaatatggcctcgtgggaagggaaagacctgaccgtcccccagcccgacacccgtaaagggtctgtgctgaggaggattagtaaaagaggaaggaatgcctcttgcagttgagacaagaggaaggcatctgtctcctgcctgtccctgggcaatggaatgtctcggtataaaacccgattgtatgc

SEQ ID NO: 36664 - DNA, 2300 bp, Homo sapien
tttctgtcaagttagatacacataattgggattcctcagaggtttgtaaggatggtactctcttgtggctaaattagtataacttgtaatcaaatttctcacagatttccagaatattggtgctgaatgggatcttagcaagcaagtcacacacacaactttctcatttcacagatgagaagacaaaggcttagagagggtaattactcttgggtaatcaggggcagagcaagggcttttaattattttcacaataatagagagattttgtgattgccaaagttacaaatgattgtggcttaaaattgagaaaatagaaaagttttatttgatggagaaaataagattaactctcgagtagccaggggttatgttttcaatcttttatctatatatgttgtgtagagtttaacagagatcatggtgtttacacaattttaactactgggcaccaaaacttgaccctgggcctcagggagaattggggctccctgggccactcttagaggctgagatctcagaataggattgccatgactgctttgacaaaaatgacatctcatagggtgagagaattcctactttctacttgaggaggtcggggtggaaggcaggggtggtgagagttggagcctgcgtgttcggggtcaagccctctattcagcctggtgctttgcaactcctgcctgagtggcaggctttttgtccagagggcccagatagagtctcaggcgtgcggctttcaaagccaggaagctggaactgtggcttcaaggctgggagcttcccctgcctactttcctagcaactctcaaacagttctcccctcagttatcctgaatggtgacttttgggaactgagcacttcttttggctataaagtgaattcttcccgatggtaatttgttaataacttcaataaaccctaagcaggtattattctgtcacaggtcccctttggtcctcaagatggtggatacatctggagaaaccgccaagggagagggcagagggaggccctaacccctggcaaagggtggttaatggcctctctggcagaggaatcctgccctcactaccatggcacctcccaattagcctatgagggtcagcagtgctgctttggtcacagaggaaaccacggactgacgtttagtgacaagaaggaggtttgtttcatggagagcagatttggggtcctgcggctctctgggtttcattaacaccttgggcctcatgactgctccctaagtgacagagcttaatattcaaggatagtgtgatggaaaattgagcctggcttctttatgccatcatgaatgtcttgtttcctccactttttctttctgtctgaacatccccctcccactgactccactttccttgacagctgttgtctcagacttagtgtctacaatgatgtaggacatatctgtagcccatacaaagatgagctgccatgtggctcttcctcagcatggagtcacattcaaagtacaatctatcacttcaaaatacttaaaagtaactcgagtcttcactatagcttattgagaaaatgctgaagatacataccagttgtaatgcacagaaaactagaaattctttctctccttcccccatacccaatacagcagcttctccctaccctactgcagtctctctccttccttcctcctcttgttttcctaaccagtaggtgggggcctggccccgcattccctgctcttttacatatatactctctgctctttctgaaacaaacctagcccagctttgaggttctcccccacacagcttctgttatgttcttagaaaaagcccagagctctctcaggcagggaagagggcaaggctctgaatatttatatgttaatatttttccttgtctcatagcttaaattcttcccttcagttttagttgtgttttattgcaacacagcttcatttccatgatggatgtctttgcagggggtctgcttagacatggatcaggctcgcagaacggaataaataaggcggtgactgacttcaagacattgagaacaaaagcccatggcacacaacaggagctagtgagttgcttccaaaaccatttggacagttcccttttgcctccagagttatttttccttttgctctcctctttatttattttcttcccccattctcccttttctgtcctttccgccctcccaagctgtcaacaacagctcccctagactctgcctagcacagaattttgctgacttctgagaaattcaagaggcaaacctgcagggcaaagaaagtgagtataa

SEQ ID NO: 36665 - DNA, 2300 bp, Homo sapien
atgcagatgactcttaattcttcacctctaatcctcaatcctcattcttttttaaaacctcagttttgaatcttcagctgcctactgggcagttaaattgacaatttcaacatcacctcagatccagttatttttgttgctcttttttttttttcttttcttttttttttttttgagacaaggtctcactctgtcacccaggctggagtgcagtggtgtgatcatagttcactgcactatctcccaggctcaagagatcttcctaccttagcctctcgagtagctgggactacaggcacatgccaccatgcctggattttttttttttttttttgtagagacagggtctcggtatgctgcctatgttggtctcaaactcctgagctgaagttatcctcccaccttggcctcccaaagtgctgggattacaggcatgagccactgcactggcctttattgctcgataaatgacatttaattaatacctaccacatgttatgcatcattcactcattaaactgacattcattaagcatctttatgtgccaagtactttgataggcactgggattcaagtggtgaataagactgaaatggtccctgcctttatggagtttaatgtctacagcataggggctgctaattgaataaatacttcaggattgactaatacaatgataaggaaaataaggggactcttcagatggagagcaagggtagctagccctgtctaatgagtcacagaaggcctccctgattgaagtcatttttaagccacgaattgaagggtgtgaaggagttagatgattgggggcaaactatttttttctctctatgccttagtttcctcatttgtagagataaaaagagaaaacaaatgaataaattccttaatgcatgtgaaggtacttagaacagtacctggctctgagtgtggctgctgtcttcatcatctgtatcgtcatcattaatcattcattcaggttttcaaataaacatctattgagcacttacaaagtactaggcatttttcagtattgtggtgggattcagaaatgaaaatcataaaaatctatccttccaaggagatatgtatacaaatagctacaaagcagagagtaatacagcaagaactataagggaagtatgagccaatttctgggcaggagcattcctttttatttgggagtggtgtatgatttgtgccacttacttggcaagtgcttgtaaactgcctgtgaaatcttattttttcttgttttcttatttactttttgagattttgcctgtgtatatctttacttgccactgaaatttttcatgttgaagtgaggaagtatatatctcacagactgagatatatgaatagtaggtgctctgtatgctgatgagtagtcttaaaagcctattaaacttttaatagtaacccagtaccatttaatagtaaaataagtaacccaaaagggttacttactttaaaagcctcgtaactgcttaaggcctttattataatagtgtcacatgctttagagggactcagtgtagatgaagaaatagacgttacctcctctaaaataaaaaaagttattcatggatgcatcatctgttgattctaccaaatgtctgttctaatatttgctgtagtaaagtgacatctttgacatcatttttgaaatgtattaccatatttaactgaaaaaaacagagtaacagtcaaaattggtaataattttaaattttgtttaacattaccaaaagtcgtataattcagtttggctgatacaaaatatgaggcttagcagacagttacatatttcaacaaattgaagttttcaaatgttgcttacatttctgtcttgagagaaaacagttattgtgtggcaaataacttattgcagtttttgaggaaagtgtatattaaaaacatctgtaaagatagtaaagtacctctgtttaactggtaagagatcagagttaacgtctcactttttgtagccaataatattctagctctgatttactaaaagaaaataaaaataacgaatattttattttctagaatcttttgttttatgtcttaatgtgttacattcatgattaagatgccagctttgttttcgtctaaactttaaagcataaaactgttctttctaaattttctttacaattaggtagaacattgaacttatcacaacaaagataccttctgtcttagagataatagatcatccataaaagctaattaatggatttcttagttaagagtagacttcagaaatgccatggtaataggtctttgt

SEQ ID NO: 36666 - DNA, 2300 bp, Homo sapien
agaggattgcttgagcttgggaggttgaggctccagtaaggctgccctgatcatgcccactgcactctagcctgggtgagaaagtgagaccctgtctgcaaaaacaaaagatttatctacatatcaaagtgaagaggaaggattaataaatataggtttttctcaaggaaaagtcctaggaaaagggaagacagataagatctctctcttttgccaaaagagaacgttcaatcttattttttacatgtacacactcttccttatgggcaaaatggatgtttgatgaaagactcaccaatgaagagaatctacatctgataaagaggagatcaagacatatctgggagggtgtcaggggttccaggaagcgggggaggaatcatgttggtctgtctgtgagcatctatttttcttctcacagagtagtagaaacttgggactaggagcaatataggcagaaacacacatcaggcaaggcattcctgacaggcagagagaaactgcctgctcatcgggatgccactctcctactctactctctattgtggacaaaaggtagccacagggtcctcccaattctgtggcaatgagtatggagagggcataactggatagcagaataaaaatccagtgcacattgctgccttacagccaataacagttgctcgccagtggtatgaagcttctgtgtgcctaggactgagctactgggtatagcgtgtgtgggaaggggagtcaccaaggggagtcatccccagaaggggaaggtaagatactcttccaggatcaggctcacctttcccatccttggagggggtctggggatggaaggtttttaccactttgggcatggtacacactctatcagcagaaaagggaattcatcggagattatttgggtagactgatggccttaaaggaaactgggtattatcttgttctgtcaggggaggagtttacaccttcactaacagttctgagcagatgcaacagcaggacagaccagaagtgtgacctaactcaggctgcctcagagagattgctgttggactgcctctattgatgggactcttactgagggggtccaggcattcagggggttgagcgtcccagaaagttccccaccgacgctttaaaaatgtattccctgcagccttacgttcttgcagttccaatatagcattggtgtttaaagccaaactacattataattgattcgccatcatccagctttatatttaacactttaatctggtaacaaaggaaaggctcgttaaaggacggcatttataaaaatttttcaagcacctctgcttaactcgaagggaaaataaaaggcactgtttatttggtaggccaaggagaacaacgccacgaagaggttctccactgatcaattcctacctttgtcaattataccacattaattagtaactttttttggagacatggaccctctcaaactccccagtatgctttgaaactttgatccagaaatgtacaaacaaaactctaagtgttctggaattaatttcagaagcttcatagatcctcgtaagtactcaccaaaagaaaaattccccatttctggtactccaatctcatgtccttagaattctcctaagacttgttcccttgaacaactttccctaattgcaaatcaaacctagatccggctgggacgccaagcttgagctgtggtaacgctcagaaggcctcttttcatcagtaaaatagatgccttaacggaagtggcgggcaatctacgcatggaaaggcgcttggcttccctcttttttgggtttctctaggttgtctggatgggaaaaaaatacacgcttcgtcctgcggagttcggtacgagggcaattgcacatgcgcaaaggcgaaccagtagcgtccgggcgcgtccgtggagcgggacggggcggggcggggcggtgccgagtggggcgagagaaggcccgctcctcccattcgtcgcgtccttaactctttgctatccttccgctgagcttcctcttctttccctctgacctcggaaagggggcggggctttcgggggcggaagttgcggtgcattgtgggttctcctggagctgtggagttgatcctgaatgaaagtggcgcgccgcccctgacgttacccggatcggagaggttggaattcagattacggctgcgattcgggtgtctcggaccccggtgtgcaccggaccacggggaggcggctccaaaggcgcggtgaacgttggtgagggagggcagctctgcgcagccccaagacatggctcacaaca

SEQ ID NO: 36667 - DNA, 2300 bp, Homo sapien
ctttgggaggctgagacaggcagatggcttgagctcaggagtttgagaccggcctgggcaacatggtgaaaccctgtctccactaaaaacacaaaaaattagccaggagtggtggtgtgtgcctgtggtcccagctactcaggggcgtggggggctggggttggaggatctcttgagcctgggaggcggctgttgctgtaatccgagatcatgccattgcactccaatctgagtgtcagaaagaaaccccgtctaaaaaaaaaaaaaagtttataaagtgattgggaagcatttttctggatatgcaatctgtccaactttgccatcaatcataaaacgtttcattgcttactaattgcttactactccaaagctgaaaactattgtagaggcggtgaggatacagaagtgtaagattactgtggtcttctaataatgtagaatctagtgtggcagggctggacgcggtggctcacgcctgtaatcccagcactttggaaggccgaggcaggcggatcacgaggtcaggagatcaagaccatcctggccaacaaggtgaaaccccgtctctactaaaaaatacagaaattagctgggcgtggcgggtgcctgtaatcccagctactagggaggctgaggcaggagaatctcttgaaccagggagacggaggttgcagtaagccgagatggcgccactgcactgcagcctggccacagagtgacacgccgtctcaaaaaaaaaaaaaaaaaaattaaaacttttgtcttgcagtacctggactggagatcaaattctgatgttaacttaccgtttgatctttgacaagtcctttagcctttctaagcctgtttccccagctgtaaaatgggaataaaatacagtactgtccctccaaaaagaagctgaggcaaaatcaggccaagcttgaggactgcaacccaggaccatagattcaagctgccctgaatatacactcggattagcaagttacaagtaggtttttaaaggaaaagaggcagctcctaaattgtttaccaatttacattaaaatatcgtgggctcttgactagctatacattgttctttgtatcttaaatttcagaaacttaaagataatgcgtaggcagctaatcaggaacaaaatgcctttaaacaattgccccaggcattagtagtgaaaggaagagaatgacagcctgcctacttcgcagagctgaggtctgatctatttttcttagtacctattcgtaagggttgttgtgaggttaaagtgagacaatctatgtaaagaacagttcctggaacataaatgcttgataaattatggccacaattcttttttgtggttgagcagtgcggggagatcgcgaaaaatttctatttacgcgcagctaacaaaatactctatgttgcagagctgtttcactttctccctttgagacgcaagccggcttgccgcctcctcaagtaaccaggcacaatgttctgatcccaaagtctcacaatccttcaagtatgaaatcagtaaaaactccaacttccatttatggatttacggagaactttttatacatcgaggggctaattcaatcagtaagtcactttgatttttactctgatcaccgagactaataagcagcgatgccgaaccaagtaaatgaaagaatcgtgagccatacttcagtagataaaatttaaatgtagactgattttcttcacgattgctagggaagaaatccttacagcgtacttagaaatctttgttttaaaatgataacgctgttatgttgggctgaaaataaaacggatacttccccaaggtcagcagcggaggaggcaaccgtggccttgccaaagtcatcccctcttcccagcccccgttcttcctgccgccctccccctgccccctcccttccccacccccatcaacaaactccgccgggacatttcagtaccaccactccctagcccggcgaagcgcaggggcgtgctggggaggagtaaagagggtggggcggaaacccaatttcattgttcgcgggaccgattcttcccaaaagagctcgctggcagcgcctgcgcagtgcgccctctttgtgccaggctgcagcaagctggttgtttgtgtgtgtctacccgaagctgcggaggcggagcgagggggcgtggcctgccttgtcgcactctaattgggctttcgcaggaaagtgggcgggcgcggggcggagcttccgataacaacactcggagctggggctgtggctatttgttgctgcgccgccaccgcccgagtcatgtt

SEQ ID NO: 36668 - DNA, 2300 bp, Homo sapien
gttgttgtgaggttaaagtgagacaatctatgtaaagaacagttcctggaacataaatgcttgataaattatggccacaattcttttttgtggttgagcagtgcggggagatcgcgaaaaatttctatttacgcgcagctaacaaaatactctatgttgcagagctgtttcactttctccctttgagacgcaagccggcttgccgcctcctcaagtaaccaggcacaatgttctgatcccaaagtctcacaatccttcaagtatgaaatcagtaaaaactccaacttccatttatggatttacggagaactttttatacatcgaggggctaattcaatcagtaagtcactttgatttttactctgatcaccgagactaataagcagcgatgccgaaccaagtaaatgaaagaatcgtgagccatacttcagtagataaaatttaaatgtagactgattttcttcacgattgctagggaagaaatccttacagcgtacttagaaatctttgttttaaaatgataacgctgttatgttgggctgaaaataaaacggatacttccccaaggtcagcagcggaggaggcaaccgtggccttgccaaagtcatcccctcttcccagcccccgttcttcctgccgccctccccctgccccctcccttccccacccccatcaacaaactccgccgggacatttcagtaccaccactccctagcccggcgaagcgcaggggcgtgctggggaggagtaaagagggtggggcggaaacccaatttcattgttcgcgggaccgattcttcccaaaagagctcgctggcagcgcctgcgcagtgcgccctctttgtgccaggctgcagcaagctggttgtttgtgtgtgtctacccgaagctgcggaggcggagcgagggggcgtggcctgccttgtcgcactctaattgggctttcgcaggaaagtgggcgggcgcggggcggagcttccgataacaacactcggagctggggctgtggctatttgttgctgcgccgccaccgcccgagtcatgttccgcgatcttctcaggctctcctagcagcatccatcgccgccaccctatcttcactggcttcattcaccttctccttctctcttcgttgctgagcgacaagcttcctagcgctatgactgtcgtctccgtcccgcagcgggagccgctcgtcctgggtggccgccttgcgccgcttggcttttcctcccgaggttactttggggccctcccgatggtgaccacggctccgcctcctttaccccggatcccggacccccgggcactgcccccgaccctcttcctccctcatttcctagggggagatggcccgtgtctgaccccccagcctcgcgctccagcagctctgcccaaccgcagcctcgccgtggcgggaggcactcctcgggcagcgccgaagaagcggcgaaagaagaaggtgcgggccagccccgcagggcagctgcccagccgcttccaccagtaccagcagcaccggccgagtctggagggcggccggagccccgcgaccggcccgagcggagcgcaggaggtcccgggcccggccgccgccttggccccgagtcctgcagccgcagccggcacggagggagccagccccgaccttgccccgctgcggcccgcggctcccggccaaacccccctcaggaaagaggtgaggccgccagggggccgttggggagtcgggcccttagacggtcgcggccgagctctggggctgcagaccctgcacccggggggtcgggcgggtgggggcggggtggggggggcggctgtttactcgggagggaagtttccgtgacgcccgctccattcttgctttgggggaagaagggggaaggggaggcatgcgctggcgcttctgattggctcccaggagtcggccaatgagaagcgccgctgcgccccagcaacagccccgatttagaaggctggcggcgttccagggggtttcggcgttccgggcgcgcggcggggtgggggcagggacagggcccgcgggagggctgacgtcagcgcgcgctacgtgcccggcgctccggcgcccatgaaggaggcgaggccgggtgggggcagctggggaaggactgggcccggctttcggcctcccggctatcgggagccccagtcctagtcggtgaaacgcggagacggcctctaacgtcccgccgtagggggtggagtgggctccgagcggctgggtttcgtttggttggagttgtgccaaaatgtgaggtgcccggtgtgggacgcgc

SEQ ID NO: 36669 - DNA, 2300 bp, Homo sapien
catgttgcccaggctggtcttgaactcctgggttcaagtgatccacataccttggtcccccaaagtgctgggattacaggtgtgagccaccacacctggcctgagaatgtttttttcctttcttttttccctttctttcaaaaccttgcatgattcttacaaaaaacaattttagataatgctggtctagatgatgttctttcttttgaaggtttcaagtggatttctgtaggcaaaatattttaatccagctattcatatttctttgccttatttctaaaacacttcaggcctgaggacttgcgccgtgagtttggtcgatatggccctatagtagacgtttacattccacttgacttctacactcgccgcccaagaggatttgcttatgttcaatatcctttattttattgtgtgcatgtgaatatactgtatatgcgtgcttatacatatatgtattcagtagcatatgttatgagattaatattgcctaattaaatgtgtttatttctttatctcagaagatctaaagcagtccacagtagctggcaagcaccccccagtttgaaccaacctgttagctagaatccaagcataaacccagcaggcgagacaaaaggcacctaaagttcaagcatcaaggagtaaagagggagggtggacacagatataaagacctggaagaggggaagtctttatcaagcaaaagacaaagccaacaccaggttgagacttcggctttcctacatttactcagagttccagagtcaaagccaagtctgattttgttggttctgcgtctcttataaagtccatcttgcaagccttaaagagtaaaggtcaaggttcaagatcaagtgacattgaggtaattgccagtctcgttttatattgtgtatcttgagctttttctgtttgttatttttttaattaaaccagtgaacaacctcctaaaaaaagttacttatttttatatagctaatttccattatagctaggtttaatattatataatttatatacataaggaagtttagtgggatattacaaaccagtatatgtaattccagatatttacagattgcttttatgtttcttttatatttatatcccaagtagtaaaaacataaatgtttggctgggtgcggtggctcatgcctgtaatcccagcactttgggaggctgaggcgggtggatcacctcaggtcaggagtttgagaccagcctgaccaacatggtgaaaccccgtgtctactaaaaatacaaaaattagccgggtgtggtgccgggcacctgtagtcccagctacttggaaggctgaggcgggagaatctcttgaacctgggcttacagtgagctgagatcgcgccattgcactccagcctgggtgacaagagggaaactccatctcaaaaacagaaaaaaacataaacatttaaagtggtaggttcaaaagtagataccatttttaaagcactaaatccggttttgttttaactcacttgtatatgtgcagttttgtttataagtaatctctcttaaatgtcaaatttaaaattaagccttttaatgaaagagtaattttaatttcagaataaaggcttctgcatgctgatattcagtgaaaaatctgatggatcctttatctgaaagaagggagtgagtcctaaacagtttgtaattttataatgctagccaaatttggactttttttttgtttttcttgttttcaaattatacatgcatactgcagccacactattgtagacactaaaagtacagttacatgtttgttttgttctttttatttttagactcactcttctaaacataatgggtcatttgttttcatgagaaaaagtgaaagttttttttctgattattcatattatattgaagatgtgagcttaataacttgaacttgattttcctattaatttcatttcacatgtaaataatgcttttaaaatatgtttacttgatatctcatgttcaaagtgtccttaacagctagtcatatttgaagatgttcgagatgctgaagatgctctttataacctcaatagaaagtgggtatgtggccgtcagattgaaatacagtttgcacaaggtgatcgcaaaagtaagtgtgactgaatgctagattttatttattcagcagaatgagtttcagtgatgactgattttttaatttaaaattctttcagtaaatgattgctagttgagtggttgttactgtggtgttcaggtaacgaattatgtcataagtcttgttctttatgttccagcaccaggccaaa

SEQ ID NO: 36670 - DNA, 2300 bp, Homo sapien
ttctcctggtagtgaataagtctcacgagatctgatggttttataaggggaaacccctttcgcttggctctcattctctgtctgccaccatgtaagatgtgccttttgccctacaccatgattgtgaggcctccccagtcttgggtatgtctttatcagcagtgtgaaaacggactaatacagtggctcacacctgtaatctcaactttgggaggccaaggcaggaggatcacttgagcctaagagtttgaaatcagcctaggcaacatagactccatctaaaataaaaagagagagagacagagaaagagagagagaaagacaggaggccatgtgaagacagaagtggagactggatctatgtatccacagccaaaacatgtgtggggccaccaaagactggaagaaacagaggattcccctagagtgccttcagatagatgatggccctgcggacacctggatttcagacttctggcctctgaactacaagagaataaatttctgttgtttcgggccaccaaatctgtggtgctttgtcatggcagccctagccaactaacacatggtaagcattctaagcttttgtattatgaatccagcctgctctccagcctcattttccaactcttctccagcctcatgctcctgttttgcctcatttactatattgcctcaaagcctttgcacgtgctgttccactgcactaattactcttctccattctttacccatctcttcaagacttgttcagggaacataagtgaccctctagccttgctcaccatcccacaatgcctgctctcagcagcatatagttcttttcatagccctgtattatagtttgtatctttaccagtgtgattgttagattctgcctccctaccaaattctaagctctaggggaataggcacggtgccagtctagccctgtgcctgcagtgccagagcaatcccttctgaatgaaagaatagccaccgttccagtacagctgcagacccaggaacctccacagcctctgggagggctgtgagctagaagggtgaccacgacatgtattcttcaaagcctaccacttctgcgagcgaaaaggggcactcttcacacttaggagttgcctggttacactcccagccctgaataacaggctgtgcctgccggccacaggagcaaggcgaagacgagtctaactagaaggggatgggctacaacattttgggggaatagggagagggtaatttaaattttgcttaactgtccctgcatttaaactgttgtcttctacatcatgtattcatttgtacattcgtttgtcccccctctagaatgtaagctcagagggcggggcttggcctgtttgttcattgctatatcccacgctaagtgcctggcgcatagtagacgctcaataaacatctgaatgaatgtactcacagctgagtgttatgccccaagtgaataaaggatgaagaatcatataatacttaaaaatccaacaggccaggcgcggtggctcacacctgtaatcccagcactttggaaggccgaggcgggagaggcttgagcccaggagtttgagaccacctgggcaacacagcgagaccccgtctctattaaaaaaacaaatccgaacaaaaccgagacctcacagttggaaagccgaaggctcaagaccagaggggcaggaggcctaccaactgccaaggtcctgcgctcaggacgatgcgctgagggccgcggaggctgagcgggggcgcggttgaaagcggctctcactgaccccacctccgcccagccgcagccccgccaccacctctgggtcctctaacccccggcgtccccgccgcggcctcaagccccctcttggcctccgccctcctgacatacactggccctcgccgccccctccccaaatcccgtcgcactccaggaccccccatacccggatcccatagggcctgggaacggccgcgctcctgtcttcggaattcccgcggcccctgggccgcgccggcgccgcccccgcccccggcccgtgcgtccaggctggcgccgcgctgcgccccctctgcgccggcctctgcggctgcgcgctggcggggctgaggccgaggggtgggggtcgcgccgggggccggcggagctcctgtggtggtagcagcggtagcgggagacggagcgagtccagcggccgcgggcagacccggagggaacggaggaagcggtcatgtctcgctacacgaggccccccaacacctccctgttcatcaggaacgtcgcggacgccaccaggtgaacg

SEQ ID NO: 36671 - DNA, 2300 bp, Homo sapien
taacacagaggaaatgctgaccataagatgttaggtgctggggaatgcagtgggaaaacaaaagagtttaaagcctggaggggaagataaacggtcagcaagttatcacagtttatcaaataaatgaattcaagggtgcaaaataccatgagcaagaaatacaaggtgtcaacagtagaaactgaatacatacgtgcctgtgggcatgtatacccacccacccacccacatatatacacaaggaacagagcttgaaatgaatctgtctttcctctacctcaagtggcagctttgttaattcctgcaaagcaatataaatagcagcttctatatgaaattatatgcatcccttttctgttgctgtttattgatgcctgaggagggcaaacatgggttctactgatgtcagcaggcagagttgctgcagtaaaatttattcaaaatgagtgttgtgggttctgatttgaatagataaactggagatgcatttatgaatttgcatgtctgtttacacaagcaatagaccatggtggctgaaagtcagccactggaggctgactctggcttctgttctacagtgggtccactacttactagctctataatcttggacatacatctgtaaaatgaagataaataaccacattaaccacctcatagtttgctgtgaggattaaatgagttaacaaatgctaagcccttggaacagtgcctagcacagagtaattgctctacaaatgtcacctattgcttttgctctccaatccccccttctcccctttttttagccaactaactgagcaggataatattggatctcgtggatacagggtaattttcttcagcagaataccagagaaagatttattatcgccaagggggcccaggaatttaataacacatttgttgtttttagagctgagtttttgttggagtgttaactgagaaagaaagttttcagacgtgaatggaatgtgacatttactctggtattattagcatatagagtagtaaaaacagtagttgatagtcttcgtgcatgttagcttcccttagacttattttcaaaatattcatttggtttatcacattaatatattgtgtcccatttaacatagttgagacaaattaaggaaagatgatagggtatgaagagctgatagaagcttttaatatgtggaaaacctcagaatataaacatctacagtgttattaataggcataccgtcaacaacagtttttcagactttgtggttcactctggagaaaaacaagagcatgacatcttgaatttcttcactgggtaattaaaaaactcagttataatgtaacaccagctgcacatatcatgttagtggagttcagcatcaattaaaattataaacgaaacctgtcatatgttccctttcaaagctgttcaagacaactgtccaaatcaacaaaacagtatgaatatttactaccataaatcttttaactctttggttttaactcatttcaaatttttagttctactctattcaaataaattattatataatagctaatacataccaagagcttactgcataatctagctgctgttccagacattagtaaccaatgagaaaactgtagagagtagctgcagcttttagtaatacaatgtcaaggagaagaaagtgggggcagtaccgaaacttacgtacagtaccgtcgttagtacagcattgacactgacggcctccttcaggaaatacaaaccttgtgaggttttaattactaatgctacagagtggcgtttttccgaggactgtgttccacttggtctgtctctgatggctattaactaataaccgttctcattctgctgctgtgggaaataagcaacaacggaaaagtaatcgataatcttagagcataactcaaaggccagagcagccaaggaggtggaagagtcccgagccctgccttctccacagcacccccaaaaccccacggcggggcagagcgcctggtagggtacgagcggccgccagcgtttcccgcgcggcgccgggggcggccccgggactgggggtggtgccctgggagctgtgtggccgcgtgcgcgctccgccggggtcctggaggcctctgggcgcgtgcgcgggcggtcgctacctgcggccgagccagggagcgagagggcgcagagggcagcgggcttgggcagcatgaggcccggaggggagcggcccgtggaagggggcgcgtgcaatggccgctccgagctggagctactgaagctgcgctcggcggagtgcatcgacgaggcggcc

SEQ ID NO: 36672 - DNA, 2300 bp, Homo sapien
taggagttcgagaccagcctggccaacttggcaaaaccccatctctactaaaaatacaaaaattagccaggcatggtgggcacctgtaatcccagctacttgggaggctgagccaggagaattgcatgaacctgggaggcggaggttgcagtgagccaagatcgtgccattgcactccagcctggccaccagacaagtgaaactccatctcaaaaaaaaagaaaaaaaaaaagagaacaagatcaagaattcatttttttttaaattactaatccacttttcttaaaaattcttttttttttttttccgagagagtctcgttttgtcacccaggctagagtacagtggcgcaatctcagctcactgcagcttccgcctctgggttcaagggattctcctgcctcagcctcccatggacctggaattacaggcaagcaccaccacacccagctaatttttgtatttttagtagagacagggtcaccatgttggccaggctggtcttgaactcctgacctcaagtgatccacccgccttggcctcccaaagggctggaattacaggcatgagccgccaggcccaaccacaaatttctaatgaataagataaagcaatcctgctgaccacctttcccaaatccagtcctttttctagaggtatgtatccttttcagagtgtttttggtgtacttatgggacataaatagaatcctgtataaattgtgaaagaaggttttcctcaagtattccactcaatatattgttctggctttttaaaattaaatagtatgtcttgaaaataattccatataatccttctcgtttttataatatttatcaccagttgtgatgaaattccggttttgccaggccaggtggctcacacctgtaatcacagcacttagggacgtcaaggcaggagagtctcttgagcccaggagttcatgaccagcctgggcaacatggtgagaacctgtctctacaaaaaaaaataaaaaattaactgggcatggagcactcctgtggtctcagctattcatctgtgggaagctgaggcagaggaggattgcttgaacttgggaggtggtgactgcagtgagctgtgatcacgccactgcactccagccagggtgacagagggagatgagtaccaaaaaaaaaaaaattcatttcaaggtcatggtgataagatatatatcaaggaaataacaatacagtatcctgaaatctaatacgtgtttgatgtttttacttgatttttgtcctgctaatagaatgtctggaatcagttgagaagaaatatcataagcattctaaggactcctgaatctaacccattaaaataagtccagattggttttctaatcacctaaatgtgggtattattaatcaggcttaaaaagtgttatcaaagcacgtcaatcacagagctttataagtaactattcaacacgcaatcctttctctaatctttttttttttaattgtattagagcagttagactggtgtgagaacttaacagtttattaaaatgtaaaatattagtgatgtaggcattttggaacataataaaatattggatattggtcaggaacaactgctttaatactagggtatcttgtgataacattgaatataatctgattttcagaggttgtcttaacccacttcaaatagtaactcctttctggctttcctgaccttccacctcttaagacagaatttctgattttttacagacttttgataatagaatcatcacaatgctgtgtaaaaacatacaggatccattttttttttttgtaatttcagcacctgataccatattgcatgtttgcattagattgtgtatacatttaatcttttctctttttctctcttttttgggaatgctttctttgtgtcaagcactatgttacctaataataaactataactaacataaataaattgcagtgttattactacaaataatttgcaaatcaaaagtccagcaatgtgaattaattttgaatagtagttgggtaattctgactacctggattttcttactttagcaataataacaaaagtaatttcaaatgattttttatttcctagtgtgactgtgaaatactatggaaaagcatctcattctgcttcttatccctgggaaggattaaatgcattagatgctgctgtgctggcctataacaatctgtctgtgttcagacagcaaatgaaaccaacctggagagttcatggtatgaatgtcaaataccttctataatagatggtgcttgctatagttcagtgcagta

SEQ ID NO: 36673 - DNA, 2300 bp, Homo sapien
aggtttggctggttacttctacagtgcatcatagatgcctcctttgaagtttgcgttgcaaaacctagagccatacggtgttgaatgattccaaattagctcctgcctagaagttatcataaggaatcttagcttggacttctaaaagtgtctgttattttcttttctttttttgggacggagtttcattccttattgcccaggttggagtgcagtggtgcgatctcggctcactacaacttccacctcccaggttcaagcgattctcctgtctcagcctcccaagtagctgagattacaggtgcccgccaccacaccgaggtaatttttgtatttttagtagggacagggtttcaccatgttggccaggctggtctctaactcctgacctcaggtgatcctcccaccttggcctcccaaagtgctgggattacaggcgtgagccaccgtgccccgccatgtctattattttctatcctgctaagattaggagaccaagcccaagaaactccaccaaattttacctgcagtacctatagatttgagtgaattcctttcttctagaggtttcagaaaaatacctccaagtacttgcctagaagtgactttccttactaactgtaagactggacactataaactggacctacgtcaggtttcctgagaggacattataggcattggttccgtaagtacagccaacctttattccttaaaatggcttgtcacacctcgttaaatgaacattattctcaaatagggcattcaaggcaaggctttcattgcataattgatgcttccagttgtattttggcaaaagggaggacagattcttactaaacctatgcaaacaactatattgccaagaaatgtagagagactgggtaagagtttctgaattcaaataagaagaatcgtgttagtgagaatcatatataatttaagaatacttcattctggtttataaaagcagaatttaaaagcttattgtgaattacagatagcacaagaagagaaagaaaaggcttcttacgatctgggaacagaaccttaaaacaactgcatttcaaataacccgaaaaaaatttctctcatcaattttttttcagtcttgtgtaattaattctcattctattggatcttgggttagcagttgtgtgaaaccgcttttcagctatagagttatgggaatcctgactcagtttaccggtacagtctgaaagttaccaaaaccatgtcagctcagctttgaagagtcaatagtttggagtacctaatgcggtctcttccacgaggctctgagactgtcttttgatgaagacacaagatccggcctgtagattatagcagagtcttaaagtaagcatcaaagcaaaagaaaaactgtctacaaataacacagacttgaggctacagttaatttattactggtatttttcaaatgtggacagtgcagcaaggttcatgataagaacaatgcaactgacaaggaaatttacttgtttctgcgccaaacaaagacaaaaaaacctcttccccagttgccctcccaatctcagccatatagacagcccacgcaggtaccgagccctggggtttcagggattcagccacaggaagtgggggcaggaagctgtccaaatccagccctcagctaaagcaaataataatggccgtaagcttaaaatagatccagggaggagctcattaacgtgaacatagaaagcagttccgcacctctggccttactcctcttggaaattgctttggtccatttttacttccttttattcgacgcaccagaaaataagacttttaccaacatttttactgcatttgacgatgaactaatttagaccggctaaaataattgttccactgggacacaggaattcaacctcagttcagaaaatccctgacatctgacgtaggaggatttataggtttagtggaaattgctttctcctgctctccagattgcatcctgtgggttgattttttttttgcatgagtaaacatccttctaataatgaacagaccaataatgtcttaagagagaaaaagaacaatcttttcctttttgctgtttctggagagagctgtttgaatttggaaacccatgttggctgtcccaaatatgagatttggcatctttcttttgtggtggggatgggttttggccactgaaagcagaatgcactggcccggaagagaagtccacgagatgtctaagaaaggcaggtgagtggacatttagggatagaggatttaggaaaagaggatgcacaaagtgagcttac

SEQ ID NO: 36674 - DNA, 2300 bp, Homo sapien
gtcaggctctctgctcttcttgcacaaagaactgggagggactctctggaatttccctatctaagaaagtttaaatgcacttaagaccccctacctagggatctcacaaaataaccaggaaaaatcaaccatctgagaagagaagagactgggagttctcactgcacccagatagacttttcatctagtcttctgagggcagctttaagagattacctgttggactttatctgtataagacaactttagttcctgtgtagttccacccctcactttcctcctgggtccattcatcctccctaatgatttactgtccctcaaaagaattgcctacatcccccatctcttccttatgaaaaagggtatataaatgtctgtaccatgctgggtaattgggtaatcatgatgtgattttcctccatgcatgttaataaatctgtatgccttttcccctattaatcttccttttgtcagttgattttttggtgatcctccatggggcaaagggaaaactttcacttggtctctacagctccagatctatttctatagtctagaaatagaactagactttctcctgaactccaggctcatgctctagcttttttttttttttttttttttttggagacggagtcatgctctgtcgcccaggctggagtgcagtggtgtgatcttggctcactgcagcctctgcctcccaggttcaagtgattctcctgcctcagcctcctgaatagctgggattaacaggcacgtaccaccacacctggctaatttttgtatttttagtagaaatggggtttcaccacgttggccaggctggtcttgaacttctgacctcaggtaatccacctgcctctgccaaagtgctgggattacaagtgtgagccaccgtagaattcttgatattattgttgacttttctgtctctcaccttctactctatctgcacaggcaccaaatgtatgctaccgcagaactaacttgagtatctcactcttctgtcttcctttctcttcttccttcttcgcttccctcagagcaggaccttattctcttttgtcatcataagttccctgattcgactgatcccaattaggaattatttcaaaaataaagtagatcatgccatctcactttgcttaagggaatcaaagagcttcttttgattctgtcatttatacatagtaaaatcccaattctgtttcacttacggctatcccacctcctgatctctgtcctcatctccctatgtttctaccatgaaattttccattgccaggacatagcaagcaatgagtagtttttaaacatattctattttgttcagtaggttagacataaccacatgtatctctacaattctaatgtgcttaattccatatcccaggataggaataaagcctaatttatgattgattttatacattttagggttaaaggccaaagttaatttaatgcttatggtaggaagaaaagcttacataatcatgaattctatgattaatgtcatccttgaaactaaaaatgtattttatgctttgatgttttcactggaaaaagttgatctatatttgtgagaaaggaagtatccttgctcataggcaaagcatattctcttagctccataaataaatcaaccctaaggaaacaggtcattcatgtttactcagcatttcctgaacacatttatgtacccatctaaatgtccaccaagtcctctctgcaaatctacttggaatccgagctgaccccctggtggatgggacagactggttttatgcagccagaagatggaccaataatctcagcacaaagctggcatgttcaagagatttaattttttatataacagctttagccaaagctattctaggattcagtggaagcagaatttcatgaggacaaacttctcgactaatggccaatcactaatcagcagggagggcaaagcctggtgtttgtgtcatggcccggagtggagggggtgagtggggcgtcagtatcaaatagtaaatcgggacaactagcctggccagccttgccctcacagcccctcagagcagcccgtcaggaggcagcagatggatcaatggtcaagccaggggggatttgctctgccacaggctactggaaagcagctttttgcctcacagatgtccacaaaatgccttattttacaagactcattttgttcttgttttgcttgatggttctcgtggagagcagaaaacccaagaggaagcgatggacagggcaggtggaaatgcccaagccaaggtaaagtcataggtggg

SEQ ID NO: 36675 - DNA, 2300 bp, Homo sapien
acgtatgcccggctaatttttgagtgtgtgtatatttttagtagagatgggtgtcaccatgttgctcaggctgatctcgaattcctgagctcaagtgatctgcccaccttggccttttttttttttttttttttttgagatggagtctcattctgtctcccaggttgatctcggctcactgcaacctccgccttctgggttcaagtgattctcctacctcagcctcccgagaagctgggattacaggcatgcaccaccacacccagctaatttttgtatttttagtagagacaggtttttgccatgttggccaggctggtctccaactcctgacctcaggtgacctgcccgccttggcctcccaaagtgctgggattacaggcatgagccaccacacctgccagccacttctcttttctctgtaaatgtctctgctgagagaaattttggaattggctttgatcttggagcatgattgtaattaagctttgatatgtgcccataattaaattgttatgggcacatgtccacaataaattgttgttattgttgttaaccaaggaaggagagattgttattcctactgaaccagtcctatgggagaagagccccagggagcagtggaggtggtggtggctaaaggagagccccagaggacaactgcacccagagattgatggaccttggaggctgaatagcaaaaggcttctagtactcagctatcaaataggaacgcattatatacagcacctgctttgcaggccttgctgtggtagggcctactgcacaaattaggggcttttgtagagctgtggcaggagagggtgtcaagtgtcagttaatctgaagattcaacacaatgaatgaatgaagcagcattggagtttggttttgtttgcatatctcagtcagtcagattatcagtttactatacagaaaacaacatcagggaatgatttaaaatataccatctaattttagatatccttcacttttttactcccaatttcatcaagaaactcacagatttagattaactttaacaatagaaaacaaatcaaatttaagagtttatgtctttatataacagaataaaacttgcccaacctgattaaccctttctatcctccccaccttcccaatccctccctcctttcctttagtaaggtccctactccttaagtcttttgaactcagtcctctctcgatcccacacattggacaatgaagcagtaagtgtgtcctttgaagtttaacctttcatatttgtatgctttccctcacattaaatgtaattcctttttttgacagcttttacatctaaacaaaccaaaaaaaacaaaactcctgcaatgcctaaaacatgtcgtgcacctaacacactacccgagaaaaaaattgttatgaatatccaactctggccagagccgtggctcacgcctgtaaccccagcactttggaaggccgaggcgggcggatcgcttgagtccaggagttcgagacgagcctggccaacacggtgaaaccgtgtctctaacaaaaatacaaaaaattaaccgggcatggtggcacacacctgtggtcccagccacgctggaggctgaggtgggaggatcgcttgggcccgggaggtagaggctgcagtgagccaagatcgcgccactgcatcccagcctgggcgacagagcggtgacaccgtcacacacacacacaaaataaaaaataaaaaaaatcctattccatttccttgtcactggctttccccctcctcacttaacccccgcccctcgcaacagcaactgaatctaaaaacaaagcctttcccagaccctgcgggaccgcgcgcgggcagccggctgcggacagctttgcagccggagcccggcgccccctccgagctctcgagggcccgggggtcccggacctcgcctacagcgggcagggccgggacgagaggacgaggacgccgctcgctcctgcacctccccaagccggcttcgccgggcgggcggcggctgggtagtgaccgaccgccacgaagctactgccacgtcagggcaacttcacaaatcccggacgagggcgggtgacgcaagccgggcggccgcggcagggctgggcctgcgactacccgaggaggctgacctccagcccgggcgcccggttcagcgccgccccggccggcgccggtgcctgccaggcactcagggaggcgggggcgcagtggaggaggcggcgccatcgcgaagcgagcgcctcgcccgcactcagccttgccaccccgcccgcagtccaggctg

SEQ ID NO: 36676 - DNA, 2300 bp, Homo sapien
accagttcaaaggccacttgaggatggtgggctagctatagaatagctgaaagtcctcagccacactctgggaggccctcctccctggggtttcctttgacggaagggatgaaaataggctaggaaaattactcctaggaaatgagctttgtaagtacctgagattttttttccgcctcatttaatcttcctaataatccttagaaggagtgatgttctattgataagcaatcgggtttagaagggcataagtaacttgcctctgatgggagtatgtagtgcctgcttgtgttggtgatgctccttgcacctcaccccacccagggacccactccctgccctccctatccaatctctgtcctggactaggttccaggctcccttgccttctggctaccagatgggtttggccaatgggagacacaggagagtggagggaggatggatggagagaaagagaggtctttgctctctccttgatgtgaggccgttctggcagcagcagcttcctcatcagttacagctcctgttttgtggcccctctccaggactctagctcccttcctcactcctgtaaatttaggggtggtgttatcttcccactatcgctaatacctgcattgattccctaaactctgtccacacccctgtaaattgttccttcacttgaaggcttcagttaaagtctttgcacataccgtctgtttcatcctgggaagaaccttaactgatacagtcataccaaattatactgcctgcctcccttggaaaatctcaggacctttcccattagaagcagccaccttctggaaagtgtctgcatccaccttctgcactcagaaatactaaaaaaaatccaggacatgagtcatgatttggtagactgtgagctccttcagggcaggaacactgccctgagcattcttggaccctctacttagcccagcctcaggcatataggaggtggttaataaatgtttcctatggaggttagcacccttgggccctgagagtctcctgccctagcttcctccctccgcttctgcaccgcaccaccggctgagctgctggcacctgtaggagctggatcatcatgctgaccggccggttttttcttattgtgctccacagaaggaagttcatccacgtaattttttgcagtacccagaaagggtgggtacagtgtgttccgtggtgaaaagcttgtgaaggaggaatgcaggttttagagtctcactccacgttgctgctattcctatttgagaattgcccccccaccaccgccactcccctactcccacaaaagccttgaaatattttattcatgtgggattacagtctatgcaacaatgagacatgaggaggtggccatgaatagcccccgagtgtgttatacactgagaccttttccaaagggctgcagaggaattatttagtctaagcagccacgagtcatgtgatttcttcagaaacatttacgtctgggtaggcctgctttttaaatattcttggtgggaagcactttgaaccataaaggcacactaaaagacaattgctatggagactgcgcctccactgtgcatttatctgagttctccgcctggggctcttgagcgtccacagggtgtcctgggcacgctgctctggggtgggggatctgggcgccacagtgttgggaggccacccgcttgggaccctagctcaggactgtaagcaggaggcatccgcccacggtagacgctctgcgggcgtgtgggagtgggacggcgggggggacattgagggtgtgcggcgccccctcccctgcctgtgcggggaccacgtgaaggagaggcgcgtgggggcccctggcgcgcagccgcggtgggtgacggccggcgtcccgggggccccgtgtacggggcgtgtgtcggtgtgagtctgggagggtgcaggggccccgcgcctccccggtctcctcgtgcgtgtgcgtgtgcgtgtgcatgtgtgtcctcggcccagcgccccgccgagtggtgcccgcggccgggcgagcgcgcgcgcgcccgtgcggggtgtgtatgtgagtatgtgacagtgtgtgtcaggtgactcgggtcacgcagtctctctctctctccctcctccgggaggaactgccgcgctccggctgactcctccgccggcgggcggggcgggggagggggcttcgggcgcgctgggaaccgcgggacccggacctgggcgccgcccgccgggggacgcgcggcccccgcttccgccgggccccgctgagctctagacaaacctccgcttcagaa

SEQ ID NO: 36677 - DNA, 2300 bp, Homo sapien
caaggtcagcagttcgagatcagcctgaccaacatggtgaaactccgtctctactaaaaatacaaaaaaattagctgggcgtggtggcaggcgcctgtaatcccagctacttgggaggctgaggcaggagaattgcttgaaaccggaaggtggaggttgcagtgagccgagattgcaccactgcactctagcctgggcaataaaagcaaaactccatctcaaaaaataaaaagaaaggtcatgtgtacaaactttgactttgagggttatctaggaactcattagtaacctgcctggagagaaacctggagctacaagccagcagagaaaggaaatgtgttcttctatcagctccaggtgtagagcaacaggaatggggcacaaatctgaagaagggctgggcgcggtggctcacacctgtaatcccaacactttgggaggctgaggccggaggattacttgagcccaggagttcaagaccagccttgacctcctctgtgttaaacataaaaaaattagctgggcatggtggtgcacacttgtaatcccaactattcaggaggcagaggcaggaggattgcttgagcccaggagttcaagactgcagtgggctactgcacttcagcctgggtgacacagcaaggccccatcttaagggggaaaaaaaagtctggaaaaggccaaaggatactcagaagagagatttcacatcctgttaggtaaaactgcagctgtgactatggggttgggaaaatttcagaagcagtaggagaaaatcaagaacttccccttcctagtgtggaaacaggctcttgggatctctcctgcctaatgatccctgaaggagagagggaaacaaacatcttaaggaaaaggaagaaatcatcatgtttcttttctcctggaaaccaggcctgtttcagagggaataagaaaagtcggctgggtgcagtggctcatgcctgtaatcccagcactttgggaggccgaggctggaggatcacgaggtcaggagttcgagaccagcctgaccaatatggtgaaaccccatctctactaaaaatacaaaaattagccagggatggtggcgggcacctgtaatcccagctactcaggaggctgaggcaggagaatcacttgaacctgggaggcggaggttgcagtgagcctagatggtgccattgcactccagcctgggtgacagagtgagacttcgtctcaaaaaaaaattttaagcaagaaagaaaaaaaaatcagattcgtgataagcttgtcccaaaacctcaggtaagattgatagtccattttagggtgctgcttgcctcctcttccatctctccgcctttggagagcagatacctgtccatgcttcttcaaagggtggaatgagatcccatccatcttacatgtattcaacagtagcttattgaatgcttcctgtgttcagggagctcttctaggtattgaagaagtggctgtgaatgaaaatagacaaaaccagactgagataatggtatgtaaagtgtgatatgaatatgggggtcaggctcgctcaatgcttttgccatttccatatgggatgattccaacaagatacttatagtcaagctgttagaaataaaggcttcctttcccctctccagctaccccaataaatctgggtcattcatcattgttgttcagtttgtactgagcagccccagttaagtgagctatggttatattgaaatatccacttggccacgaattgagtgaaggtgggaggttcctcctgctaattctcctcccctcccaatacacttcctggcaacccccacgcggaaaacctcaccctactataggcccccttcctcccactcttcagaaggcggtggccccacccaggagagggctgcagatcggggccagccccagggcctccgcggtgccacctctctctcgcgagggtccctgccgtgccccggctcgccgctgggaggcgctgcggcaccggcgtaggagccgccggcaggggtggggcggggccggcgggacggggcagagggccctgcggcggcggacgcggcgggctcggccacaggtaacccgcaggagccgagagcgctgcctggcgcgcgggcggctggaggcacggcgctgggcggcgccgaggccctggggccgccggagccagcgggagccagtccccgtcttcgcccctcgccccccaccgtgtcgccggccttggtccctgcggcgcggacgtccggcgcgggagagaaaggtaccaggcgacctcgccggctccctgggacccccgc

SEQ ID NO: 36678 - DNA, 2300 bp, Homo sapien
gctgtggaagggagatcatttcataagtcatggctaatactctattttcctgccatttaggcctggagtgattttgcaatatttgggcaaacagagcagaagctcagtataattggtttgaacaaagcacagattacctgaatgaaaagaggcagcgcacctatgtttttaaaaacaaaccacttcaaatagtgtaacggtctgggaaagataaagcccagactgtggccgttcagcgtgaccatgagaattttcaaaggcatttccagttccattactttcagtgttttgagtctcaactttattccttctttttttttttggcttgttctatttctggcatatcccagggatctcagaccgtgactcaccaagctgctttacagcagacccttcaccagatctgttttgtttctaatgacccagtgagcaggagcaggatgggtttgcgagagttcctctctctttttctgctattctttacctgcattttgagcaacagatggagaatgatgagaaagtttgataattcacaagagtggggggtaagaattctttccgaagttacagtattcacatctgggccatactttcacataataaaataccctctttaatacccaccacagtcctgggagataaatgttctcatgtctgttttatacgtgggcatttaaccctagcctcacagagtggttggccaaacaacctgcctgaatgccacggtgaacgagttcaaacaggatatggtccagggctttccagccgtatcatggccaattccttaatctttagagactgaaaggacatttgggtgtgcctgggaacaaatgtaaaggatggctgcatcttccagaccttcagagttaggatgtgtggtagggtttgggttgaaggatggtatctctgttgtagcattttctttccatttgtatgtactagtatttttaataagtatcttttaaaatgcaaagaagccctcacttccttgctgttctagcaggactggattagacatttaagtatttcttcttctaccattcacccttgaaataattaccagtggctttggttgggtctaatggcagcccaggtatactggggggagtcccagtctttaaaattctcttcattttgctatgtggtaggaagaattcagtttgctactagttactaccctccagatcactgctctgcgacagggctttagtgttccataggtggttttggtgccacttcttttcctcctgttagcaaggaagcaacatgaccagccccctgcattggcagagccactgttagtgtttagcatctgtgttgtccccaaggtggattgtttcagccacttggaacaaggaattggcccaggcctgtgcccagctctccatctgttccagaactcgtgaactacactatttacggtgaaaaaaggttgaagggagagaactgcagtaaatgctaggagaaaaccccaaagagagaacccactcagcagggtctctgtggggtgtgttccacaggccactgacccactggggaagcggcacgttagccatggtggacgcacaaaatccaaccagggggcctttgatgatcacacacggtacagttccctgccaaaggcggtgtgtaaaccaggtggtgcttaggggattataccaggcctccgctccctgggagaaaaacagagcaaaccttgcagttctggccatactcctccggaggatgtccctgataggggaagaagggagggaagttggcacattctgctgccttccacttggaagttctgttcaggggctttgctgtggagtgtgcttcctgtgtgtcctgcctcccacagctaccctcccctgcaacatgcaagcagcagaatgccttaaaatcacagagaagaggtgtgacctgtccttgtgtgtcaagtggccctgatggcacctttgttttgtaacccctaggtcccgaagatggcatattcataaagacatcttctgatgattgtgaacatctttacctctgggtgccaggccgggccagtgacttcgtgttgagctgaaggaacttgtctaccgcttccctgaaaacctttctttcctaattcatgagccagcaagatgcggtcgctgcactttcagagcgccttctcgtagctgcgtacaaaggccaaacagagaatgtggttcagctcatcaacaagggcgccagggtagcggttaccaaggtaacaagagaaaaatacgctgtagccattccctgggaactggcctacctcttaaccattgtctgaaaaactgctgtgt

SEQ ID NO: 36679 - DNA, 2300 bp, Homo sapien
tgcaaaattgatcaccttcttgtgcatggagctggtccttctcagtggtctctggaaggccacagagctcccgacaaaagaaagtcagtaggaaaagctgcggggtttccacctctagcagcttttatcgtaagtggaatcacatccatgaatcctgatagaaaaatgctagtctctcatggatctaaaagtatgaagtgctgtataaacgtcagaacccatcacatttctctggcaatttcagtatgtggtaatttaatggacagccagccccaccctcagccatacaaagatcaagtcttacagggttggagggttccccaggcatagaaagattgacggatctttaatccacctgtcatttgtcttccagagcccaaggatcttcacttaaagggcaaagagccttactgtggaccatttccctgtgcagttcttttttgtttccacttaaaacaaaaaaagacttaagcaggtttctccatgcttacatcgaataacaaataagttggatggcatgctatgaaagtttattttatgcataattgtatatgctgaggctttttctcaacacaaacaaggaactttaggcataagatgttacgcatactgttctcttgatctgtggttacagaaatagcattagtatttgctttgcctgaaaagagaaaatccccttgccttaggcccgtagttggacgtggattttaaatgggccacagcagtactaagaggatactgtttatttatttatttgagacagagtctcgctatgtcactcaggttggagtacagtggtgcaatctcagctcactgcaacctccatctctggggttcaagcgattctcctgcctcagcctcctgagtagctgggattacaggtgcctgccaccacacccagctgatttttgtatttttagtagagacgaggtttcaccatgttggccaggctggtctcgaactcctgacctcagatgatccacccaccttggcctcccaaagtgctgggattacagacgtgagccaccatgcccagccataggatactacttttggaggcctcaaggtcaatattccctcacttctgtggactggaaaagattaatgacatcccatttcgtagatggtctggtttgctgagaaaggctggaagccatgcaaagttattttcactgactaatgatatggtgaatggagggaattttgctgattcttattttgggtttgggtgacctctgagtgtcacttgtcattttgattggtgtggttcacgaacgctctgaaagtacattttaggctgatcctggtgctgtattaagagtccatacatcaggtgagcaatgggtatagtcactgtctttcaccatacttgatttcctggtgaatctgaatttagctttagaaatgactcggggaagtggttctcagacttcttggtctaaggactcttttacatttttaactattacggaccagagattgaaggtttccatcaactcaaagatctgtattctgttaaacaccccctgccaattaagccacctgaaggcaggtagggaagcacctgacagtgactgacagtccactgcatgccagccacctattttttcttggtgaatcccaacgactccccgtttttctttctttttcttttttaaaaataaagacgaggccgggtgcggtggctcatgcctgtaatcccagcactttgggagcccaagatgggcagatcatgaggtcaggagatcaaaaccatcctggctagcacggtgaaaccccgtctctactaaaaatacaaaaacaaaattagccaggcatggtggcgggcgcctgtagtcccagttactcgggaagctgaggcaggagaatggcgtgaacccgggaggcggagcttgcagtgagccgagatcacgccactgcacttcagcctggggcacagagtgagactctgtctcaaaaaaaaataataataaaaaaataaagacaaggtcttgctttgtctgccaggctgctcttaaactcctgccctcaagcagtcctcccactttggcttcccggagtgttgggattataggcatgagccactgcgcctgacccgtttttacatttgagaagacagagcgcagagaggtcaaatcacttgcccagagaccctatagccagtagctactgggttcaaactgagatctgttctgacccacctatgtttttctgtgtccattctgtcactctgcactgtaagaggcagagtaaatgcttccttttggggaagagataactgtcccgtggttggtactatg

SEQ ID NO: 36680 - DNA, 2300 bp, Homo sapien
ctttgcctgaaaagagaaaatccccttgccttaggcccgtagttggacgtggattttaaatgggccacagcagtactaagaggatactgtttatttatttatttgagacagagtctcgctatgtcactcaggttggagtacagtggtgcaatctcagctcactgcaacctccatctctggggttcaagcgattctcctgcctcagcctcctgagtagctgggattacaggtgcctgccaccacacccagctgatttttgtatttttagtagagacgaggtttcaccatgttggccaggctggtctcgaactcctgacctcagatgatccacccaccttggcctcccaaagtgctgggattacagacgtgagccaccatgcccagccataggatactacttttggaggcctcaaggtcaatattccctcacttctgtggactggaaaagattaatgacatcccatttcgtagatggtctggtttgctgagaaaggctggaagccatgcaaagttattttcactgactaatgatatggtgaatggagggaattttgctgattcttattttgggtttgggtgacctctgagtgtcacttgtcattttgattggtgtggttcacgaacgctctgaaagtacattttaggctgatcctggtgctgtattaagagtccatacatcaggtgagcaatgggtatagtcactgtctttcaccatacttgatttcctggtgaatctgaatttagctttagaaatgactcggggaagtggttctcagacttcttggtctaaggactcttttacatttttaactattacggaccagagattgaaggtttccatcaactcaaagatctgtattctgttaaacaccccctgccaattaagccacctgaaggcaggtagggaagcacctgacagtgactgacagtccactgcatgccagccacctattttttcttggtgaatcccaacgactccccgtttttctttctttttcttttttaaaaataaagacgaggccgggtgcggtggctcatgcctgtaatcccagcactttgggagcccaagatgggcagatcatgaggtcaggagatcaaaaccatcctggctagcacggtgaaaccccgtctctactaaaaatacaaaaacaaaattagccaggcatggtggcgggcgcctgtagtcccagttactcgggaagctgaggcaggagaatggcgtgaacccgggaggcggagcttgcagtgagccgagatcacgccactgcacttcagcctggggcacagagtgagactctgtctcaaaaaaaaataataataaaaaaataaagacaaggtcttgctttgtctgccaggctgctcttaaactcctgccctcaagcagtcctcccactttggcttcccggagtgttgggattataggcatgagccactgcgcctgacccgtttttacatttgagaagacagagcgcagagaggtcaaatcacttgcccagagaccctatagccagtagctactgggttcaaactgagatctgttctgacccacctatgtttttctgtgtccattctgtcactctgcactgtaagaggcagagtaaatgcttccttttggggaagagataactgtcccgtggttggtactatggctcatagatacactttaataatattttgaatcaaattgatgtgacttggacacagtttggccaagggaacatctgctgggctagctcaagtccagtgtaccaagatggagagtgagactgtgcctcacacggggctgctgcgttgcacaactccaggagacgccattcatatcctagtttatgtgaatggcactccctggagcacagtctctgtgcatgtagttggcagtcccggcccagcatcagtgtctgtagttattatcatcatagactttaagcttcttgaggtcagggataatatcctacctgtctccgagtccccgtggtgcccaggacaagacctaggaggatggtaggtggtccagaggtgcttgcttgatgtgaacacctgctctcaccctctaagctgtaaattccattaggtcagagccccaggtccaaggagaattctctcacacagatgctgcgcacaccagtggttgtaacaatgccgtttgcctccttcaggtcttgcgcttcagtcgtgggcgaagcctgaggaaaaagagagagaggctcaaggaagagaggagagcccagtctgtgccaagagatgaggtggcccaaagcaaggtggggggcagtcctcccgccgtccccacatccacccat

SEQ ID NO: 36681 - DNA, 2300 bp, Homo sapien
gatcagaaactcgggtggggcccagcaatctgtgttggaacaagccctccaggggattctcatggggactaaaatttgagagccactggcacaggccacttccattgagggaggggagcaaggctatgctagcctgtatggctcccttatatgaattagaaaaagatgtcccctgggcagacccactgtgcacagggcacgcatggtgagcagagcccgagctgatttcagctcctcttgccccacacctccacctcagctaggtgctcttgtgccgtgtagccctggaataaaccatgcctttgagttcactcaggagggagaagtctgggatatagagacagcttttggcacagaaaatgttatcaccaagtacttgctcttctatctgctatttcacaatcctctcatcaatttccagggttaaggcattacaactctgattaacttcctagatgtgaattgtacatattcagttgtgaacgttctcacaaggaccagaaatatgatattttttcatttcaaaggattcttactctttgccatgagtgttgtgggttggggtgggggagtggggggtggggggggcgggaggggggctgcatccgaggtcaaagaatgagtgagttatgttttgttgaaatctaaacgatcaaaaatctctaatgctgaggtgttttgtgtcgggtaggttcctggtgttctacaacatcgaattggacccaggaatatatttagcttaggacctaataaatacaataaaagccaaatgttcaaccaaccaggaaaacgttctatgttagttaagaccaccaagcagtgtttcctatgtctgaaatttatgttatttgcaaaggttctcgtgggtcccttaccatatggaatcttgcaaagaatatttgaccatattagtgaaaaaggccaaggaagcaaacacaatgggtctctgggctttttccttctgtagggcagtgtctcagcaggagacacccccagcagtgaacaggctgtggccagaaaagaagaagccagagaagagttcctgtcagcctccccagaacccagagcaaaggatgacaggaggagaaagtcaaggcccaaggtcaggagacacagaaagcagcccagaggggtggctgggaggcagggtggcgagggtcctggcagagcgtcatgcccatcagctaaaaagccactcacttggctggctggtttggagccagagcacagaaattaaatctggctaacatcagacataaggtgaatgtgctgatatatttcttttgacatgtgtggcttggagtaggacaccatgaggtgaaacaaagtggggctctttgcccaaatggggtgacatgggcgccaccgactggtgtcagtcttgcagaggtcaaagcgttcaggggtgttgtctcttcctctcttacaggtgtcagcattttctgaccccaccccaccagccgaccaacagcctggacaccagaagaacctgcatgctcataatcaccctaaaaagaggaacaggcatcggtgttcatccccacccccaccccatgagttcagggcgtatcagctctacacattgtaccggggcaaggatgggaaagtgatgcaggtacctgcaaagcagtgtcaggagaagggaacataggccttcagcaagggtttttgtttaacggcattcctgggggctgataggcactttaggcattgacttagttgagcacaagctttgaaggtaagccagatggcctccccacctgcacggtgcagatccactcctgctgctaaggccaaggcagacagggtgtgtagctgcagagcttgctgcacaatcctcaggtgactaggtatcttgaggccccagggtatataaaagcaccttgaggagagggaccatatcttaccctctgaattttagtgtctgctacacccaaaatttggcctataagatgttccaaagttatgacaaggatgagcctatctcttccatcatctctatcccctggtatactgcctggcacgtggatggtgctcaaaacatacctgatgaaggaatgaacaagggattgattccttttttgtttctctcttaggcaccaataaatggttgtcgatgtgaacctctaatcaacaagctggagaatcagttggaggctactgtggaggagataaaagcagagctgggatcggttcaggacaaaatgaatacaaagctggggcagatggagaataagacccagcaccaagtatgtcataaggcccagcttcctaattgcaaggtgttctggcagaacatg

SEQ ID NO: 36682 - DNA, 2300 bp, Homo sapien
atatataagtccttcgtttctttttagtgccaaataatggctatgggcatggggtagaagtgctaactcatacagcagctgtttcatcttttgaggaactgaccgtctgttttctgaagtggctacaccattttacattcccaccagcaatgtatgagggttctgtaatttctgtacatcttcaccaagacttattattatttctctttttaattacagccattctagtgaatgtgaatctcagggttgttttttttttttttttttagagactgtctcactctgtcacccaggctgaagtgcagtggcacgacctcagctcactgcaacctccacttcctgggttcaagtgattctcctgcctcagcctcccaagtagctgggactacaggcaatgcaccaccacaccaagctaatttttgtatttttagtagagatgaggtttcaccatgctggccaggctggtcttgaactcctgacctcaagtgatccacctaccacagcctcctaaagtactgggattacaagcatgagccactacacccgacctcatagtagttttgatttacacttccctaatgattgtgtccagcatctactggccatttgttagtggtttttttcttcttttaagaactgctgagacatccataaacattttcaaaatgcagggtatgtttttcagtgttaaggcaactgttctgatgtgtttttcctttgctctctatcaccaaatactgtacatataaatagtaagactgggctttgtgttgtccattgttaatcctaaatgcaacaaaacacatggagactttgaaaatccttcagaataatgctatagttaagattttgctaaagcaagtgttttttctaactccttgagctgcatattgccttgagtaatcatcatccggattgtatcctgtagaataaagtgaaatctggttatagttttacctggttaaacaaggtatagctataccattttatctgttaaaatcaagaaccaatactacctattggaactgctgccttttagaaaagctaaaagagttccacatacatacatataaaatgtacaacataaaagtcaagtgatgatgctgaagagtgtagatactcttttatctacatattttaaaatactaaattttaaaataataatttaaaatcggtaacattacaagcaatgatcaagatataccagctcagtggcactatattccaagatgtctgctaaacttaaaaaaaaaaattcactgatcaataaaaagggttaggatctgtcctcaccatgattttgttctcacctcttcggtggcacttttgtttcttctgaattcttctcttgcccaatctttcaggtatttgcgatcagaatcatttggaacttgccgaattgtttgcaaaatccttctgtagaggagaagaacttgttgccttcttacgaactgtaaaagggaggagtaaatagcaattactactgcacaatcgccagcctggaaagttctacttcagcaaaccaagctgtaaccagagtacttctcgttggtcaattttgaaaaaggcaaagaaaaacttttttttttctttttttggccagatgcagtggctcaggcctgtaatcccagcactttgggaggccaagatgggaggatcacttgagcccaggaggtctaagctgaggtaagccttcattgcgctactgcactcagcctgggcgagagtgaggccctgtctcaaaaagatgttttaaagaaagcatcacgaggttcatctgatctttttgcttactgctctgtcaaacctaagaaccattaaaaaatcaggagctgcctaccgggctgaaaagggctgccggtctcctagaagttgttattacaacgacagcactttttctaaattaacagttgttcaaatctttggtaatctcatttgctgtttgccacagctcagtgcaatagacttttaccgtgggcactgggcagctgaggcaccgggactcagggaaatcaagcgcctgacgctgtctcacgcgatcgcaccaaaccaaggaagcagccagtgcctcccgtcaggccccgcggagcgaagcaccgccccgcaggcatcgggccaatctcagagggcgcgcacgccgcatcaggaccccggaacccgccccgttggggatagggacagatggagaatccagctcagacccaggtaagctgctttggaaggcagagaaccgccggtacctgctttaacgttagcgtcgctgggggtaagcgggaagcagccatgtccaccagaggtcc

SEQ ID NO: 36683 - DNA, 2300 bp, Homo sapien
agatcacaagatgatttggagggaaatgatacaaaacatttctaaagattatagagaacagtactaatggattttttacaagaaactagagtcctgccagataataaaaacatataaaacaaaaagtaaaaacttaaccctaaatgaaacaattctggacagattactcagaccctaaaagaatttatcatacagtcaaaaaggcatccatcataaagccccgaaaaaggaatgagttatgtaatcaatggtattgatacagcttaacatctagaaaagaacttagatccacgtgatgctgtaaaccaaagtaaattctagatggagtaaatattttaaaaattaaagtttttaaaaaacgaattacaaaggcctgaatgggaaatgaaaagcctcaaaaggcacaaaaatacatgattgtataaagtttctgtatgtataaagaaatgacaaaaaatatagagcccatataaatgtcctcatcataaacggacccaagtcatgaacaattcacaaaaacagtataactaaaaatggcgaggggtatttaacttcactccttttaaaaagttagcaattaactattacagctaatgtattagacaaaatttggcatatattattgataatatgatcatgcagttagcatcattcatacaatgcctggtaaagttcaaaagagctaatgattagagttcttacatgtgccaggacctgttctcagtacattagagatacacaactgaggtagatgctatatttcactttacaggggaggtaataggccaggagaggggaaatagccagaacacagctaggaatagggagccccaggatgctaacaggcgaggcaagcaagtccccagtaaactagtaattgaacatttttcgttctattttaattcgatacaacaccacttggaaaattaatatggcaaagattcgctaactccacttctagtgatttaacccaaaggcatgtgtattgtgggaaagataaaacaactataaggaaataaaagcaaaagcctgaggcttagggatgttaggctcctcgttattagtgatgaaaagtgcttaagactgaagtgggtgagccattcaaagctttgtttcaaatgatcatgaaggccaccgctcccggaaaacctttgcgctacaaaagaacaggacaaaaacgagaaagagaaaaaaccaacacaaactgtaaaagaaattaacactttcaattttagtattttcaactatacacatttttaaaggctcgaaagaacatttaaatacgttttcacctctttcccccaaaaaaaccttaacttttttttcgagacagggtctcgctctgtcgcccaggatggagtgcagtggtgcgatctcggatcactgcaaccttcacttctcgggttcaagcgattctcctgcctcagcatcccgaggagctgggattacaggcaccttacaggcctcccagagtgcttgggactgcaggtgagagccaccgcgcccggcctccttcactttcatttgaactctctttaccaggaactgtgttaagtgccctacctttcttctttatcaaaacgaccctatggtgcactgttatcctattttaccgacgagaaaacttcggccagcgcagcagctagggctcagtcccgaagcctcgcgctctcagtccgagagcaacccgcgggccgtctcctaggaaaccgggctcgccacaccccttggtcgaaccccacttccgctcctgcgcgctgaggctccggcggacctctggtggacatggctgcttcccgcttacccccagcgacgctaacgttaaagcaggtaccggcggttctctgccttccaaagcagcttacctgggtctgagctggattctccatctgtccctatccccaacggggcgggttccggggtcctgatgcggcgtgcgcgccctctgagattggcccgatgcctgcggggcggtgcttcgctccgcggggcctgacgggaggcactggctgcttccttggtttggtgcgatcgcgtgagacagcgtcaggcgcttgatttccctgagtcccggtgcctcagctgcccagtgcccacggtaaaagtctattgcactgagctgtggcaaacagcaaatgagattaccaaagatttgaacaactgttaatttagaaaaagtgctgtcgttgtaataacaacttctaggagaccggcagcccttttcagcccggtaggcagctcctgattttttaatggttcttaggtttgacagagcagtaagcaaaaagatcagatgaacc

SEQ ID NO: 36684 - DNA, 2300 bp, Homo sapien
gttgcccaggctggagtgcaatggcgcaatctcggctcactgcaacctccgtctcccaggttcaagcgattctcctgcctgagcctcccaagtagctgggaccacaggcgtgcgccaccaggcccggctaattttttgtattttagtagagacgaggtttcaccatgttggccaggctggtctcgaactcctgacctcaggtgatccacctcggtatcccaaagtgttgggattataggcatgagccaccgcacctggcctgagtgtttcttgatgggaagaagaaataatgtaaaaatgtctttctcacatattaatgtatagattcaacactacttcaaaattccaaccaagatcacaagatgatttggagggaaatgatacaaaacatttctaaagattatagagaacagtactaatggattttttacaagaaactagagtcctgccagataataaaaacatataaaacaaaaagtaaaaacttaaccctaaatgaaacaattctggacagattactcagaccctaaaagaatttatcatacagtcaaaaaggcatccatcataaagccccgaaaaaggaatgagttatgtaatcaatggtattgatacagcttaacatctagaaaagaacttagatccacgtgatgctgtaaaccaaagtaaattctagatggagtaaatattttaaaaattaaagtttttaaaaaacgaattacaaaggcctgaatgggaaatgaaaagcctcaaaaggcacaaaaatacatgattgtataaagtttctgtatgtataaagaaatgacaaaaaatatagagcccatataaatgtcctcatcataaacggacccaagtcatgaacaattcacaaaaacagtataactaaaaatggcgaggggtatttaacttcactccttttaaaaagttagcaattaactattacagctaatgtattagacaaaatttggcatatattattgataatatgatcatgcagttagcatcattcatacaatgcctggtaaagttcaaaagagctaatgattagagttcttacatgtgccaggacctgttctcagtacattagagatacacaactgaggtagatgctatatttcactttacaggggaggtaataggccaggagaggggaaatagccagaacacagctaggaatagggagccccaggatgctaacaggcgaggcaagcaagtccccagtaaactagtaattgaacatttttcgttctattttaattcgatacaacaccacttggaaaattaatatggcaaagattcgctaactccacttctagtgatttaacccaaaggcatgtgtattgtgggaaagataaaacaactataaggaaataaaagcaaaagcctgaggcttagggatgttaggctcctcgttattagtgatgaaaagtgcttaagactgaagtgggtgagccattcaaagctttgtttcaaatgatcatgaaggccaccgctcccggaaaacctttgcgctacaaaagaacaggacaaaaacgagaaagagaaaaaaccaacacaaactgtaaaagaaattaacactttcaattttagtattttcaactatacacatttttaaaggctcgaaagaacatttaaatacgttttcacctctttcccccaaaaaaaccttaacttttttttcgagacagggtctcgctctgtcgcccaggatggagtgcagtggtgcgatctcggatcactgcaaccttcacttctcgggttcaagcgattctcctgcctcagcatcccgaggagctgggattacaggcaccttacaggcctcccagagtgcttgggactgcaggtgagagccaccgcgcccggcctccttcactttcatttgaactctctttaccaggaactgtgttaagtgccctacctttcttctttatcaaaacgaccctatggtgcactgttatcctattttaccgacgagaaaacttcggccagcgcagcagctagggctcagtcccgaagcctcgcgctctcagtccgagagcaacccgcgggccgtctcctaggaaaccgggctcgccacaccccttggtcgaaccccacttccgctcctgcgcgctgaggctccggcggacctctggtggacatggctgcttcccgcttacccccagcgacgctaacgttaaagcaggtaccggcggttctctgccttccaaagcagcttacctgggtctgagctggattctccatctgtccctatccccaacggggcgggttccggggtcctgatgcggcgtgcgcgccctctg

SEQ ID NO: 36685 - DNA, 2300 bp, Homo sapien
taagacaggagctggagagacagctggaaatgtggcagccacgtgaatctggaaacccagaggaggtaagtcactgctcactgtttttttcataaaatatctcgactttttttttgtttgttcaacatatagcaaacttaataggttcttagcaattaccttaacaaaaaggaccaggcatatggagaatataattacaatcctaaagcctacagatctgtccatcagtttctggctgctttgctgttagatctatagcttaattaaaacagaaattggtgtgcttaattcctttaatttctgttgctggctctgtaatggatgttaatagttgtgacagtggttgaaaaaccgggcaagagtctatgctgtgccatcctaagaagaggccagctagatcactgctggctgacttaacgtggtagtgtggattaaccagcagtcttatttttaatgactttgcatctgaaatttactgtattatatacacatttcacttttatatctattgtcataatcactcccaccacatatatgtattcagtgctctgccatagttggcagaaaaatcatggggctttgtgttgagtgtgttgctggagggatttgcccttagcatttttactttttttcatttttttgagatggagtcttgctctcttgccccggctggagtgcagtggcgcaatctcggctcactgcaagctctgcctcccgggttcaagtgattctcgtgcctcagcctcccaagtagctgggattacaggcacttgccaccacgcccgactaatttttttgtattttagtagagacggggtttcaccatgttggccaggctggtctcaaacttcaggtgatccacccgccttggcctcccaaagtgctgattacgggccaacttttttctttttcttttttttttttttttttttgagacggaatctcgctctgtcacccaggctggagtgctgtggcgcgatcttgacccactgcaacctccgcctcctgggttcaagcgattctcctgcctcagcctcctgagtagctgggattacaggtgcctgcccccatgcccagctaattttctgtattttttttttttttgtagagacagggtttcaccatgtcggccaggctggtctcgaactcctggtctcaagtgatccacccgcctcggcctcccaaagtgctgggattaccaggcattagccaccaccctcagctggaaggagagacatttttaatcaagtaaattacatggtagcttgctgggagaagatttaaagtgcttctgttgagaaagttcatgcaggtcattttctaccactttgcttaaagcctgcatcttgctagaagacttggttggctctgacattctgagggtaacttacattttgttgttgtcacaggagaaggttgcagctgagatgtggcagagttacctgatcttaacagcgcctctttcacaacggttatgtgaagagcttcgtctcatattagagcctacccaggcagccaagctgaagtaagtcttcccctctggaaggcctcacagtgccctgagaagacggcagcttcattgattctgttgaacgcggcacctaaccatttatagtgccagcttctaggctgccgcttgtgccgtacaggcaccagtatgctgttccttaccctgttttcctattattgtctctgcacaaaagtttctgggtgtctgtattgatcaccttgttacatgttgagctattcacttgctataggtgttactcacctagatcttttcaaagatgtccaaaatcattcctatttagtgcattttttcctaatttttaaaaatgtgtctggaaggacctaattattattgccacatacgtgtccagtttttctggctagaggtcaagaagatccttagtcgtcaattgacagaaacacttcattgtgccaggttcctagttacttgctattggttttaaggtattattgtgatttttgtccttaataaaaattctcaggaattaaaagttgttaactaatttttgcccccatttgaataaatagaggagactatcgaactgggaaacgactaaacatacggaaagtcattccatacattgctagtcaatttcggaaagacaagatttggcttcgaaggaccaagcccagtaaacgccagtatcagatttgtttggctatcgatgactcttctagtatggtagacaatcataccaagcaggtaaggaagagaaatgcagtggcagtttgataggaaattaacatcaagctatgttccatgggccacc

SEQ ID NO: 36686 - DNA, 2300 bp, Homo sapien
gaggggtttcatgttcttattcaaaatttttaggaatactattggtatgataggtgttcttcaagcacgtgatactgttccagcaattaatcacagggtcacagtgccctgacctgtctgtgatggtgggtctggtccttggcctctgggactcacatcccacttttctaaccatccttgtgtaaggaatcttcaggacaattaggtttgtgatggttaagtaaaaaatctttggcttagtgcctgtatttatgaagagctatttaattaagttcttgagctaagagtttgacttatttgattaatcagataacattttcattattgatgacttaagggtgtttgggttttgttttgctacagtggctttataaatgtttaaagttttctttatccatattgtctctctaagagggaagcagaatgcttgtctggcatcttctcattgtgccactgtatttgctgaattaagttttgaatctcaggagcatttgactatgtactttgagttcatactgtagggcggaagacacccagtgatactaagttggtgattccaacctgggccacctcttatctatggctttttctttttagccctttttaaaagatgtcaatgagctaagacaggagctggagagacagctggaaatgtggcagccacgtgaatctggaaacccagaggaggtaagtcactgctcactgtttttttcataaaatatctcgactttttttttgtttgttcaacatatagcaaacttaataggttcttagcaattaccttaacaaaaaggaccaggcatatggagaatataattacaatcctaaagcctacagatctgtccatcagtttctggctgctttgctgttagatctatagcttaattaaaacagaaattggtgtgcttaattcctttaatttctgttgctggctctgtaatggatgttaatagttgtgacagtggttgaaaaaccgggcaagagtctatgctgtgccatcctaagaagaggccagctagatcactgctggctgacttaacgtggtagtgtggattaaccagcagtcttatttttaatgactttgcatctgaaatttactgtattatatacacatttcacttttatatctattgtcataatcactcccaccacatatatgtattcagtgctctgccatagttggcagaaaaatcatggggctttgtgttgagtgtgttgctggagggatttgcccttagcatttttactttttttcatttttttgagatggagtcttgctctcttgccccggctggagtgcagtggcgcaatctcggctcactgcaagctctgcctcccgggttcaagtgattctcgtgcctcagcctcccaagtagctgggattacaggcacttgccaccacgcccgactaatttttttgtattttagtagagacggggtttcaccatgttggccaggctggtctcaaacttcaggtgatccacccgccttggcctcccaaagtgctgattacgggccaacttttttctttttcttttttttttttttttttttgagacggaatctcgctctgtcacccaggctggagtgctgtggcgcgatcttgacccactgcaacctccgcctcctgggttcaagcgattctcctgcctcagcctcctgagtagctgggattacaggtgcctgcccccatgcccagctaattttctgtattttttttttttttgtagagacagggtttcaccatgtcggccaggctggtctcgaactcctggtctcaagtgatccacccgcctcggcctcccaaagtgctgggattaccaggcattagccaccaccctcagctggaaggagagacatttttaatcaagtaaattacatggtagcttgctgggagaagatttaaagtgcttctgttgagaaagttcatgcaggtcattttctaccactttgcttaaagcctgcatcttgctagaagacttggttggctctgacattctgagggtaacttacattttgttgttgtcacaggagaaggttgcagctgagatgtggcagagttacctgatcttaacagcgcctctttcacaacggttatgtgaagagcttcgtctcatattagagcctacccaggcagccaagctgaagtaagtcttcccctctggaaggcctcacagtgccctgagaagacggcagcttcattgattctgttgaacgcggcacctaaccatttatagtgccagcttctaggctgccgcttgtgccgtacaggcaccagtatgctgttccttaccctgttt

SEQ ID NO: 36687 - DNA, 2300 bp, Homo sapien
agacctaggatttttatgtgtgggtgcgtgctttgttgacagatgtggccagcaaagaacagcaacagtctgcaaaagactctggcaaagatcaggaagaggaggagatagaggacacccttatggacacagaggagcaggaggagttcaaagcagcagacgtggagcagctgaagccagaggaaatcaagtcgggcaccacagcacccttgggtgagtcctgctagtgaacaaacccttcccaggcgctctgacttgaagtagtcagttctctctcactataatctagtctggtgttcagttccatgtcctaatccatggcttagatgaatgaattgcctataataatttcactatattttgtttgggaccagaaaacaaaaatatggacagcggtgggtgttgcaggacaccatcctttaaggagtcccctgaaacttgaatttctggcaaaatctcatcagtttttaaaaaatatgtagaagaaaccagaatagtacacttactacagctatgatgaaaaggtatagtattagagaaatgatattttcaattatataaaagtatatgctattagcataaaatgcagtaaaatattaaaagaaatagaatgaggagtttccctttcatagctaaccaagttctattaattacttggcaaaaaaaatagcttcatcagcaatggaataaatgcaaattcaaaagaacttgccaaattcagaggctttttcttctgcttagttcctgtcctctcaggagcgttagaactgttagaacggttgactatcctatgtgacaagccaggctttgcctctcacctcacaagttgaagcaaattattgatcttttctttgcctgtttcctcttctgtaaaatggaattgtggcttttagtttttatttctgtcaaagttttacatgcatatagtttcaagaatcatacagttttacaaggcttcttaggacaacccaaaatttcccctatttccctttccaagaacatctgccttcaacatcaggtgaggaggaggggagtttagagagtaagggttggcaatgagtgtctcagagagaaagaacctctgaaatcaacatgtggaaatgtgttggagagtgaatgaatgaagtttgattaattttcaggattaacaggcaatagcaaaggcttggtcagtcatcaggctaatattataagtaaaattatgtccttaaatgaaaataggctttgatgagatggaagtggagatccaaactgttaaaacagaggaagaccaagaccccagaacagacaaagcccataaggagacagaaaatgagaaaccagaaagaagccgagagtctaccattcatacagctcatcaattcctcatggacacgatcttccaggtagtaaaactcacaaattactgcattaatatagtgttaataaattaacaaaataaaattttaaactggttttaaatctttgtctttagaactttatggaacatctggttgttgaggggtttcatgttcttattcaaaatttttaggaatactattggtatgataggtgttcttcaagcacgtgatactgttccagcaattaatcacagggtcacagtgccctgacctgtctgtgatggtgggtctggtccttggcctctgggactcacatcccacttttctaaccatccttgtgtaaggaatcttcaggacaattaggtttgtgatggttaagtaaaaaatctttggcttagtgcctgtatttatgaagagctatttaattaagttcttgagctaagagtttgacttatttgattaatcagataacattttcattattgatgacttaagggtgtttgggttttgttttgctacagtggctttataaatgtttaaagttttctttatccatattgtctctctaagagggaagcagaatgcttgtctggcatcttctcattgtgccactgtatttgctgaattaagttttgaatctcaggagcatttgactatgtactttgagttcatactgtagggcggaagacacccagtgatactaagttggtgattccaacctgggccacctcttatctatggctttttctttttagccctttttaaaagatgtcaatgagctaagacaggagctggagagacagctggaaatgtggcagccacgtgaatctggaaacccagaggaggtaagtcactgctcactgtttttttcataaaatatctcgactttttttttgtttgttcaacatatagcaaacttaataggttcttagcaattaccttaacaaaaaggaccaggca

SEQ ID NO: 36688 - DNA, 2300 bp, Homo sapien
tcagctgatgagttgggcttgtggcatgaattgggaagaattagatccaagtcagctcagagttgctgcatgtggggagaggaataagacatgctctcaattgtgaaatgaatttaaggcccaaagaggcaggtagggtttctcccagctctgccccttgctttcagtgatatgcctctagtgtccctctccctccgtgctctgaacctcctgagaatatggagctgcagagatttcagggctgtgtcaggcagtgaaaattgttatgggtgaactatacctgtgtctggaatgaggatatacattgccaaaagtccatgtgggccaatagttaggcttctgttcatggtattagggtgagatggtcttgggcaccgatgagatttgagtctgcttctgttacttaggctttggggatcccccagatggcaatctgagccatacatggaggctcctcaatggaaacaaataattaagagatgaggacagttaggaaggttgtcgtcatctgttgaatggattcgtggctgaaggacagtatttccagactattcactttagcttcaggtattttctgctccattcattagggtttatttagcaaagtacagcacatttactagataatgctagttgaagtcactgtagtggtgtggttgtgttgtgatacttctcctgaaagactgagggatgggtttaagtactttgggaggcattttaacagactttttacctatctgggggattcttccttcttgactgtatgaaaaagcccatgcttgttcagaaacacaaatttcttttaaaacaatgtggtaaagtggtttaaggtgccattcattgtgtttttcccatgggtttctctgtacaggaacctcctcagctgtgtgcaagagattcacagcaggctgatggggccccaggcctaccccgtggccttcccccctcaggatggcgtgcagcagtggacagagcgcctgcagcacctggccatgcagtgccagatcctgcttgagcagctctcctggctcctccagtgctgccccagtgtagggccagctccaggccatggcaatgtccaggtactggggcagcctcctggcccctgcctggaaggaccagaacttagcaagggacaactttgtggagtagtgctggacctaattccttccaatctgagctacccatctccaatacctggaagtcagctgccctctggttgccggatgcggaaacaggatcacctttggcaacagtcaactacgagattaacagagatgctaaaaaccattaaaacagtgaaagctgacgtcgacaaaattagacagcagtcttgtgagactctctttcattcttggtaagtgtgtctatgtctttacacttctctgtgtgcttaggtccttattgtgcttatctaaattgggggtgggaagggaagggtgtgaacagaaagcagcagcttttagacagccctggaacctagggaactcgtcggtttgggggatggggtggggtggggatagggggtgtcatctgcaggttctgagacttcagcggaaacagcgttagcaaaaggatgccagacaaagccctaaataatccacagggagagcaaatcacatcctgccatttgtggtggtccaaaataaaagcctatcacaccaaatactaatgataatggaatatcattaatggaataaatttaccatttattggaataaattaatggaataaatttatcattaatggaataaatttagtaatttattccattactaaacctaggtgtttagtaatagaatcaaattatgaaaataattgtgcttcagtcctctgttactcagtggacctgcacagcactttgtggcatgtgtttagccgtaaaccttcagctatgatgagttctaccttgcatatcttgtagtggttgcagggaggggtgtgtgtttgtgggaactgtaatgcattcctttcaacattgtggcatttctgttgcaggaaagattttgaagtttgctcttctgcgctgagttgcttgtcccaggtgtcagttcatttgcagggcctagagtccttgttcattcttccagggatggaggttgagcaaagagactcacaaatggcactagttgaaagtctggaatatgtaagaggagaaattagtaaagccatggctgactttactacctggaagacccatctgcttacttcagatagccaaggaggtaaggaatattgttcagtcagggaatgaaagtccagtgtagaaatgatgtcttatagatgtaagtctcattgtc

SEQ ID NO: 36689 - DNA, 2300 bp, Homo sapien
ggattacaggaacccgctaccacgcctggctaatttttgtatttttagtagagacagggtttcaccatcttggccaggctggtcttgaattctgacctcaagtgatccacccgccttggcctcccaaagtgctgggattataggcatgaactaccatggccagcctggatttggatatttctttagatagaatatagtatccctatatcctaggaatttttaacttattggtgcttgctatctaaaactcaagaatcaagtagaggctgggtgtggtggcctcaccctgtaatctcagcactttgaggggctgaagtgggaggagcagttgagcccaggagtttgagactaacctgggccaccacatagtaagattcctgtctctacaaaaaaaggaaaaaaaaaaaaagctgggtgtggtggcatgtgcttgtaataccagctactcacgaggctgaagcaggaggatcacttgagcctgcggggtcaagcctgcggtgagccatgactgcaccactgcactccagccaggctacagagccgagaccttgtcttaaaaaagagtcaagttgatttgggtaatgtggtatcccttgctatttgaagttttgaaccaagttcaggaactaaatacattaagatgatggtatgttagtacatattttgaagaaggaaaattatattagttggagtgaaggctaagctcctatagcagagagactaaaaaattcagtggtgtaaataagatcgtttctttcccctcacagctctgatgtgagtggtgtagattaatggagcagagccacctctccttgggtcattcaggaacccagattccttccatcttgttcctctacgtgtccccaggacattgtcctcatgtgcatggtcatagctgggacacagtggactaacttctctcttttccattagttacaccaactgcagtgtgaatggaagacccggaacctgtcatcccagctgcagactggaagagacctggaagatgaagtcgttgtcagctactctcatcctcacgtcaggtaacacagcagagtgattatttgttttggggattattgactctccttttgatgtaatgtagttatggtgtgagtagaagtgataatatacacctctaaactacattagcaattagatgccaaagcattgtttatagtcaggaaaaataatatgccttgtgaaaggaggagaggggggctattcaaggtgtgtgttcacatggggccaagatgtttgaagccaaaacttagtctcagcatagaagaagtggggtgtgatagtatgcactatatttctctgctattcttggctgtaggtgtgttactaggaaatatggtacgggttggggatcccttatccaaaattcctgggaccagaagtgttttggatttggggttcgttttttttcttcagattttggaatatttataccagttgagcatcccggatctgaaaatctggaatccagaatactttaatgagcattttctttaagtgtcatattgtctggcagtcaaaaagttgggagcattttggatatttggatttgggatgctcagcctgtatagtgtagtaggttctgagttccagtcctactcctgacctttggttttagacattgggtagatcacttaatggcttacatctcagtgtccatatcagcataagaagggtaattgtagttatctactccagtgagtcatgatgaggcttcagtaagatatgcatctgagcaccagcaacatacatgacacagtaactgctgtgtaaatgttatccattttcattaactaattgtcagtattatcacaactgagatgatattggaaatattatttcgcagcagctgatgtttcttccttcggttttcctagctgaggatccaatctagatttgctgctcttcttctgacataattggcatattgtgttaatttcccgttaggctgcttcgccaaaggatggatcggctggataatttaacctgtcacctgttgaagaaacaggcctttagaccccagctgcctgcctacgagtccctggttcaggagatccaccactacgtcaccagcatcgccaaggcccctgctgttcaggatctgctcacacggcttctgcaggccctccacatagatgggccacggtctgcccaagtagcccagagccttctaaaggaggaggcctcttggcagcagtcacaccaccagttccggaagcggctgtcagaggagtacaccttctatccagatgccgtgagcccactgcaggcatccatat

SEQ ID NO: 36690 - DNA, 2300 bp, Homo sapien
tgagtgaaactaacatcattctatagttaatgattatattagtgtttacctcagttaacattgacttctgcatggagtgtggagctaacccgatagtattcaaggaatacctccctagacccaattactctttttttttttttcttgaaatggggtctcactgtgttgcccaagctggtcttgaacttctgtactcaagcagtcttcccagcacagcctcccaagtagctgagactacaggcacatgccactgtgcccagctgaccctgttactttttttttttttttttttttttgagatggagtctcattctgtcacccaggctggagtgcagtggtgtgatcttggctcactgcaacctccacctcctgggttcaagcgattctcctacctcagcctgccaggtagctgggattacaggcacctgccaccacacgggctaatttttgtatttttagtagagacggggtttcaccatgttggccaggctggtcttgatctcctgacctcatgatcctccgccttggcctcctgatgtgctgggattacaggcgtgagccaccgtgcccggcccaatcctgttacttttgttttaaacatttatttattttttagagacagtgttttgctttgtacccaggctggaatgcagtggcttgatcgtagcttactgtaaccacaaactcctgggctcaagtgatcctcctgcctcagcctcttgagtagctaggactacaggggtacaccaccatgcctggctaaaaacaaattttttttattattattattattttagagatggaatcttgctgcattgcccaggttggtcttgaactcctggactcgagcagtcctcccactgtggcctcctaagtgttggaatgacaggcatgagccactgtacctggcactgttagttttgatagaccttgattttttattttatttaattaattttttttgagaccgagtctcactctgtcatccaagctggagtgcagtggcatgatttggctcactgcaacctctgcctcccgggttcaagcgattctcgtgcctcagtctcccaggtatctgggactacaggcacgcaccacgcctgtctaatttttgtgtttctaatagagatggggttttgccatgttgcccaggctggtcttgaacttctggcctcaagcaatccacctgcctcagcctcccaaagtgctgggaggtgtgagccaccacacctgtcttattttatgtttttttagagatgaggcctcaatttgttgcccaggctggtcttgaactcctgggctcaagcgatcttcctgctttggcctcccaacgaccgacatgagccactgagcctggctgaccttgattttatttatagagatagtgaagttcttccctggtagattcaaacacttcccagaaagacctgggacatcgtggaaagatgttagacaaacttgtgatctgataaacttgaattcaattttcagttctgccattttcagtcacagttgagtgtataagggccattctttccttctcttccatttatgtcagaagaaaagaatggcatcttcctctcgggacagttgtgaggactaagtggcctatgcataagcatgtaccttccccagagtgtatgtttaatgtatattccttctctacttttttctcttctggaaatttttaatggttttcaagtactgtagcttctggtaacaagcagtgaacttaatgttaatgctatgagccttggattatgctttctctttcctgaagttatttatgccttaaggaagaggaacctgtcattgaaataaaaacatttaccttgtagaattatttgcagtgatttgaaaatatttggttaaagcactatcactactacttaggagaagagccaaacatgggttaactgtcagcctttcatttgtcatctgccctgtaagcccaacagtgtagtatctggaaacagaagggattatgaatatttttcctatgtgagacagtgtacagcaagtaatatccagaggcacaattcaggattaaaatttggaattttgtgtgactgtgttttttattttgaaacgtagactcttgagctgtggaggaaattggtatcgaccgctaaacagtcatgctactttgctagacaaatattggaccaaaattcacctggataacctggataagagagaactgaatgaggtacgtgggtcttggaaagtatcaatgctggccaggtgcagtggctcccgcgtgaaataggaaatagtataataaaccaccagaaccctca

SEQ ID NO: 36691 - DNA, 2300 bp, Homo sapien
ttttatcctcctttttcagggcgcatctctttcaacagattcctgagaatagttgccagggtgcattatcactacataactacatttttttttttgtctttttcttttttttgagacagagtttcgctcttgtcgcccaggctggagtgcactggcacgatgtccgctcactgcaacctccgcctcccgggctcgagctattctcctgcctcagcctcctgagtaggtgggattacaggcgcccaccactatgcccagctttttgtatttttagtagagacaaggtttcaccatgttggccagactggtctcaaactcccgacctcgggtgatctgcccgccttggcctcccaaagtgctgggattacaggcgtgagccaccacgcctggccccacttaaaaaaaaaaaaaaaagacggagtttcgctcttgttgcctaggctggagtgcaatcccacgatctcggctcaccacaacctccgtctcctgagttcaagcgattctcctgcttcagcctcctgagtagctgggattacaggcatgcaccaccacacctggctaatttttgtatttttagtagagacagggttttaccatgttggtcaggctggtctcaaactgctgacctcaggtgatctgcccgcctcggcctcccaaagtgctgggattacaggcgtgagccaaggcacccagccctaatttttgtatttttagtagagacagggtttcaccatgttggccagactggtctccaactccttatctcgtgatctgcctgccttgccttgagccactgcgcccagcccacaagtgcacttttaatgttatggactctactattttttatgacttccagaatatgctataacttacaccccatagtttaatattcccaattgaacattttcttccaatatctgtattaagaaaactgcaaggggtgtctttgtcacacttagtgaggatttccgcaggctagagtcctacaaggggaattgctggggcagaatgttaactagttaggtatgagcagaacaggagagcgctccccaccccacacataccaggactattgggtgacaatcaaacgatggtcaggcggttcttaactgtttctctaacgttcaccggggccagcgaaaggcagtctcctaatagaaaacacctgaaactgatcagtagcttcccagtaagatctcaggagtggggagaagcaatgcaagttccccaaagtatgccaacatataaaacttcaagtcaacaggtcaagctgcgcacttggtttctcaagtcgcctgcttggcagtcttccaagttgtactttcctccttttctttccgtcccgttctaaagctttttgataaacttttacttctattctgaaacttgtctaggtctatcctgccttatgcccttcgtggaattatttcttctgaggaggcaagaactaaggttactgctgacccctacctatacagggggtaactgccaccgctaacaagaaggggagaatcagcttttctttctttttttgagacagtaaaagtctgctgtgtcgcgcggctggagtgcagctgcacgatctcggcttactgtaacctccgtctcccgggttcaagcgattctcctgcctcagcctcccgagtagctgggactacaggcgcgcgccaccacgcccggctaatttttgtatttttagtagagaagggggtttcaccatgttgcccaggctggtctcgaactgctaacctcaagtgatctgccctcctcggcctcccaaaatgctgggataaagacatgcgccaccgcgcccggccgagaatcagcttttctctcacatctgatctttccgtgtgttaaggcagaagcaaggcacggtgggctgagactcacacgccccctctttcctccccggcctaacgcactcttctttctgtcccaccacgtgctgtgttcgcgagtccccatcactcctgcatccaaaccgactagatttttgtttccatttccctcccggaaaaggcgggacagcgaagactggcgtttccgccgctgaggggctgaggccgggagggcgcagcgtagccgtcccgagctgatgacgtcaaacgccgtgtgctcacccacgtgtggtgcccctctcccggtgtaggcgctggagctgaggacgcctttcctgcgggcgtagttgctggctgctcgggcactgggacctcggcggcttggggacgctggccgcgaagtagggagcgcaggtggccgctcggggtgagggccctgggtcatggagcacttcttgc

SEQ ID NO: 36692 - DNA, 2300 bp, Homo sapien
attgcactccagcctgggcaacaagaacaaaactccaactcaaaaaaaaaaaaaagttaattaattaattaattaaaaaaaagccatgcatatgtgcaaataaaaatacataacttaggtggagtggctcatacctgtaataccagcactttggaaggcagaggtcggaggattgcttgaggtcaagagttggagacgagcctgggcaacaacatggcgagaccctgtctatattaaaaaaaaaaaaaaaaaatgaaagaaagaaaggcgagtgtggtgttgtgtgcctgtggtcccagctacctgggaggctgaggtaggagcattgcttgagcctaggagtttgaggatgcagtaagctatgatcacaccattgcactccagctaggacaacagactgagaccttgtctctaaaaaaataataaaaataaagccaggcgcggtggctcacgcctgtaatcccagcactttggaaagccgaggcgggcagatcacctgaggtcaggagtttgagaccagcctgcccgacatggcgaaaccccatctctactaaaaatgcaaaaaactagccaggcaggcccctgtaatcccagctatttgggaggctgaggcaggaaaatcgcatgaaccccggaggcggaggttgcagtgagctgagatcacaccactgcactccagcctgggtgacaagagtgaaactccgtctcaaaaaaaaaaaaaaaagaataaaaataaaaataaattggttgatatggcagttaagactaaatggggtcaggtgcagtgactcacacctgtaatcccagcactttgggagactgaggtgggaggattgtttgagcccagaagttcgtgaccagcctgggcaacatagcaagaccccatctctacaaaaattttaaaaaattagccaggggtggccgggcgtgggtggctcacgcctttaatcccagcactttgggaggccaagctgggcagatcacctgaggacaggagttcaagaccagcctggtcaacatggcgaaaccctgtctctactaaaaatacaaaaattaggttggcgtggtaacacatgcctgcaatcccagctactcgggagactgaggcaggagaatcacttgaaccccggaggcggaggttgtagtgggtcgagatcgcgccattgcactccagcctgggcaacaagagtgaaactccatctcagaaacaaaacgaaacaaaacagccaggggtggtggtcgctcgcgtctatggtcccagctactctggaggcagaggtgggaggatctctcgagccttggaggtggaggttgcagggagccgaaatcgctccactgcgctccagcctgagcgacaaagcgataccctgtctgaaagcaaaaagaaaaaaaaaagctaagtggacaaacgaggaaatgggtagggatgaatataggcagactataagtagccgaggaaggtggccttattttcgcacctatcaatgctcaggctgagctcctgaggctagacctaccggcaccccccattcctacaggttctataaggcaagtcaggtattccaccctgtaaaaagctcttctctctcctgccccgctagactagtatcccctccttaaggctcccaacatccgaagctaagttgtttgtctgcctatcatccaggaacgcgtctgagggcagggaacaaatttattcatcgtaatcgagcccagcactttgtctcgcacgcagctgacagcagaattttaagataaagtattaaataaatgacagacctctcaaggcttcctgtctttcactaaaaagcttctctcaggccacgcccctacctccactcaggtcagccccttcctattgaagccccgccccatcgccttccccgccaccttacaccccgcccctctctcttaaagccctaggaagattactggagtttggcgccaaccgtgtttttttttttcccttccaaaggcgggaactagttgtgggcgctgcgacgtgctttgcgtctgatatgattggccgtaggcactcagtcccgcctccataccctgatagcgctctggtattggtggagatgccagggagacctcggtgggcagaaaggaaccgggttgtcttgggccgggcagggcgggtaagttgtcgtaggggcccggtccgtgagggactgctaaggaagaggctgcatggcgcggtagtcccccgagtggaggtcggctgcccctgggaaaccagagagtcggagggagtccatctggagcggccaagtaggtcggggaagggccgcgcctga

SEQ ID NO: 36693 - DNA, 2300 bp, Homo sapien
cacggtgaaaccccgtctctactaaaaatacaaaaaaattagtcagacgtggtggcgggcacctgtagtctcagatactcgcgaggctgagacaggagaatggcatgaacccacgaggcggagcttgcagtgagccaaggttgcaccactgcactccagcctgggcgacagagcgagactccatctcaaaaaacaaaaaaaacaaacagtgaattgcctcagtatttaattttttgttatatgtaatatttaatatggacatgtcaaataactaaactttaatatacttttatcttctataaatgtgtttaatatatttttctcttctacagatgtgtttttaccaaattcagctcattctacctctaagagtcagtctgatctcaataaggaaaatcaaaagccaatttacaaatctgacaaatgtacagaagcagacacatgtaagaattcaccattagatgaattagaagaaggagaaattagaagtgatagtgaaacatctaaaccacaagaaagttttgaaaaaaattccaaacgtagagtgtcagctgatgtgcggaagtcaaagactatcccacgacgtgggaaaagtactgtgtgtttagataaagacagtaggaaaacacatgtaagaatccatcagaccaataacaaatggaataaaagacctgataaatctagcagatcttcaaaaacagagaagaaagataaagtgatgagcacttccagcttggaaaaaatagttccaattattgctgtaccctcttctgaacaagagatcatgcacatgttacgaatgataagaaaacatgtaagaaaaaattatatgaaattcaaggcaaaattttcattaatacaatttcacagaattattgagtcagcaattttgagttttacatctttaattaaacatctcaacttacacaaaatctctaagtcagtgactaccttacagaagaatctctgtgatattatagagtctaaacttaagcaagttaaaaagaatggcatagttgatcgtttatttgaacagcaactaccagatatgaaaaaaaaattgtggaagtttgtagatgaccaacttgattatttgtttgcaaagcttaagaaaatcttagtatgtgattccaaaagctttggaagagatagtgatgaaggcaaacttgaaaaaacaagtaaacagaatgcacagtattcaaatagtcagaaaaggagtgtggacaactccaacagagaattgctgaaagaaaaattatcaaaatcagaagaccctgttcattataagtctttagtgggatgtaaaaaatctgaggaaaattatcaagaccaaaataactccagtattaacactgtaaagcatgacattaaaaaaaattttaacatctgctttgataatataaagaactctcaatccgaagagcgctccttggaagtacactgtccaagcaccccaaagtcagaaaaaaacgaaggaagcagcatagaggatgcacagacatcccagcatgcaactttgaagccagaacgaagtttcgagattcttaccgaacagcaagcatcgagccttacttttaatttagtgagtgatgcacaaatgggtgaaatatttaaaagtttgttgcaaggttctgatcttttagacagcagtgttaactgtactgaaaaaagtgagtgggagttaaagactccagagaagcagctgctagagactcttaagtgcgagtctataccagcttgtacaacagaagagctagtttcaggggtggcttctccatgtcctaaaatgattagtgatgataattggtcattattatcatctgaaaaaggtccatctctgtcttcagggctttcattgccggttcatcctgatgtgttggatgaaagttgtatgtttgaagtgtctactaacctacctttaagtaaagataatgtgtgtagtgtagaaaagagcaagccctgcgtttcttccatacttcttgaagatctagcagtctctttaacagtaccatcgcctctgaagtcagatggtcatctcagttttttaaagcctgatatgtcgtccagttcaactcctgaagaagtcattagtgctcattttagtgaagatgccttacttgaggaagaggatgcatctgagcaagatattcatttagctctggagtctgataattcaagcagtaaatcaagttgttcttcttcctggacaagccgatctgttgctccaggctttcagtaccaccctaatctacctatgcatgccgtcataatggaaaagtccaatgatcatttcattgtga

SEQ ID NO: 36694 - DNA, 2300 bp, Homo sapien
cttttataatttattttaatacttttatggtttacttttttacaattaatattatgttccatctggaatcaattgttgtgtttggagataagttggaaaaaaatctaagaattccaggtttttctctctttttcttttggttgatattcatttttgtattatcagtattgattcattttataggttagtgggagtccttagtgatcaagtactgtgaggtctgggaccaaatatattttgttattgaattcctggcatctagcccaatgcctaagcgatagcaaggtttgatttattttattttattttatttatttttttgaggcagagtcttgctctattgcccaggctggagtacagtggcatgaccttggctcagtgcaacctccgcctcccaggttcaagcgattctcctgcttcagcctcctgagtagctgggattataggcgcacagcaccacacctggctaattttggtatttttagtatagacggggtttcactatgttggccaggctgtgttcaatctcctgacctcatcatccgcccgcctcagcctcccaaagtgttgggattacaggcatgagccactgcgcccagccaatagcaagatgttagcaaatattactgaatgaatgaattatggaaggagagaattgtttcattatctttttttttttgaaacagagtttcactcttttgcccaggctggagtgaagtggcgtgatctcagctcactgcaatctctgccccctgggttcaggtgattctcctgcctcagcctcctgagtagctgggattacaggcgcgtgccaccacaccggctagttttcctatttttagtagagacgggatttcaccatgttggccaggctgatctcgacctcctgacctcaggtgatccacccacctcagcctcccaaagtgctaggattacaggcatgagccaccacgtccagcctcattatctattttaacttaataatactttcctatttttcctctgtatctttcttatctggaagtcttccatatcttagaaagctttaacctactaagtattttaaccttattgaaccttgaaaaacattagtttttcaggataaaccaagtaacctgttcatgtcagctatacctgtattgtttcccagatcctaagcttgctagagaagcagtttatattcacttttcttctaagttagcaaaaattccatgaaaacatgatgttccagatgtggcttaatggatgtaattatgtgttattgctggtattgtttctgtgtctgcctaatctttactgctaccctgatatgagccagttcctgagggtttgactgatttgtattttctttacctatactttgtcttgcagtgaaagccctggataatatatcatgaggatctactttattttgcctattgatggttattttggtgatagggtcaaggaacagaattttaaagtgaaaagacaattccattgactattatatattgacgccttgtgtgtgcgatgaccaacatgctttagaaagagtctctatctgcaaggggtgtacctttccaggaaggggaacacaaccatcacaaaactcatttaggcacagtcccaggtgattaatattaataatagtgttgtgaggattcaggaaagggaaaaataactacaacttgggatgggtagggaacacttcctgaggaattgagactcctttacgatcatgtcagatgtatggtaagtagcgtatctcatgtggatagaaaaatgaatacaattgtgcaattagaatgaattgtacaaatatggagacctatttgtatactagaataacaggcagctttgtgggggagagtaaaagagaataggaagaagtaaactgctgaaattgtgaggggtatttagtgttttttcaaaaattaatatatttggaaatgtcctattttaagcatgggctataaatattagggctggaagatccttcataattttgctgacatacaaaagaacctgctgtatttttgagcttgtgtctatatattaccaccatgggtgctattaacctcagtgttttctgtatatttcagacattagtctttaaccatgggggactggaacttattgggtggcatcctagaggaagttcactcccactcaaccatagtggggaaaatctggctgaccatcctcttcatcttccgaatgctggtacttcgtgtggctgctgaggatgtctgggatgatgaacagtcagcatttgcctgcaacacccggcagccaggttgcaacaatatctgttatga

SEQ ID NO: 36695 - DNA, 2300 bp, Homo sapien
cttgcagaatttctcataacccccagactcaccaaccctgtttatacttacgggttttaatttttttcacattcagtttcttctttctgaaatgtccctccttttttaggtgtcaaaaatcctgctcacacttttaggacctgacttaattgtcccttgctggtgatgtcacgccctatttcctcaagcagaattagccactccttcccatatagtgtctctcagcacctccattattgcatttgtcttgctgttctgccattaggtgtcgtcttaagtagactcctcaagggaaaggctgcaacttatttctctgatgaccacagggcagtacctcgtgtgtagtaagcacttaatggatgtttattacattaacttatgaactaattttcatcctgctatacacactgctatttttatatacatcagaccttgatcatcttaaccattggccatggaaaaaattagatgctgaggtgtataggactggacctttcagccttaacctcaatttcaggttttgtgttcaataaaatggcctcctttttctcactgggtggcttatgattaaaaaattataactttgaacttaaaaaatccatgaatattgtacagactaaaagtataaaaggacagtataaattactgctttttacctatcttgcttatagggatttcatataagattttgtttgattgaagatttcacttcagaacaagtttggaaagctactgttctattcctaaatttcatttacatttctataccaaaggtttcatttttattttgatgagatggtttctactatcatgttagttcacataaggcaacacttctcaactttagttgcacaaaattgggaagcttttcaaaaatacctccccactcagggatccttgtataattgagctggaggaaaggggcccaggcaccagtatttatgaaaagcacaaatacctgtaataaaatgattctgcagtgcttagaaaaccaggtagttaactatgaaaatactgaagttttaaattgctaatttttctttctttttattaactatgctgttattgtttttcttggcagtcaagctaatgcaatttaaagtttgtattatggttttgagacctcaaacagcatttaatagacgccatcatctgtggacaattttcctaaggcttctgaaattaaaaatttccttttctgtcactctctaaaaacctacatgcagcagaattttaatgtcccttattgatagaaatagctaacacaacacctatttcagatcatggaaatgaggactgacaagggctgtgggtttaagaagtttacataggtagtggccttcctggcacccttgttagcctgaataaacagtcctcccctgacaaatcctctgtagctctgccacattgataaaatctgacattctggttagtcactttttaatgatattctttcttttgttcttgatatgttagaaaccagcccttatttttttcagtgtgtgggaaagaattaactttaatttcctaattcggtaaaatgggctgctaatgcagaccttattcttagggggacaggaagaaaagtgacctaatttctatatatcaaatacatcttccttcatacatttaaaaatgtatagagttataaaggaccttaaatcctgtagcggagaaactctggggtaaatactttggaaacattgtgaaaaaattctataaattctgatagtaggttccatttcattgctgtgtactattaaaaagtgcagatgtaaataagcataagttttgcaggttgtcaatttgttacaagcggctgcatgttcttattcttctgaagtgtcatctctttcaatgtgggctgtttaggcggaaaaaaaaaaactcagaaaaatacacacttgggatcaaacccttagtgcagaaaaaagaatcaaaacctgtagttaagttggttatttgcagtggtggtatgtcatcctgtgtgagactgacgtcaggcagattgaatgcagaggcaaacttcgggagcgtgtgtgtgtgtgtgtgtgtgtgtgtgtgtatgtgttttaaagccccactcccagaatatgaagtgagtatgaagggcaccacagcaacccctggatctctcaagaatgtacctgtttttaacatgctggatcaagtgtcagcactcagtagatgaggaaggggtagagcccgacttgtacagattccgcggatggtaaatggccctctggcgtgtttacaatacagctgtgcattcttaatggctctgccgctgccatgtcagg

SEQ ID NO: 36696 - DNA, 2300 bp, Homo sapien
actggatgatgcaacctatcacaggtgttttaggttttttcatctctatttaatgtcccacctcatgcttgaaaatctcaaagtgaaaaagctccagtctgagtctttgggcaagcagactaactgaaatgacctgttagcctttgttgtatccatctgacaagatcagcttgtagaatccagaatggaggtgggagatcagctggcagcctcatttccctcctcaaccacccctacgctgatgtgcccaactccactcacagctgggcagccaccgcttgcttgaaaataaatgaatctacaccactctcatacggatgctctcaagcatcccttgttgtgagaaaaacatttattgctgctactaaaatgcgtaaagttatctcacaaacacatacttacaagaatgaggaatgagaaacagaaccatccataaaactataagaaacggcctggccagggcagaccaggaattagtactctgtccttgccaggggtcaggcagggacctcagaagcagggtgttttgtcctagggggcaccagaccagaggtcaggagactgagggctactcctagctctaggacttttccttatctgaaggccgggtcggttagcagagaaaatctcacagtcccgtgccagacctccacgcagggactctgcagtgctgttagaaaaattagctcagcaccttcagcttgctttcagccatcacttagctttccacacagacattccaaatggggcctttcaaaactctgccctcaaatgaaggtagttcagagcaacactttagatgatatcacaagactcccaggacgcttcactgcttcctcagcatacgccagtgcccgttttacaggggggatttatgatccttctctcagtagagcgagccaaacttttataatattcattaaaaatcagcaccacgtgtaataatatggaatactgcctgtacacaagagggccaagttataggtgtttagggaaacgtggcagaattttctggccttggcaagaggtaaagttgcaggcaccagcacaacactaacacaaccttattttattgcaaatgtacattcagcctaaatcctaattaccttctgtaaaatcctaaccaccaccaagctttcttctgacagggcactcacacgacggcctttaagggcagcaacaacatcctaagagccgcagaaaggaaaggcaggggagagtggctggaaggcagtaggagctggggctgaagcccgggaggttggcttttaatgtcctcctgaaattgaccactctctttccaaaaacactggcttgggggcttaaaggttcgctcagtagggcaggcggagggcctcctgaaaaggattgagaagtcaacattcaaaaggctgcttttactcgcccggtccccacccaaaagggagtccggtcagctttgtgggggccagtggagcatcttttcttgcccttccgggaaaacgctagctaaccctgggatccccggtcccgacgtctgctctccttccccaggtgcagcacctagggctctggccccctccccacgtgccacaccagccctcaccactactctcaccctgctatgcccccaaccctcgtctttcgtggccgggaaggccaggccgagcggggcggtcagccgggccgggaggagggggctctccgggccgcgcggccgcacaaagcggggagatctgctgctgcggcggcatgaggcgcgccccctcccgcgagccagcggagcgcgcgcgcccgcccccgtcccccgccccccgccccagcccccggagcgccattcgcggagcggcttacgctagtcgccgggcgtaccgcgccccagcggccggggaggtgcgctgcccggctcccgtaaagttattgtgaatggggagcgggtgacgtcagcgccgaatgtcaacaatgtagcgattgagagtgtgggcgttccggggagagcgcaagccgcgcggcgcggagcaaacagcgccgagccgccgccgcctcagcagcagcagcagcagcagcagcggcagcagcggccgtgcacgcccgggctgcggtcgcacagcgctaacgtgagcggccgccgccctcgccaccccgcctgcccactcccgccgccgccccgctctcgctttccccccggcctcccctcgccccttcccctcccccttcccggcgcactcggggggctgggaacgagctgccatgtgatgcgcgtcccctccgcgagctttcggtgacccacgaactgcccacctcgccggctgccgggaggg

SEQ ID NO: 36697 - DNA, 2300 bp, Homo sapien
tttctggcttgaaatttacattcctgaagctttccctgattaatatttttgaatttaaaaatttagtcaacatcctttttggtattttaaaatttcctacgtattggatagtatgatgtttatcacacaacaagcattcaatgagtacacatgacccaagtaatgatagatatgcccaataaatactattgataacaccagtaagccatcaaattaaacaagcaatttcgtgagcaaaattatgttatccaaggaattacagggaaagggaactattagctatatcagttcttttaaattgcagatatgtagaaagtagtatcttaataaggtacttgcctagaaatagatattggcagggatatcacaatgattttgtagaaaaataccatagcttctgctaaatcttttcattggaatctgttctcattctctagtatgcaatgtgtatctcttttaagctttcaattacctgaaagaaagcttcacatccagggtatgaaagcgtttgctaacaaagattgcttgagaataaatgtgagataagaaaatgtgctgggaagtccacgattcaccttcacaaagggctagttttagtggacctccaggaggagctgtgatggtaattgctctgaggacataacccgtggcttaatcatatctggagcactggcacctagcccaaggccatgctcagagagagcactctgatggtttggagtaaatgaaggcatattttcattagcttggatatcatctttttggtgccttgagtgtggcatagaatacgatcttgtttataacagaaaagaatgataaagcctcacgatagattttgtgaagtcattttttaaaatgccataatttagctgtgtaagtgataacaattttaaatttgtgggggttttttttggtaaaaatagcataccaataatcgtactagtacatatatagcacttatgtgtcaggtacttcttttaacaaaattaattctaaaaactagcatagcaataatagtacttgcttttaaaaaaatatatcagacactgcttttaaattgactgtttctaacaatagccctatgactagatagtcccattttatagttggggaagctgagacacagaggtggtgatttttccatagctaagtggcagaggtaggatttgaagttggaaaatctagctcaagaatccatgctattagcgagtaatttctatagcctcacatgctggtgagactctatctataccattgagtgaagacaggaactggtttcatactcagacataaaatgaatggttactggtctatcaattaggtacatcaacagtatgacaataacttggaatggatcgggggcacccaaaggtcttgttaaagtcatttttaaacatctgaagagcatcaaaaagagaaaggatgggagggagcagggatggagatacactttgaagtaagattcatatgaactttcataactcttcgggtaagggtaatctgccagaccattaatgtaggacaatgtacattattttttcttggctgaagatgaaaatcctagcagatggacaaagaagaattgagcattcaggaaaagcttaaatggtgatcctcttgggatataagaagctggacacattgcgcattatagataggtgtgataaaaatcacagcatacacctgtgaactttgaattaaccaggaagctaatacacgttcttgcactgataaatttctgagctaagataattagcaagaagggacaaagagacaactagaaatgccactctaagatttcactgagtgaaaaaagattccttccttaaatcttacaagaaaaatacagttttgattaaaattaaggtaagattttttgtaacatatttcagtaagttttatacaagtcttacaagcaatgagtatttataaaactttaaagaaaacctagaaggattttaatcctgcaaagctgtgtatagataaattttagcatatcttatcatttaatggggggactgcaattattctagatgttatttttgatcttttaattcctcacattgtttctgatactacttctttaattttctgttcaatagccatgagcctttttgaaataataatattgtcgacccccagttgtatgtgcccaaggagatggcaaacttgagaaacaagaataatcctttcagctggtttaaagctgagccctcactcttggaattaagaaactgacaaaggatgcaagttcttggtttaaggagccaatggtatgatgtgtttcttgttgggcttgg

SEQ ID NO: 36698 - DNA, 2300 bp, Homo sapien
ggtggcctttctgccatattgtatagtctaccaagatcactttttgtaatctaaaaaattcaactctaagctaataaagctggtttattggaaagcaaataaaccacctgacggacctttccagtgaaagagccagaatttgttaaaattagtaaagaaatacgaaactttggcagcctaaattagaacatatattttaaaattacatgttcagtttaccatgaagcagtaatgtaatgctagtgtatcatgctatgcatttttttaaatcttgggtattttacacatgaagagaatggtgtcccataatgtgtaatattcaaaactcgtgaatctcaaaatttctaacatttaggttaagagaagtctccaggaaaatgtagtgttgattcttacatgaagacagtcttcaggaagttttaaagtagaaaataagagtagtgtaagtcaaggaaaactatgagcttaactgataagaaaaattacaggagtggctgtctgggacctaagccagcagtctctggaagaaacccgggataacttttaaataccagctcaggaaatcagttgtacttaaaagagcagcttttttgaagaggggctctgttttaatgacattactgtaaaaagaatggaactgacccctaagttgctttctatttgcggtgggcaggagtgcagatttagtatgcactggcaatgtgatgtattcttagaagtcattctaaaaagtggaatttgttctctattataagacatgaacgttccagaattcattacagaatgaaatactcaggatagcatatgcaggtttcagattccttgatcaggcatctgtttacatcatgctgtcctcatttctactactttttccatttacactaccatgtataatataggtatgtacatatcaaaggaccaaaaaaggtaaaatgagtgaatgtctaaattagtattcagttgcaaaaaacttcagaatcaattcaaatttactgagaacacacccagtaattttcatttgaagtaataggaggttgatttttcttacattcatatttctaaattatgacttaaaatttaatattggagcaacaagtatttgttgattgcaatcctgttttgctttgtctgaactatctgccagatggtttctgccatggttgtgctaattaaaatgcattgcctaatactgcttgctttgattcatgcagtagcttaaagatttctcattttatggcatttgttaactgtcagctcttctttaccttacttccttaaaaggttttacttcccttttctcctatccttccacctaaatttaagttcagtttttgttgttattgcaatggtgatgtaatggtttatagacacatgtgtcgggtggttcctcagattaacaaatgttgctgtgttgctaatctgaaaagagaattccagacacttttacaagcctgtctcatcaccgctaattttagaatgaatgtgttgaatgaaatgtgcctaaaattgcttattagtcacggttgtggggatcctttttgtccttgggaaacaggggtagttgaaagtattcagaaaagtaatctagtggatctaattcaataaatgcacagttttgttgttttagtttgtaatgaaaagttgaaatttttggaataaaatgaaatttgaagtaaatgtgaattcagataatgcaaagaattataaaacgtagcttaaaatggaaaaaaactgatgatgtcttacatttgcaagaggagttacaaatttgagtttttatattcactacacatattattctattaaacattcttattccattgtaaggtccttttagtttatctgcagcataataatggggtcatgtgggttaaggtgctaaattatattgctgattggttttaaaaggatgtctctacgaaagattctggaagtctaaaattttaagaatgaattctgtctactaatcgggaaactacaattagagtgagtacatgttctaagtgttgcccactagttgagaaattacgtaatacagatttcagagtcaaaagaattttgagtattgtatcagctgttactcagtattttggtgtttccttttagacagctgatctctcacgttagaagatactgcataaacagctttattcccaaataaaagtgctgagtgaagccattgctcaattcattgttttgctgaggacttatatgtgtagaattctctcataaattgatttttaattaaattaattataaacatagaagtttctaaagcagaattaacacaatagcccatt

SEQ ID NO: 36699 - DNA, 2300 bp, Homo sapien
taaccaaatcacagaatgtaagagatggattggaccttgggaatgactgaacccagagacataaacactgatgaaactttccatctattactagaagctagggaaaaggcgcaggcagacaaaaaagaaaaaagtaatctgcaagcaagttggacaaaaattgattttagactggcatcaatattagaagtccaaatcagtggataaaacatagaagtgttggggtagaagatattcaaaatcatgtaatcaattcactttgaaatgcatctagcaaaatggtagatggatgtaaatatggatggagagatgagatgcacatatgtatattatgataaagcaagtatagtaaaatgttaaaggtagaatcctggtggtgggcatataggtgttcaccataaattctttcaacttttctctatatttgacatttttgtaacaaaattttggggggaaaaatcaagcaggagaactgcatcatggctgtggtaattaattagtcctttgtcaagattccagtcctaaactgaaggtacaggaaacatatcttacactccagggaaagggaggactgacaaaagctattcatttgtacagaatatctaagtatttattgagttcccacctggcagcaagatcaaggtgttaaaaggaaatcggatatagacctgcagagttatagcacaaggtaagaagtgaccatccttgtttggaaatgcaaggggaatgacaggtgaaaatgactgtcccactgattatatcagcttctactgggtatcagtgcaccacgcatcatttcacatgccctgatttctcacttggacaaccaactgggtgatggcatccttaagtgacataggaaaataacataggaatatatttgtggtgggtgacaacttttgaatttgctgtggtatcttgaagtttaggtgtttgtctaagtagagatgaccaataggtccagaattcaggaaaaatcttgagtatttggagattaggagtcatcattataaaaatagtatgagaaacagagaccttgggtaagagcatgcaaagagagagtgtacagtgaaaagaaattatcgtttctttcatttttttatccactcatcaaactgtcactgcgtgtcactagaactacgaataaaaagtgacagaatgtttcccaggagtttgtaacttcttgatggtcaaatccaatgatctatttgcaatcccaaatgtgtttaacataattccacagttaggctttatgtcaaacggactatataaaattcaacagttagtttaaaactaaaacttgtgctggtagtacaacatgagcaatactgaccatcttggggacagaatgatctagtttgtgaggaccataattgctttaaactctcagcgtgttttctcatgtcctgaaaatggtgacaaaaatattcgattttcaaggcgactgttgatgattcatttaccaatctaaagcactagtgccccgcactcgtaatccataacttgagatgaacacaccaaattataaatatcttattcacctaatccgtggaaagtttgtaacaccaaaatattaacttctgttcttgatcactcagcctccatagttattcatgttgcatgatctgattcgctcttttagaatttctcatagcgtcaggtactagctcaaaataacaggagcaactgcttctttccatatcccacattgaggaaaacacattttgcaagccgtcttaaagaaacaggtcaacttagtttagggatgaaacttaaaagtaagcttcgtcacaaaaaacacagttcaacaccacctcgcccggctgcaggcagctcagaggacaggaagtgaggccaagacatatttcacgcagcacagactaaaccccagcttttatctttcccgctggtccttaagggaccaaccgtactgattttccgtcatgttccgcgccacttccgttcgcgcactttaattacgtcaggcgtcctctctcgcggtatcatccggttgctgaggccctgtaataaaggtctcgcgaaatttgttctagaggtccaagtttgcttcttagcttactccaccccacccccaacctgtccctccttttctttccaagtcacaaaattctcccctcccctaccccggagtttacggccctcctcctgtttccgatttcagcccggaaccggaagtgtagtgggcggggcccgtcggcggaaaacgcagcggagccagagccggacacggctgtggccgctgcctctacccccgccacggatcgccgggtagtaggact

SEQ ID NO: 36700 - DNA, 2300 bp, Homo sapien
ttatatagatttcaaagagaaatgcttctgatcgtctttcccatctttccaatcacagtgacttcttgtgtagcaattgtataattagatagttatacctgtacaaatctcaagaaggtaaatggatataactctagtgtcatggattatattgtctctaaactcatgactcaaattctctattattgtatctttgtgctaaaacaaaaactcaaccagaagcatattcttctcttattccctttccccttccttattcttactcttaattcctaggaaagatgttcaacactttctgattctccaagtagtattttctcttactcctaaaacaatgaaaaacccatttcatagtaggtataaatacatttcatacgtacagatatacgtgttcatgtatatacatatagcttcatatagatccatattcatatacatgacactgttcttctgtacgtgccttaggaagccatttaaattatcacggagatttgtactgaagcaggaccactatagacagtggcaagggaagcccttgtcaaatcctgttttatagggtctcaagtgtcacatatctataggaaataaatgtattaaagactacagatgcccctactactcaggatcaaacagtcggcactggcaacagcataacctgtgactcatgactaagggctttcagaatccaaggatacactgtcgtacttcttttgccttctttcaaacaaaaggtgacgatgtcggaatgtcgtgaaggctcgtggcttctattgctgcccaatttagagatggacagtatttcaaatggcagggagaattggagccgcagatgtgcttacctaaggaaattcaaattaacttgtcaaatccttctctcagatagcaggaatgcaagagattttatcatgacaaggtattgtttcccagtggtgctgagtgtccattttcttgcttctgttcacattccaattcatggttccagaacactaaacaattagcacatcatgcacatggcagctgagaaacattttgcaatgttaaaaaattcttatgagtcttgaatttgtatgtatgttggtgtcgatttaacaagcatgcattgtgagaccactttcttacaatgtcaactaatggaatgtgctacaactgtgaatagttttatgttttatgaacatattatatcaatttaattaatttaataaaaattaaagtttttcttttcttttttttttttttgagacagagtctcgctctgtcgcccaagctggagtgcagtggcgcaatcttggctcactgcaacctctgcctcctgggttcaagccattctcctgcctcagcctctctaggagctgggattacaagcacccgccaccaccacgtttttttgtatttttagtagagaaagggtttcaccatgttggccaggctggtctcaaactcctgacctcgtgatctgcccgcctcgacctccccaagtgttgggattacaggcatgagccaccaaaaatttggtattcaataattataatttatattttgcatagataaattctgaatatttaagagaaaacttattgaaaatagtttttgatttattacatttactttaatttacattattgataaatatattcaaaatttatgcatttggaataaaattatattttcttgttaatttcttagaccattagtaccaatagaacactaatttactaaagcctttattatatcaagattattattttgctgagataagacaagaaaatttgctgacaatgttatgtaaatactacagctaaatcaaatttttctgatattgtcattatgaagatatatttgtcaaagtagaaagataaaatactctgatttataaattgtcactatttagacataggatatttacacttctggtttttttgtttctaaagaattgtccatgtactctatgatttttaaaactgtcttcaaagccattttgaaaacaagtgctcaacgttttgggggagaatttttattgattagctgccatgaaatcactcatcatacttctggtaagctgccatctgaagaggcatgaaaaagttccgtggtgtctgctgagtgttctcggttaatccagtccaaattattaagccttcataatcctccaagacacgtaatcagataagactgcaactgatttgaagaaatccttaattgcagaaatcatcaagccttggtaagtctcaggatctccaaaaacaccagaatgtggattttggtgaaaggtggaagatggaaatgtgggcaggctgggaaga

SEQ ID NO: 36701 - DNA, 2300 bp, Homo sapien
ggacacaaaaagaggactcactataccacctacactcatcagaggagtgaaggatgttacttctttggtttcctggttttaatggaaaagtatttgtattcacatcattgagtattagtcattcaatagatgaaaggaatattttaaactttaaaggccaccttggtgtcattttaagaagtggggatgagaccctggggaaagtgttgaaatcctggagaattcgttttaactattagaagtggtttaatatttgtaagtttgtagttctgtgagttctaaagactaagtgcagggatttatgtttttaactcttatgttttagtttacaagtttcatccttaaatcatctatttgtgtaaataaagcttcatctcctctataacaagtgtgttctccccatatttttttttgtctctttctaaggttaatctattacgcatttacattttctatgcatcctttaagggacactgaagatgctttttgatacactttctaaaatattaaataggcataatggctaggaatatgtaacattgaagaaatgtttcagaaactacagaatcaaagaggtttaaagaataaatttcatatctctcttccatgttattttattaggcaaataaaaactacaggagacaatttaacataaaatacaaataaatatctgggggttgtcatcttagagaactccctactataaaaagcagaaacaactcaatttactttatatttccagatagaaaggttggaaaaagtttggagccttatgtgagatcaaactttggatctatcggaaataaaaggaaatcataaatgactgagaaatatttttaaaggaagaaattataggacaaaaaaagaaattcatcttaaacatgtgatcaagttactctgtgtgacctttgaaattgaagatttggcaattaaaattttaaagttcttcctcttattacctacctcttgaatacaaagtgtccgaaactgcctaatggaaaacagatttctctacgcagccttccttgccgttcgggttgaatgaattcaactggagatattggttatgactttttttattcttagtttctctttgaaagataagcattgaataattcctgaaaatggtaaatacttgcgaagagaaaggtcttgctttatgaatttaatacgtagtggcattctttaaaattcagtgtaatttatgcagcgaaatggaaaactatcaaagtggaggcaatccaaggaaaaccttagaaaatgataaacgcgtaaaaaaacgatacgcaaccatcagaaggttctctcctaatgtctcacttcgctcaacaaactatggtgaaaagacagggcggaggagaaggggcgcttaaaacaaaagacttcctttcccactcccttttcctctgtttcttttgccagagcttgttgcaaactcttggaaacattgtttaaacataatacacttggttactttattctttcagggattgtggtgggtggtacctaaaactgacggctcttggagtaacagaaaaagagaagtagaaacttttcaaaaaggcaaaaaacaaagttacccagcccgcggaggttctaacaacaaaaaagtaaaacacactttacttaaaggcacagctcatttcactgtccgggctccgtgcttggtagctgagagaaggcttgcttcgcctctggtttctaaaagatcgcgcggagtacagctatagaaaagagtgtaagttgggagcgttattctcggatttattctgctacgcgaaagctgcggttgctaaaagcagagcgtccaaagcagcacacacctcggctaccatcctcgttctcctctgaacatccagcgcgagctcagaacctggagggaatcctggaccagcaacctgactccgctcggcaccgattggctcctgcctcggaccccgcccccgtggccggggcggccatttcgccgggacccgccccttggccctgggaatcgcctcctggcaggccggctgtgcctgccactcagcccgagtggcggaggctctcagctcggagccccgccccctccccccctaattgatattattggagtgtggagcaagcggccggtctgcagtcggagacttgcaggcagcaaacacggtgcgagcgaacaggagtgggggggaaattaaaaaaagctaaacgtggagcagccgatcggggaccgagaaggggaatcgatgcaaggagcacaataaaacaaaagctacttcggaacaaacagcatttaaaaatccacgactcaagataactga

SEQ ID NO: 36702 - DNA, 2300 bp, Homo sapien
ctttccttccctcctgcttcctccctctgccttgcctttgccctgccccttcccttctcttctcttcccttcccttcccttcccttcccttctctactttttactctctctccttctgtctttctttctgttttatgcttttcttttctgatactgaagggacattttgaatatcagaattagtcttcaattgaagaaagttgtagatttgtctggaaaacattttttttcggtaaaatgatatgctgtgttggaagtctcaatactgtaatgatgtcattacaaattaacaaatttatttatttgcatctgctctcaagcaatattcctagaggatatgtgtgtgtgcgtgtgtctgtgtgtttgtttcaaaaattgtcaaactaattcacattcccaccaacagtgtataagtgtttcattttctcagcagcctcaccaccatatgttattttttgactttttaataaaagccattctgactggtgtgagatggtatctcattgtggttttgatttgcatttctctgatgattagtggtgattagcattttttcattggcagtttgatgatttctcaaagaattgagagttgaattaccatttgatccagcaatcttgttaccaggtgcatacccaaaggcaagtaaataattctaccaaaaggacacatgcacccatatgtttgtcactatttacaatagaaaaggcatggaatcaacccaggtgtccaccaatggcagactggaatatttttaaaaatgtgatacatatacactatggaatactatgcagccattaaaaatgatgaaatcatgttctttgcagcaacatggatgcagctggaaaccattatcctaagtgaacaaacacagaaacagaaaagcaaataccacatgttctcacttataaatggtcataagaatggtaacaatagacactgaggaatacaagggttaggaggggattaagggtggaaataaactaacttttgggtactatgctcactacctgggtgacgaaatcatttgtactccaaacctcagcatcacacaatacatgtttgtaataaatctgcacatgtactccctgattctaaaataaaagttaaaagtaaagaataaattgtcaaactgattttatgctttcttcattggcttatttgttactattttttaaattgacttttatttcttatcttttataagaacagtttatattatggatattaatcattcactgatttttttcttgttactctgcaggccactttgcttttaacattttaaatgatgtctaccagcataagatcttaaatatttttgtagacaagtttatcattgttttctatttttttcttcctacagaagatattgcttatataaagtttctataagtactcttctgtagtttcccccagatgtttacgtatgtatttatatttaatgttttaatcaatctgcataacttgtttgtatgtgcatgtgtgtgtatatactggatgaggtaagtctctaacatgatttttgtctttgactccattttatacaaaatcaatctttctctcaatgtttacaaaaataatgcttactgctagcaaaatttatatatatatgcatagatttatttcacactctccgatacggtttggctgtgtccccacccaaatctcatcttaaatatccacgtgttgtgggaaggacctggtgggaggtaactgaatcatggaggcaagtcttttcagtgctgttcttgtgataatgaataagttgcacgagatctgatggttttaaaaacgggagttttcctgcacaaactctcttctcttgtctgctgacacatgagatgtgcctttcaccttcgccatgattatgaggcctccacagccatgtggaactataaatccactaaatctcttactttgtaaattacccattcttgggtatgtctttataagctgcgtgaaaattgactgatacagtaaattgatgccagtagagtggggtactgctgaaaatataaccaaaaatgtggaaatgactttggaacagtgtaacaggcagaggatggaatagtttggagggctcagaagaagacaggaaaatgtgggaaggtttggaacttcctggagacttgttgaatgacttttcccaaaatgctggtagcaatatggacaacaaagtccaagatgaggtagtctcagatggaaatgaagaacttgttgggaactggagcaaaggtgactcttgttatgttttagcaaagagactggaggcattttgcccctgccctagagatctg

SEQ ID NO: 36703 - DNA, 2300 bp, Homo sapien
cttagcccctgaggggcatggcacagcagtagctgagaaaagccgatggaatggcttcatggcaacttgtccccatatgttagcatgtagtataagcttggcccaagggtgatgagccatgaggtgagagtggttcagaggtgacaaagcctaactgatggaagggtatcttgattatttgtccccaagcaatatttatggttccaagatggtgtagtatgatagtggtttgggccatgttgggaggtatgagtgggatggacacagtgttgatgccttctctgggtcagggggtggggtgcagctgtgtgcatcccaggcagctccctcagctgggcttagtgcttgtgaggattgcagtagtccctactgtgaggactgtaggtattcaaggtggtgatgggggatgatggggaatttgcttaccttttccctataggaagaatttccccttggttctaagtggattccaactaggtgatggagtgacagaggcaagatgtttccttctgttctctatgtggctatcctgggcttctttgatctacaaggtttctgttacttctttcgtgtactccagtgctctccttccgttattttcattagaaaatattattgtttctgctgtctttgtaggggagatgagtgctgggggcttctagttggccatcttgctctcaatcatttttttggaagtgttttactaggcttacttttaaaaatttgtgttttatgaattcctttgttttcttttgagataatcatgttttctgcaagagtgatattttcctatcattctcacatatcctatatgtattagtttgtataatcaaattaactagaagcagaagcagtagtcacagtggcatccttgccttatttctcattttaatggaatctccattaatgttttatcagcacatatattgtgttttggttcttattagatatgcttagctaaattttctttctattctcaggatattaagtactttttataaagaaactttaatctgaagacaagtgtttcagctttgagaaaaacacttttgcaatgattattgcttaatttgtttaggataagataaaaagtgggagatacttaattgaccaagttgttacagtgacagtttaaaaagtgattacagtaagagttgcacaaatgttccttctctttgtactcatacatttttaattatgttttcctcaaacttgaagtgactctaatgttgctattacttcaatagtaccacaaataggtaactaacacctataaagtgtatactatgtgctgggcagtattccatgtgatatatatatatataccaatttttcctcaaggtgtatcatttggtagagatattattgtctttattgtagaaacattgaaccagttatagtaaagaaaaagtgatattttcaaagccatccagctgattattggccataatggaaggtatcgggtgatgatggcacattacccaaatgcctctcacaacccctccccatttaaatctcaaataatgatttcctctgttatatttctgtatatcaccaagagatgaacttctgtttctctcctgtttgttttgcattctttctcatgcataataatgatctatgtttggatttgtgtcttttggatccaccatttattattttctgctgtatgtagcagtggtagtatccagcaacagatcttgttgatggcactggtagtacctctggggcatccaaacaagagtatttcttcatcatactcttggccgtggttccctctacaaagcttctgttgttttctgcccattttcttagcaggtaccccatcatgccagctaattctgtgagctacccaacattctttcaacaattatccttttagctagaactgctttttctgctcacatccaaaatttccaactgagagagaaattggtacctgggaatggggtgcatcagatactttcaaggaaatgtggaaactattaattgttcatctggcatagctggggcagaaaccagtcaaaatcttgcttaaatgccaagacaggaattcagtaatagtgaaaaagttaatcaaattgttgtctgtagtcacctggcatcattgcagtgatgctttgggaattgaattgcccccaccacagaatagtggggtgtacgtgaggaatttatggacttagagaaggggcagctgttttgaacatcaatggacagcttaaagaaacagaatgacaagttaaaatccttgaattctaggctcatagcacagactgaaatacatggagtttctaggatca

SEQ ID NO: 36704 - DNA, 2300 bp, Homo sapien
caacttattagatagcacccaccacgttctggagtataaatggctttacttcaaagctacaatctaaatgttaatttcgtttaacaaataccttcacagcaactttaggccagtgtttgtccaaatatctgagttctgtgacctagccaagctgacacataaaattaagcaacacaggtagcagagctcagttgtgatgggcctccagagaaatatcctcagaaggctttcagaattacctacctgaggggataggaagctagggcattcactcattagccacatcctcaccccattggttgaagtttaccctcaggggcactagacaccctgtacttcccagctgtattttcatgctggactcaatgactttctatggcattggagaagttcctgtataaactttataaaaatccaggtgtggctgagcttgcagtgtgctgtccacagcagctgcagctgaaatcatggcaggcagagaagatgtgtctgccagagttccaagtctatatttttagccctgcccacatttgcacctgtaattttaataggctaataattatctcggacataacataccctgattaacaacaaattatttatttttcccacctgctggtcttctagcattttccttctcatcaaatgatgccaacactcaccaaattgctcagcctttaaaggtgggagtgaccccaattctactctttcctttgtacttgcatgttctcttcactttaccagcaatatgcatcctaaaaccggatattttccccatttcagctgctatcatcctacttccagtcactgtcaattcttcttgaacaaaccacaataggctgcaaaatgagagtttcaagatataaatcatatcttgccattcccatgctcaaaagatgccaatgtctttccatcgcaagtatagtaaatcccaaattgtgtacatgatctgagtcctttctgacccttcatcaccatctcctatttctttcagcttcatttgttgaattcccgtcatatttcattccaatatctgctcaaagttcactttctcagcaagcctccccaggaacatcttatctgaaattggataccttttctttgcctccgattatcatacttcatgcttcacactgtttcacttagtttcacacatttatcaatacctgaaattagatgcatttatgtctgttcttttccccattaaaatgtaagtatactcagggcaaaattttaccttattcttgtctttattatctatgcctaaaaatgagaattgcatacaattgcagtaaatttcaatatatatgtgcagtaatgattaaaaggaaaatttaaatattatagcctatttacatatgacataattataataaaaatagattcattcaaaaaacatagtggatatatttgcaaaaaaaggaaaataattggagtatgtaattaccttaatcacttctgacaacatatgtacaatattaaaatttactagtaaagctattcttaatttatacagaattttaacttataacgtcttttcacctaaattttatcacttgatggtttaaacactttcatacgggtaaagagccacaatactattcagacatgtatttttgtttatattggttttataattgaaaaaatatggttacagaattttggcacatatttttttctgcattttaaagtaaaaaatatatgtaattactcctcgttgttttaacagttcttttcttagcagaattacttttcattctcaatatgaattctttctatgcaagtatttggcatcttagactacatgcaattcagcctcaattaatctgtgtttaatacattgagtgaaatgaaaatagagaacactgaaatctgtagtagattctgtgccagaattattatattaaagtatcccaaaagtaactcatactgagactaaacaaactaaaatcaaaaagcatttctctgacattaacaatacaaaattatcccttgaatttatagcttataatttgacattctcaataggaaaaacaatactattttgaatgtttaaacctaaagcttaagaaaaataaaggagagtggagccaagatggccgaataggaacagctccggtctacagctcccagcgtgagcgacgcagaagacgggtgatttctgcatttccatctgaggtaccgggttcatctcactagggagtgccagacagtgggcgcaggccagtgtgtgtgcgcaccgtgcgcgagccgaagcagggcgaggcattgcctcacctgggaagcgcaaggggtcaggg

SEQ ID NO: 36705 - DNA, 2300 bp, Homo sapien
taataagtggtttgaaaagagagaaagaaggaaaccattattcttatttacaaatgatatgattacctatataggtcatccaaagatgtaacagggaaataaagcaagcaatcaaaaaaattcagcgaagcttctggagatagtaccaatatattgaaattgatgctcttttaatacaatgttactaaacaattagaaaatagagtttaaagagagagatctctaattttagtaataaaactaggaggcaatataatgaaagatactcaataaattacaaagcatagtagcacataaagtacctgaataaaataaatataccatgttcatagataagaagacatttcactaaatctctaaatgcaattctcaagttgaataaaatgcccaattgaaatccaattttttaaatggatcttggctggctcatcctaaaatttcaatgaaagagtaaagagccaagtatagttaaggcaattttagacaagaatcattaggaggaggggtttgcaaaatgttttaatacatagagttgagtgcatgggtgttcattatattattatttgtcctttctgtgtttaaagttgctacaattaaacttttaaacttgtagaagaaagaatagtttctgatgttatgttgggaagaatcttgtaagcaagaaagcaaaaagcacaaaattaaaatgtaaaatattattaaattcaaaaagctgtatactgaagcataaagcttttggcaatcaagaaacatcataaaaactggaaagacagtccataaactaagagaagacatttgcaacacatgtaacttacaagagagaattaaactagaaaaaataaatattatctacaaaataattttcaaaagcaagcaatttaataaaaaatgagataaaattaagaacaggctttagcaaaagggaaaatgcaaattaaaagagcaatcagatgctcttatcagcaaaaacttaaaaagtctaacaatagcataagggtaacgatgtgccagtctagtttatgggaaatggacttgtatacagacgaatctcaaaacctctcaaaacctaaattagtgaaaaaaggggaaaaatgaagaatgattcacatatgaaatataaaactaggaaaatagtatttttagggaatcgtacatatgtaactattttcagaaatacaacggaatgagtaatataaaattcagcataatggtgaacggaaggaaggagatgtttttagagagtcttctttctagaagactccaaaaatactggcattttttttttcttaagctctgtagtgggtacctgggcatttttcattcttctttaagatatgcacatgagatatactcatatgtatatttcccaattaaaattggtgtacaaaatctttttaaggagagcccttatgaaactgttcacatcagcaagttctagcttgaataaggacttcctgttactatgtaaccaaacaaaagatagcattttcttgttttctgaagctaatgtaagatggaaaccttcagttgtaatcctatttcaaaagttcttgctcttcacatctgacttatcctcaattatttctagtacttcagtacagatgtgattttatagaatacattcgcaaattaaaaacgccatctccatctgcctaccttgggcttccaagtaaagttctatttttacaaaaatcaaaacagttcctcaactttaaaagtttgaaaaccagtgtacttgtaaagcacttgatgcaagcaacttctgaatgtttcacataaaaacaaacaaaaatgtgtcctctgtaatacagttagagcctcccaacagagcctcagaagaccgtttctaaaggcagtgagttctacttgcagaaatagggcgggagtgcagtctgactccaatccacacgtccttcccctctgacagaacgccccaaaacgcagtcctctctttcttccgcgccgctcccgccctagtcctcttagacccgcgaccggaggctccggaagaccccgagccccgcccgctccgtgaccccgcccccacccgtcccgcccctgaaagcgcccggaacgctgtgcgcgcgccttcggggaggaggggctgtctgggctcggggcgcggcggcagtcagctctatgttcgcggtcttaacctctcctctggccgagtccttgcaagaagtgaattacccgaccctggtgagtagctgcaggagtcagacctcttggaggcggcggcgccagcagcggcggcaggcacgaggtccaccgcgggcgcctgcgcgctcgcccgccag

SEQ ID NO: 36706 - DNA, 2300 bp, Homo sapien
tgccctttgaagtatgtgatcttgtgagttactccctgttcttggaccccctccccttttgaaattcttaataaaatttgctggttttgtggctcaggtgggcatcatggtcctaccgatatgtgatgtcacccccggtggcccaactgtaaaattcctctctttgtactctctctcttatttctcagactggttgacatttatggaaaatagaaagaacctacgttgaaatattggggatgggttcccccgatagaatagaagcagcagtttgtaggaagtttcacttgtctttcttttctattggagttaagtcttttttaacttaattctctataataacagcaccgtatcatagaactcattttataaagcagtcaatgtcagcattgtgccaaatacctttctaataagaaatctgtatataaaaagacttgaatatttcattcatatggtgtatatgtacctatatacttatactcatatatatatatatatacacacacaacaataatgtcttttcttaatcagccaagaagcactgcattaatatatgtccataaacatacttactaaaacaaaaacacatataataccctttcagaagttataaattactgtttataacctctgttcagtaagattttcagagtcgtaagttaattttatttttggagacgttttcttgcactgtcacccaggctggagtgcagtggcacaatcatggctcactgcagccttgaccttctgggctcaagcaatccacctgcctcagcctcatgagtagctggggaactacaggcacacaccaccatgcctagccaattttttaaaagtttgtgtagggatggggtctccccgtggttgtccaggctggtctcaaactgctgaactcaagtgatcttcctgcctcagccttccaaagtgctgggattacaggcatgagccatcatgcccagcctaatgaattttttgaaaaaattgggaatatcttacttgtgattattctttttttctctactgtcatttaaaaaattttgtctgattctatttcacttcaaaatgttatttaaaatttgtaatttttcccttttatgaaattgttagttaaaaattttttagaaaatctgtttaatgactgggtttttcatacactagtaagtatttcctttttattaactgtgatttgtaaattttacacttagatttagaaaattttagttcaggccaggtgtgtggtgactcatacctgtaatcctagcaatgtgggaggctgagacaggaggatcgcttgagcccaagagttcaagaccagcctggtcaacatagtgagaccttgtctctacaataaataaataaatgatttttaaacagaattttagttcacatacatagaatgttcccttcctacattcagcatacatgtaatctgttcaagtaatgaaaaacatattttaatttcttaaataaaatttcctaaaggttcgtctgactaaacgtaattggcatgtacatggtgatatatccaaatgaatattgccgtttattctagccatagacccttattgtacacatttatatatgatgatataattaatgtcttcactttcttaatttcaccaatatgtgatgaaatcagtattaattattcaatgtaatgaaatttatggattttagttttcgtgttgaatatattggaaaatactgttgataacacttactaattatcttttttcaataaattgcagcaaaacacttactattttggagtttaaagtatgtcatcatggcaaagtttcggagaaggacttgcatcattttggcactttttattctatttattttctctctgatgatgggtttaaaaatgctgagaccaaatacagctacttttggagctccttttggacttgaccttcttccagaacttcatcaacgaactattcatttggggaaaaattttgatttccaaaagagtgacagaatcaacagtgaaacaaataccaagaatttaaaaagtgttgaaatcactatgaaaccttccaaagcctctgaacttaacttggatgaactaccacctctgaacaattatctacatgtattttattacagttggtatggaaatccacaatttgatggtaaatatatacattggaatcatccagtgttagagcattgggaccctagaatagccaagaattatccacaagggagacacaaccctccagatgacattggctccagcttttatcctgaattgggaagttacagttctcgggatccttctgtcatagaaactc

SEQ ID NO: 36707 - DNA, 2300 bp, Homo sapien
cgttatagtttcataattacaggaggaaaatagtaaaaattctcaaaggtaaattactttaataaggaagggatgagaaatattataaacagaaatgagaaaacagagatttaattaattcttggtaaccatcctctgcccaagtagccgctggcatttgcaaaatttattgttcacctctgtagtataggcaccactgagaagacttagggagctgaatgaattgtaagtctttgccaaccttttatttctatggtctttattgaaagaataacagtgggtgaatttgcatggtacacctctggatctctgaagacagtaacacatgccttttaaaagggaggtgtattcgaataattagatattttttccctaaataaggaggtggttctctcagtcaggtcattaggtaaatgttgaaccaaatattttcattagcagatatactcaacaggacagagtctagcaagttgataccgcccagcccatcaagtaatactttatctccaacattgttttttccttcatgtgaatgtatacaggaaaatctagaggtttttcatcaatatttaggtatggcctattgcattgaaaatgtttttccacattgcatttacagtcaagagagcactttttaaaatatgagaacatttgttatataagacacacttatgtaaaatgaaatgcctaccttatttattctagagactatgatcctttaggcttttaaaaaaacgaatccaccaactgaaagattacttcatttttttttaaagcaacacaaccagccagccaaacaaaatcagaatctctttccctcctgggaatgtctgggaataattagctcactttatgtgttatgttatttgaggagagttttaccagacttttttttctagtcatatcttttagacacataatctacttgctccctgtctatccccaattaccacgtgaaaattataaaataaaattacggctcacagaaatcagttaataatgttccacttgtttttatatttactgaatgtgtgttaactcaccctctggatctcgcgcgtgtatctgccctcagtacagtatctatttgcatgcgcctctttgtagtttgcgaatatacaggattgatttagagtcaagtagaggaaacgaaaatccacactacgaaagcgggaccaaccctaggaaaatgcagggggaaatgaaaagctctgtgataaagagattcagagatctttcaatccctaggtttttagaatgttgagaaaagggaggaaggaagccaagacagaaggtaatgggctgtcactatgcccttcacacttacaaccttcctagatcattgagaacacggtccgaggcaattgggttaaaacgatatatgtataaatttctttttttacctcgttagctggtcaaccccggcggtaaacaaccaaggccacccctgcccaggcaacagctccaaggggcaggcgatggttgccggcattgagctccctgctggcgccttctggcgggacagccagtgccaaagagcgcccagggaaacaaacaccaatgggggactatacagatgtcatggatgcacatgtaggatcataatctgcccagaaagaggagagaaggagggcgacaggctgcggatcctggtccaggagccgccgcaatggagcgggcggcagtgtgcgcgcacaggtgccacaggccggtggcggggagagctgtagaggctgcctcccggactcagcactcgcaccagcgcgctgaagccgcggctgctgccaagcttgggtaacccccagcctgagccacgagaggaagagcccaaggaaagggcgcgaagggggaaggagggtagggtagaaggagggcgggggagagacccatcgcctcatcttacatttcccctcccaagctcatttagtgggaacctctgctgggctcctgcgcgcctccctccccaccccctcaactctgggcgaccatctccccctcttcccttgctcaccccccacccttcctgctcttccgtccctccctaccgcgtgcctcctcccctccccctcgcctccctcccctccagcggcagtagctgtagcagcttcagcgaagccggagatgggcagagagcgcgcgcggcgcagcagctccagattcactgctctcccctgcagctccccgcgcccccgccgctgtcgctgcctcggtgtcccccagccccagtcgcgctcttaggacagcgccgccaccgccgcctggccctgcctgcctcctgcgccgcgcagccctcgcgagcg

SEQ ID NO: 36708 - DNA, 2300 bp, Homo sapien
ttcctttcaattcagcctgagactgtttatatgcatgtgctactccgaatgacgtttgtatgggtcaatgctgatttaatggggaaaaaaagtagaaaatttccccaattgcttagctgtttgacatgtttctgagctgcaaactttgtcaactcttttgacccaacatattattctctccgtattatctcttctaaccacaatgcattaagaaataatatttttatgtggatgtcctcctcaataagtaaagatctccatccatatttaattaattggtaagacagtcaaattcatacatttacatttactttgtcaaattttttggtctataaaaagcatagagatctaaagaggatacactgctaacaagtttagaaagcacctgcttttttttattattattatttttgtgatagagtcttgctctgtcgcccaggccggagtgcagtggtgcagtctcggctcactgcaacctcggcctcccaggttcaagtgattctcctgtatcagcctcccgagtagctaggattacaggcgtgtaccactatgcctggctagtttttgtatttttagtagagatgggtttcactgtgttggccaggctggtcttgaactcctgacctcaaatgatccacttgcctcagcctcccaaagtgctgggattacaggtatgagccactgtgtctggcccacctgttttttttgaaggcagaaaaacattcaatattaaaagcattcaatattatttcaacctgccttggctctagtgaatgttcatgatttgaaagaactgaaagacctaaaggcagtgtctctattgttgactacaaatgtaggctctttgttggactatgactataatcacacactgataatatgacgcaagtagaggcagtactactaagtatctagcaggtgctttgaaaccccattactaagtcccagaagactgtttcctaaatttgaagtggaagaattaaatgactcaatggaaccctttagctgtgggtccattgatgtgtgagttttagagctggaaggaattataattttgttgtttataattgctataatatagaaattataattgcttttctttctacttatgagttaactagatccagagatatttattcaagacacacattcacacacacatacacacacacacacacacaccccacagctagtgacaatagttaagatttggatttaaggatcctatctttctttatcccactttcttttcaatcgcattcataacttattatagaattatgtctcaatttttacaaatgtgaatgtcttattggtatttttagggcctatagaatggtacacctcatgtagaagaacttcgacttttgaaggtatacaataaataaaacatcaaacttgttagcattcgttctggtttaaatattttaggagttgagttcagcagaaggaaatgggctatcactacatttaagtgaaatacaaccctcaagaaagtgtatggttcacagccactcctttaataaatcctgtgggttgcaattctttgtaagaaactcatgaaaaagatatattgattcaacaaaattggtttgctgttgattatacaaaccaataattatgcctagaattaaattgtggacacaaaaaagggaacagaccatttaaaatgttttatttcaaaatatcgaaaagctattaccttcaatactctaaatatttaaatattaattattgtagacatcagtaagaataaataaatgttaatcattatagaccttactaataagaatatatactgaattgtccacatccagagtattacaccctgaacaagaaagacatgagagcctgacagtcatatatattatgacagctgtatatctgacaatatgaagtagaaactgaaaaaaaaaatcatcttagtgggaaacaaatacatgcttaaaattgttatatttactgtaaaactcctgataatcttagattgtgcagaaatgtttcttattttgaggggcttagaaagctcagcgcatttgatgtataaagcaacagaatatttaggaattatttgcggaggctttaaattcttacctccaattggaggttaaatattaaaagaataggaaactatgcctctgatattttttttgtcagcctatttttaaactagattccatgagtcttaaggtaatatcctagaattttttttttgcgtgaattaaagttaccacaaatttcaggtccttaccttatgactgtgtttgatcatatctttgagttcccttgaactctgatct

SEQ ID NO: 36709 - DNA, 2300 bp, Homo sapien
taatttttgtaggtacatagtaggtgtatatatttatggagtacatgaaatattttgatgcaggcatacagcatgtaattatcacatcagggtaaatgtggtatccattacctcaagcatttcctttgtgttacaaacaatccacttgtactttgttttttaaaatgtacaattgaattattattgactgtacttccggaaaggtgtcccaatccagaccccaagagaaggtttttggatttcatacaagaaagaattgaaagcaaatccataaagtgaagcaagtttataaagaaagcaaaggaaaaaaaaaatggctattccataggcagagcaacggcttgagctgctggcctaaggatacctatagttatttcttgattacagctaaacaaggggtggattattcacaagttttccaaggaaaggtgtaggcaattcccagggctgagagttcctccccattttagacccatataaggtaacttccagacgttgccatggcatctgtacactgtcatggcactggtgggggtgtcttttaacatgataatgaattataattagcatataatgagcagtgaagacgaccagaggtcactgtattcatcatcttggtttctggtgggttttggttggcttcactactgcaacctgttttatcggcaaggtctttatgacttgtttttcctgcctgtggaccttctatctcactctgtgactaacctcctgggaatgcagcccagtaggtttcagccttattttacccagcccctattcaagatggagttgctctagttcaaacgcctctgacaactagtcaccctgctgtgctatcaaatacttgatattattcattctttctaactggaataatattttttaaatagtaaagagtgagatacatgaactccaaatatctgagacaggtcacaatcaactcagaaagtttatttagccaaagttaagaacttgcatccatgacatggcacagatcctgacaacatgcgcccaaggtggctggggcacagcttggttttacacattttagggagacatggggcagcaatcaatatatgtaagataaacattggtctgatctggaaaagcggggcaactccaagtggggaggaagttccaagtcataggtagataacagacagttgcattctcttatgagcctctccaaatgaggcaatcagacatgcatttatctcagtgagcagaggggtgactttgaatagaatgggaggcaggattccctaagcagttcccagtatgacttttccctttagcttagtgatttgggggtcccatgatttattttcaattcataagatataaaaaagatataaaaaagaaaggtacacctgagtaaatatctactcaacagggaagcaggatacatgttctctttgctttccctgtttccttgatagccatgcaccttatgtttatattcctcattatttgatgaagttaatcattgcaataagagaaatacgaaagactctagaactctagacacgaaagcaattatacagcctttatgacacgcaaatttattcactctgtaaaaaaaaagtaattactttcggtagggtctcccatgtatcttccaaaaggcagactgctctgggtgcatgtaaaaattaacacgataccctatacaaaagggaatgctcagagttaacagctagagaagagaggcgccaatcttagacacaggcttattcctccgcaccctcccccaaaacaaatggaggacagaagaaaaaagaaaagtagttaatacaactattactctacggaaatattaggggtagcgcaaacaaagttctgacactaaactttactgagccctgcatcctgcccacgacccccccagaaacacctacgcaccactctcctagccgccgcagccccgccagtctcgccgggaggaacccccagcgccgcggtacaaccacggcacttccgcccgccccccgcgcctcgggcgcaagcgtttggtgtgtctgcgtcgggggcggagcctcttgtccctctgcgcggcccgttccgcctctcttctcccaccgcctgtcggctgacgtgtctgcagttcctccgcgtctactgcgagtcaggccgtgatggcggacgcctgggaagagattaggcggttggcggccgacttccagcgggcgcagttcgccgaggccacgcagaggtgcccgaccctccctctcctttgtggagcccaaattaggccgtgggcggacacgcctgtatctgggactttagacccgcggccctgc

SEQ ID NO: 36710 - DNA, 2300 bp, Homo sapien
tcccgaggcaggtcataagaccctcattcaagagacctccctatgcctggaagaaaggaacacaaagaagagtctaaacaaacaggccttgctaagttcccccgagtgtataatcattagactatatcccctttgtccagtcatacttttccatgactatccactcttcatcaaatctaagcataaaaatacacacgtttatctcttgctttgagtcttcatttctgaaaggctcccatgtcccataaaaacttacattaaataatttgtatacttttattaatttgcctttttttataggggcctcaaccataaacctagtaatggaaaagaaaaatatctcgcactttctacaagtatatacaatgtggtcttggttttctaactaaatatactgcataactatgttatgcaatatatttacaaaaaattttagcatttctctgtatcattaatatatgaatgatacaaagcctaaagaggtacacaaagatttggtctgggctgtcttggattgcaaatcattttacattttacattttctgtatatgttttccagtttctgttccagattatctgcaagaagcatgtattttataatttaacaaacttatttaaaaataatatttttctatagagaaggatagaaagggatcaggctgaggcagatgccagttattttatggctgacagaataatctgagtgagacatgtgagacatggaatgcaggggtgaggacaaatttgagaaagatcatttaacaaactagaacctacagaaggtggacaatgatggggatggtggaggataaatgaggaaagggaatactctaacataaggggtggatgattgtgccattccctgaagtaggaaatacagcaaactaacaagtttggaatggggagaagacaataaggatatttgggactgttgagtttgagatggctggggacccctagacaaggttttctaatagatagcgggatacaggtctggaaccttgaagagtggtatcagatgaaagtacacatttgggagtcatgttgtataaaattgttcattgttttgatgaagaacgtgatggaaagtctgcagagaagcatactgaacagaagataaagctctagggaagagtgaggtgaatagagagaaagtgagggtgctaagagcaaacagaaaatcagaagggtgtaacatagcaaaaccaagggaagataatttcagaaagaaatagacatggccagagatgagaatttttcggtaagactgaagaccatactctttgggttgctaatcaaggttgtatatgatcttaatgaagcttttttggagcggttcaagtgaaagacagattgcaataagttgggagggagaagaaggctcagaatgtagtaggtttggaatgacttggtggatgtagattaccctctcaggaagcatgggagcaaataaagagggtgatggtcccaggcacttttacatctcaaggactgctttccttgcccataaaacaaggaaaatacaggcagtacctgtttagcaatggtgtcctaaggattaaaatctattactaatgaaatatacttgtgtccttttgctgaatccaaatttattgttgttagtcgccatatgttcattttcataatgtcttaatcattaaagtcaagtgaataacaaaacatacagttaactggctctgcatttctctagctcaagttctttgactgtatatacccgagtttgaccttagaagatattaacatttcattcctttagcagttagaacaaggacagtttaagtttggtctgggattaaggcagaatttcttctctcatcctgccttccaaactgaagaaatggcctcaaatggagattctaagagaaaatgtcacttgccttatgaatcagtgtgccccactgaggatacctattatggattggtttaatatccaaaaatttcttcagatccaactcttgacatctctgtccactttttgtgttttgaagatttcaaaagactcaatgagtttatgctttatgaagtcatagagccatggatgtgatgtcacaattgtggccagctcaccaggaagcaggcagagcggggaaggctgagtccacactgcaagtccagagagcagggaactaccttgagtattctactcaaacttatgtctcagagttccccaatttcccaagaagggagagatagaggccacaatccagggggccatctcttaaggtaccaataattttgcaggtaagagcatgggacctcatccctttccagatggcctc

SEQ ID NO: 36711 - DNA, 2300 bp, Homo sapien
ttttttttttcaaatacaaaatcatgttatctgcaaacaaggataatttgacatctttctttccaatttggatgccctttatttccttctcttgtctgattgctctagctagaacttccagtactatgttgaataaccatgatgaaagcaggcaactttgtcctcttccagatctaagaagaaaggctttcagttttctcccactcagtatgatactagctgtgggtcagttatatatggcttttattatgttgaggtatgttccttcctttttaaaaattttttatttccatacgttactggggaacaggtggtgtttggttacatgagtaagttctttagtagtgatttgtgaaattttggtgcacctgtcacccaagcagtatacactgtaccttatttgtagtcttttatccctcaccctcttctcaccctttccccctgaatccccaaagtccattgtgtcattctttttcctttgcatcctcatagcttagctctcacttatgaatgagaacatatggtgtttggttttccattcctgagttacttcaattagaataatagtttccaatctcatccaggtcgctgtgaatgccattaattcattcccttttatggctgagtagtaatccatcatatttataccacagtttacctgctcattgattgataggcatttggttggttctacatttttgcagttgtgaattgtgccacgataaacatgcatgtgcaagtatcttttttgtatgatgacttattttcctctgggtagatatccagtagtggattgctggatcaaacggcagttctacttttaattcttttagttctgataggttttcttttataggttacctggtgcttttgtctcatagctcttaaaattctttcctccctttaactttagataatctgatgacagtgtgcctaggcaatgatctttttgtgatgaatttcccagatgttctttgtgcttcttgtatttgaatgtctaggtctctagcaaggccagataaattttcctcgattattccccaaatacgtttttcaaacttttagatttctcttcttcctcaggaacactgattattcttaggtttggtcgtttaacataatcccagacttcttggaggcttagttcatattttcttattctttgtctttgttggattgggttaattcaaagaccgtgtctttgaggtctgaatttctttcttctgcttgttcaattctattgctgacactttccagagcattttgcattttataagtgtgtccattgtttcttgaagttttgattgttttttatttatgctatttccttaactatttctcctttcacttcttgtatctttttttttttaatttccttacattgggcttcacctttctctggtgcctccctgaatagcttaataacaaacctcctgatttctttttcaggtaaatcagggatttcttcttgatttggggtcattgctcatgagctagtgtgatttttttggggggtattaaccttgttttatcatattaccagagttggttttctggttccttctcatttgggcagtctctgtcagagggaaggtcgagggctgaaggctgttgttcagattcttttgtcccacagggtgttcccttgatgtagtactctcctcccttttcctatggttgtggcttcctgagatctgagctggagctgtagtgattattatctgtcttcttgacaagccacacagcaagtctaccagcctctgggctggtactgggggttgtctgcacagagtcctgtgatgtgaaccatctgtgggtctctcagccgtggataccatcacctgtgctggtggaggtggcagctgagtgaaatgaactcggtgagggttcctagctttggcggtttaatgcactatttttgtgctggttggcctcctgccaggaggtggcactttccagagagcatcagctgtggtagtatggggaggaacagatggtgggtgggcccctagaactcccaagagtatatgccctttgtcttcagttaccagggtgggtaggaaaggaccattgggtgggggcagggctaggcttgtctgagctcagactctccttgggtgggtcttgttgcagttgctgtgaggatgggggtgagtttctcaggtcaatggagttatgttcctaggaggattatgccggtttctactgtgtcatgcaggttgtcagggaagtgagggaaagccaggagtcacagatctcacccagcttccatgcaatccaaagggccgttctcactccca

SEQ ID NO: 36712 - DNA, 2300 bp, Homo sapien
tagtctttatctactcaacattcttttgccttctttattaacaacactttaattttcctttgggaaacctctttctttctactcggtccctgtggtttgggtatatatgaagggtacatacaattatttcccttgacctttttgtagataaaggcaaataaccccagcctggcagtgtgcattccatcccatagttacaatggttagttcagagatgaacgcaggatccacgtgggtctggtgagacattcttcagcttgctttctttctgatgcgactaattgctaaggaggttggatgttaagactggagatgtaggtcttccctctgtttagagaaataaaaccagtgcagtgaaagcacaatgaagacagggagagaaattgagtcctgatgctctttgagtatctggagtaaaaaggatttctaagaacgtgtgtgtgtgtgtgtgtgtgtgtgtgtgtgtgcgcgcgccagttctacttatgggatttataaacatatgaaccaataaattccaatgccctttgctgcaggttttgctaactcagtttgagttgtgtgctggccacatccaactatcctgacttcacttttgctcgctgataatctcctttcccatcttaaaagtttggtccaggcaagaccatgtctcctgcttttattgagcccagggcttatttcgtctccatctggttacagaagtttcttcaaccttttgtatagtctcctcttgccttattcttctacaagttcaacacaagtgcttctttcacagctgtaggtggcaggaggcaaagaactgagatgttctggttcagtctcagggtagtgatatgcaagtgcctttgtgtgaatgaggaaatgccactctctccgagcttggtgctaggactggtgctctggaacccaggctagatcttaactccaaattgcctgcccacctcctcagacagaggacacagtgcagagtacaaactgcacaacactatactgaagtcccataggtccaagaagcaagggttggaactatgaggtagaaaaacaagtccgtggacagtagcaaccctctgctgctcatgcccactgctgctgtggtctcttcctagggtgacgatagctgctgatgctgggagcctcctgggcatcaccacctgaggctgtggcctcagtaatgatcacatatgttgataatagctgaaaatatcacttgtcactgaaagcagcattttccactgtctcaagatgatactttttctggggggtcttcctgagttgtttggcatctttacagcccatgtgttgatgaaagtgaatcgttttagaaatccagtgggaggccagctggggattggccattggaagagaacagagcaccgggtaaaggaggatacctggcaattctcccatgccacacatcagggacaccttcaagcattggtctaggggccccagctggcttttagttatttcagtcttctggacgcctgcgtgagaccctcatcattgtgttggaaatgaggaagaataaccaaagaagaaacgcgagtagcctcggggaacgcaaatccactgggcagtagccactggaggtgcactctgggggcccgtgggagcgggaaaccaggaccctaaaaggactgccagggattaggggcggggcgaccgtctgggagcgaggcgcggggtgcagggcgcaggccaacgacgagggttgccccagtgccgggtgggcgcacttgcggtaccctcgatgcctttgcccaggcggaggaacgatgcgacctgagcatagaggggttcagggcagggagcggtcgaaaggggccggcgatccgccctggggcagctcgggcgtggcctccagggatctctccgtctctacttgcctcctccctctttacttgcctcctccctctttacttgccccctccctttttacttgcctcctccctctttctcttctctcactcacctcccggtctaaaaccggggccggcgcctttaagagggagcgttggttaccctgggggcgggaacccctcggcggctcgcgaggcggcggcgctcgtccgcgatgctcctcactttcagctccagctcccgccaccgccgcctgtatcgccgccgccgccaccacctcctcttcgttgtcctccttcctcctccgcctggcagcgttgttctctgcagcggaggagagaagtgctatgtcaggaaagttccgggagggactacatggagccatgctccctgggctcttccgcgggcgcccgcgcgctgcccttcgcttgaggtga

SEQ ID NO: 36713 - DNA, 2300 bp, Homo sapien
ttgattcttgttttattattattattctattcgattatctttacatcaatattttcttactttaagctggttaaaaacatccactctacttcattttgctaagcagagatcagaacactaaaaatagattttgcagccacagtaagagaaatactgtaacttccttcctactgcttccttcctggtgggttttattttagattaataacaatatttctaaagggtcttaaataaaagcagcactacagtaacccattcaggaaatggagagagacggagaaggtgaatgtaacactcgtttttttgtttgtttgttttttttttctgacgtcttattgtctgttcctttcattaaattacacagaggcttaaaaagaatgaagaaggcaagagagaagagaaataggagagggaatgactcagcatttagtagcatggagaagtaaattagtagcaaaaataagataagggaaagtataactaaaatcgataccattaggtcaaatgagaacgggatgtaaaaaataatggaaaaagaatacagtggcttgaaaatgcatcaggcggggggacaggaaaataagaggcatttaaatgagagcggctgagaacaaatactcatcgaaagggaacatcctttcattattttcctttcacaaaagcaggaaagggcaacttgagagcccagtttgaccctggttcagtaagttccatttttatcggctaactctttggtggcattgccctgtgaaacaacttcaaggtcaacttccttacgactttgattttcagctcttcactgaaactttggaatcacgtggagtcttatccaatgctgggcctcactccacaagaattaaatcagaaagtctggggtagggcccggcacagaactttacagagcttcccgggtgactccctcggagttccagcgttaaaagcaaccgtgggtctggggacttaagccccgccacctcccgccggaagcggccctcgtgggagccgtcactcgccccgaagggaggggctcccttttaaatgccctgggcagagaagcggtgtgtggcctcccgagcgctagggggcgacgggcacgcatttaagcgcccgcggcggggcttcccctcacttgtgcgcatgctccgggtgtcccggagttgtcctgcgccggtgttcccacgtgcggcctgaacctgagcgcataatgttatgaggagatgggagcactagtgattcgcggtatcaggaatttcaacctagagaaccgagcggaacgggaaatcagcaagatgaagccctctgtcgctcccagacacccctctaccaacagcctcctgcgagagcagattagtcgtgagtggtgcgagggcgtttcggggcccgggggcgcggagtccctgtgctgcccggctgtccctagcgtgggtccggaggccgagggatcggcgtcagcctgctcggccgcagccgctcgggttggcggagcgttggaagggggagccgccaggccggtgacattgagactgtcctccgcgcccgcggtgaggtcggcggccccgcctacttccgagacccagaggcagcagccagtgctcccgctaaccaggccctcgccggctgctgtcacggacttgatacagggaatcaaaatccgagagggtcacagagctttctctaggggtcttcactggacgatggacgcagagcctgacctggaattttgatttccatctaaagtattttcctaacagtccaaatgattatgtttattttttaaaaaaattaaagtggttaggccgggcgcggtagctcaagcctgtaatctcagcactttgggaggccgaggcgggcagatcacctgaggtcaggagttcgagaccagcctggccaacatggctaaaccccgtctctacaaacaatgcaaaaattagccgggcgtggtggcgcgcctgtagcctcagcttgtcgggaggctgaggtgggagaatctctcgaacccgggaggcggaggttgcagggagccgagatcgcgcgactgcactccagtctgggcaacagagcgagactccgactcaaaaaagaaaataaaagaaagcgtttgtgttaagcgtttaggatattacaggaaattttccttgattttaatattgtgacttttttcctttccttagtctatccagaagttaaaggagagattgctcgtaaagatgaaaagctgctgtcgtttctaaaagatgtgtatgttgattccaaagatcctgtgtcttccttgcaggtaaatgtgtgtttaattaagtgaa

SEQ ID NO: 36714 - DNA, 2300 bp, Homo sapien
aagttctgtcctcagaatttacattctagtgtgttgtcaagaccctgggtttattagtatcttaagatattcagccatacacatgcatcataatactccactcagatggaagcttcattctaagcagcatcctagttatactttccttggggatctgacttcaatccttaacataagcccaacaggagttcttaagttcagagttcctgttaatttatatgttttgacaagaagagctggaattatgcatttatggttcaggttttatttccatgattcccaaagggtgacagccaattgtgagtttctgatggagtgcatctgccttctgttttgcaatttgagggcctgagcagcactgggccaggatcaggcaaagcagctgacacatgctggaagctctttcaatgttgaatccaagctctattggaatgtgtgaattcaaataattatttcatattgtaatccctactgtcctgacagtcacttctaacattactttttcatactgcccgaagttcggtggaatttctatgaaaatgagattttcacttttaaaatattttaacaggcagtgagtcgaattgctaccatgattaaagcacatagacataatgaggcagattaaaatttcttagcacccatagaaatagaaataccgtgcctaaaaagccctgaatcacaagcatgcttaaaagtatcaaagatagaaatcttggagcagcctgccaccttcaggataacttcccagttaatgctatctgagatcactgatttcagcttctataaattccaaataccaatccctgtaaaaatgttcagtataattaaataaagggcatttaaattagagtggctgaagccgtcttccttgcagtgcttttgctctgattaagcattatacttaatgattacattagttttctttttaaaaaactttccctttcttcattttggttctttgattcttgttttattattattattctattcgattatctttacatcaatattttcttactttaagctggttaaaaacatccactctacttcattttgctaagcagagatcagaacactaaaaatagattttgcagccacagtaagagaaatactgtaacttccttcctactgcttccttcctggtgggttttattttagattaataacaatatttctaaagggtcttaaataaaagcagcactacagtaacccattcaggaaatggagagagacggagaaggtgaatgtaacactcgtttttttgtttgtttgttttttttttctgacgtcttattgtctgttcctttcattaaattacacagaggcttaaaaagaatgaagaaggcaagagagaagagaaataggagagggaatgactcagcatttagtagcatggagaagtaaattagtagcaaaaataagataagggaaagtataactaaaatcgataccattaggtcaaatgagaacgggatgtaaaaaataatggaaaaagaatacagtggcttgaaaatgcatcaggcggggggacaggaaaataagaggcatttaaatgagagcggctgagaacaaatactcatcgaaagggaacatcctttcattattttcctttcacaaaagcaggaaagggcaacttgagagcccagtttgaccctggttcagtaagttccatttttatcggctaactctttggtggcattgccctgtgaaacaacttcaaggtcaacttccttacgactttgattttcagctcttcactgaaactttggaatcacgtggagtcttatccaatgctgggcctcactccacaagaattaaatcagaaagtctggggtagggcccggcacagaactttacagagcttcccgggtgactccctcggagttccagcgttaaaagcaaccgtgggtctggggacttaagccccgccacctcccgccggaagcggccctcgtgggagccgtcactcgccccgaagggaggggctcccttttaaatgccctgggcagagaagcggtgtgtggcctcccgagcgctagggggcgacgggcacgcatttaagcgcccgcggcggggcttcccctcacttgtgcgcatgctccgggtgtcccggagttgtcctgcgccggtgttcccacgtgcggcctgaacctgagcgcataatgttatgaggagatgggagcactagtgattcgcggtatcaggaatttcaacctagagaaccgagcggaacgggaaatcagcaagatgaagccctctgtcgctcccagacacccctctaccaacagcctcctgcg

SEQ ID NO: 36715 - DNA, 2300 bp, Homo sapien
tcaaaaaattgctgaacaaataataagtattccaaaaaacagcttttgggaagtattattttaagtcattttcttaataaggagaaagactatatataatggtacctaagagagaaatggtgcctaacacctagttgctcctctaggagtggagtaaactgcaacatatgtttgtgttgaattttggtggctattgaataaactaatgtctcttattttagagaaataaaatacttaagacaaaatataaactttaaatcaatactaaggagccatttaggaaaatcttgccctctctgaactagacattttactaggcatttaccatttaaacctcaacgccatgtgtcaatgaacaatatttagtgagccgatactatgtggcagacattgtgctagggccaggagataccctgagacactcagcttgggcagtaagagactcttccatagtcacacagatggtgagttggtggtgtaaatattcttttcctgtgtaaatgcaattatagtctttgctctatttaattatactaaataaatagctgctatttattctaaacagataatccaatcaatatagatgggcttaaaattttaagtattctcactttagtgacaaacaccttggggatcttaaaggactgttttatttattgataccagtcactgtcaatatttttggttcaaagacgctttcatattcgattttctgatagaagacaacgcaatgaaaactatcaagttgcttatgaaaaattcttaggatgacactgcacctaatgtttgtagtcagttgtttgtcattctttcccttgtcctatgctgtgtccaggactgctagataagtaggtacccagcatcctagcgtccagatatcaaaaccatgaaaatgaagcactacaagccagacagataacctccagagggagcaaacgaataaacccccaaatcctgtggatctagaagtagaaaataatcgctgaaccactgatttgagaccaatgagaacattaaggacacctcaaaatagatcagggcactgttcctagcccaactctgtggcagaacataaacctgcaagaaataggattaacatactatctttgcagtaagttaaatcctgaacttctacaaaatacagtttactccaatttagttacactcttcctgcttctggtgtcttacctccacgttggactaaggttttcaattcggtggtggaatacttacctattaaaattacccactttgctttagtgtgagtttctcagcatgttttacacaggagtgacctgaatgactcggaagtggcacttgagtgtgccaggccctggaatttaatggtatggttctgtggttgttgtctgtttgcggttttattgctgaattagtagtaaccacagtaatcacaccctttctcatttctcaggcttggggatttcgtccacctctggcgggttggttcccctgacgtttcttaaagttactgtgaatttgttctggtcagtaccatagagtgtattatcctaaggagggccactgtagggccgctaggactagaggcaacttgaacttcacaagttagcagagcaaggactccctggaacaccgagttagggccacggggtctgtttgctcagattgcccgccagccctgggaaaggagtctgggggcgagcaggctgggttcccgggtctcagtcgccgcagtggtggctacagactgcgcatgtgacccaggggccggcgacgcaggtgccggagagcgaggaggagggcggcgtggaggagggtacttccgggaccggcgggcgcgcgctggcagctcgccgacggcgggggcgggggcggggggcggcaggggagcgagcgcgctggcggcgggcggtggcgttgcgcgcggggtggcgaaaggatgtgcgcgggatcgcgggggagggggagggagcgcgcgggctagctggaggcgggagggggcggagccctgtggcgtctgaacccgccccgggggtgccaaggtgcgtctccagtctgacgcgaccgcctggggcggagtcagcgggacgtgccacctgcagtgctggctagggctttttatttactagggagcagtttccccgcgcgacagttcgggagcgcgcaggcagtcgcgcgcacacacgcacgcaggcacacacacacacacacacacacacacacacacactttcgcacacacaaacacgctaggacgctcgtcttcgctactgcatccccgaaccagcagagcgaagctactgcgggttctgttaacctcag

SEQ ID NO: 36716 - DNA, 2300 bp, Homo sapien
acatgggtatattgcatgatgctgaggtttgggatacggatgatcccatcacccaggtaacgagcaatggagttttttagcccatgcccccagtccccttctagttgtccccaatgtttgtgtttcctatctttatgcctagggatactcaatgcttaactcacttagaagtgagaagaacatgtgttatttgtttttctgttcctgcattaattcgttttgcataatggcctgcagttgcatccatattgctgcaaaggacaagattttcttcttttttacagctattaatacatagtattccatggtatatatgaaccatattttttaaattcagtctaccactggtgggcacctagttaattcacgtttaaaatggtgtccattcccctaagctttgtagtatatagcggattatgattcaacaattttagaaaacacctgatttagtgagttggtctccaaacgataaatgtctgtaaaagagaatttcatctatcttattatttttaatgatcatgtttgaaatgaagcatatcaagttagacttattagttagatgccatttaatttgagattattttaactttaggatttttgctctccattcagttgttgggagtgttttaaaaacactggactttcagaaagattaaggtgttacaactccctatagtaatcaatattctttgcagttttaaagctcaagtgtccatgcctgttggagtttgtgttaggctacaaaagatgagtttataacctagattctgaaaggacactgtagcaacattaggttgctaagcaagtcccttggctacttaaacaacgtgccttgaattattctgactgcccgtgctgctcagtcataatggagcaattaaaaaatgacactcacttttaggtttgtccagacttaagttagaaataaatggaagtagagacatactatttttaataattaaaaaaagaaaataagaaataaaaatatagttgtgtgaaaaatgttcaaagcaactcaacaacctaatgttcaataaaatggaatacttaaccaactatgatatactatatgaagtatgcagtcataccaattgagggtttgtacacaatataacaaatattatatttcactcagattgtaaatcatagctctctcttttatacaaatcatcagaaataggcacagcttaacatattcctttcataagcactttcctcctgttattgctttccaaaataaaattgagacagaaggaagcctatttagcttatccagattataattaatttagccacttgggtgtattagaaaatgggagctagaccctctactgagggttgtaaagtgtagtcatggaccaggacccagactattcaaataatttatttttctagtcagagttactccagtgattaaaaacaaagacacgggatgggggcagggactaaatgaataaatgtgcttgaatagccaaggagcaatttcaagcctgacaactgcatcctgttatatatttcaatcatgcaatattgaagcccctataagaatccatttttcatttcctactgatttttattctctctctatgttattttttccacctacttttcagaaatctgctcttgaatggaaaattatatttctgtagacacttagccatgaggtacttgattttaatttaattccactaatcatatttggaaggaaaataaaatctctataaatgacaagtcaactagtatttgtggtttagatcattgtgtctttattttatccaatcttaatttctttcctttggccattccatctcttgttttaatttttacttcaacacttaattactattgttgattctcaaacatattttacttcctagtccttgaagcttcaataatgtgaaaacacttaaaaatatccagaacaattacttgtttgttaaaggagcattgtgtcagaacgttttatgtggacagtaaagctctccaagctgtctccctggaattcagaaactttagcatcaggaagacccagagtgtgcttttctgcatttagctcaatgcacccttttctcttgtctttttattcagctggaatgcttgctgattcctctgcacacttctaaggctgagaacctgaggaacccagctggaaaatgccgtctgaacgctgcctcaggtatgccctgtaggatatgtcctcacatgccgtagtgagccctgaaataagtgcattgcacgttctaggatcaagcacaaagcaggggcttaatgcatatttgaaggaatcatcaaactagtca

SEQ ID NO: 36717 - DNA, 2300 bp, Homo sapien
ggcactgtggtaacaggttgtctggcatttgtgccagtggtggtggcatggggttgggtgtcagggtgtgctagcaccagcagagggaggttgtggtgggggaagaccgtggcagccctgtgtgtttcagccggttccagtgcactggaactctctgacagtcaggtgcagtctgccagcaaaggagctatggtaaagttttccaggaagcaccctgtttgggcatctgaggctgcactgcaagtgggtgcaaccagtctggagccctaggagaggccagaagacagggtagtgctcagatcagactagccccatctcacaaggaagaccaccctgctgtgtccaggtatgacagtcacccctaggctaatgtctcctagaggagcgtaggtgtccctggctgtgctccattgcagccactcccatgccaaactctctgagctgtgcactggctggagtcctgctcctgccacctctcctggcagctctccctgccagggtaagtgtttgtggaggtcatggggtctcctgctgataggattctggagatccaaggtgagagcaggccataccttggctgttcatctcactccttccccaggagacgctggagcccaggaatgagtccctttgctcagcagccctgtgcagggttcctagcatcctttccctccagcctggcctctatgtcttccttccatccactcattgccttctctccaaagatctgctcagagagtatttcattcttccctatgtccctgtctcttgatgggagatgttcctcctggctgtgcttagccggccgtcttggctccccagccgcatttttataggataattaattagaagggcagtatagttttagactgagaccagtctaatttataacatctctgttcacatactttctggctgtgtatatccttgggcaagtggctttatatcattaagttttatattcttctccaattgtaaaagcaggtgagttgtcacttaatggggctaatgtagaaattaaataagataaatgtcagttgcaaaccaagggtctgaaacatactagatgttaaactgatggtttactagtattggtgatggtatctagttttcaagcacaatagagtggaattttggtttataaaccaaaattctgttaagaaacagtatttttaaggctattcagcagagacaatttttaccaatttcatctatattttaaatttaaatgtttcttttattttgaaataatttttcgcaaggctttgcttttcaaatgtaaatgtttaatcttttaaacacattggctctctgggcacctaaaactctcttcactatcgacactttaggatttactggccatgctgttgcttctgttttaatttgcaatagagcacttgtataaatgtactttgaaatgtttggaaagttgtgtatggactggaaaaatgcatgcgagatgttcctttgctttgtatattgtgaaagggaggatttgtacatgctttgttgttgttgttacatacgctagtttactgttttgaacataatttgtttactactttgaattccctatttgatggaagtgaaatgtgatcttgctggacagtagaaggaaagactgcctgtatttcatgctcatacctactaaagcatcagactgtttcatatttaagagcagtttaaaaagcacgtgagggtcttcttaatcttaattctagtgtcttaaaaaatgtatgtggagattatatgtttttgagacactataattaaggtcaagaagggaggtaatttgcattccccttgaaaaagctttgataccagctctggggactgaggggcattgtcagtgagagggccccacacagaggcttctatgtctccagcctgcagcctggagaactatgaagacttctgtttagcctcacacagaggaaggcagaataaacaaactgaaatggcccaaacaagctactgggtttttccctagacttagggtaaggaaaaggatcaggcactgatttgacaaaaaaaaaaaaaaaaaaaaaaaaagtgagcatacagaaaaatatttataggacactctatgccatgctcctggttcactgcagattatcaatcagtggaaagtgatagaagcaatggatcagcagaatgggtatagaggtaagacagcagttgcagcagcagtggtgcttggctctggtagggctggtggagcagggttgctgtattagaagagtcaggacttgttcatatgtctgtctctccctctcccccagatcatagctgaataccca

SEQ ID NO: 36718 - DNA, 2300 bp, Homo sapien
tcggctcactgcaacctccccatgccgggttcaagcgattctcctgcctcagcctcctgtgtagctgggactacaggcacatggcgccatacccggctaatttttgtatttttagtagagacgaggtttcaccatgttggccaggctggtcttgaactcctgacctcaagtgatccacccgccttggtctcccaaagtgctgggattacaggcgtgagccactgcaccttgccatcatatgtcatcctttttatgtactgctggattttgcttgctaacatttctgcttttatgtttgcatgtgatattgtattgtaattgtcttttgtcaggtttcgataccagtgtggtgctagcctcataaaacaagcatccaatctcctaatttctctaagagttagtatagaattggtattactccttccttaaatgtttgggagaatttaatagtaaggccatttggcctggagagtgtttgtttgttttgttgcttttgagaaatggtgttgctctgttgtccaggctggagtacaatggcacactcacagttcactgcagcctcgaactctccagctcaagtgatcctctcacctcagcctccctaagtagttgggactacagatgagcaccaccacgcctggctaatatttgtattttttttgtggagacaagggacagggtttcaccatgttgcccaggctggtctggaactcctggtctcaagggatccacctacttcagcctcccaaagccactgtgcctgccctggcctgaagttttcttgtaagaagtggtgtgtgtgtgtgtgtgtgtgtgtgtgtgtgtgtgtgtgtgcagagagagaggagggaggcttaaccaaagattctgagtactacgataaatacagagatactcaaattttcttcttttgttgatttttgacagtttgcgtcttttaaggaatttgtccatttcacctatgcttattggcataaaaatgttcataatgttcttttaatatccttgtccttttaatgactaaatttcatagtgatgaaacctttttaattcctgatactgataatttgtttattttctttatcagtttgggtaggggggttatcaattatattgctcttttagaaaaacaacttttgcatgtatttccttccatttatttcatcccatttatttctactatttatcatttcattcattttgcttgctttggtttcaatatgctgggggttttttctagttacttaagacaaaagtttattgaattgagttcttctttttaatgtaagcaggtactgttacaaattttagtgttttcattttaatttaattcaacgtattttctaattttcctgtgatttttcctgattcacaggttagttagaagtatgattcttaatttccaaatatttagagtatttcaagtatctactttatttctagtttaatgccattatgatcagactatacactttgtacgatttaaatctttttaaagttgatgacatttgttttatggctcggaatatggtatcgcttagtgaatgtttcatgtgcacttgacaggagtgtgtattctgctattgttgggttggtcacctataaacgtcaattaggtcaagttggttagtgctttccaagttttccatatccatactaattttctgtctacttgttccatctgttacagagaaaattaattgttgcacttgcctgcctcacagtccatggacaaaaggcatctgcattctaacaagagttgctggccccagagcgggaagaggggacggcgcgactgtgggtgtgaacgaggcactcacttcgcactcactggagtaaatatcttctctttggtccggccagaggataaacccatagtccttaagtcctctcctccgcctcagcagcagttctgtttttttttttttaccaggccccgcctttcagccgaacgcaccaattaaaggtacaaaaaaaaaagtttctcagtacctcgtcccggactgacggactctcgcgagaattcgtggggctccgactgtttccgcgcagatatcgcgaggcgattggtagccgggggagggctgcgccgtggccccgcctttccggagcgcgggcgcgcggtggcgggaatttcgcctgtttgcggtttagaccccaaagattcctgttggtggtctgggtcacaggaggcaggtttcgggagctggaaatgtgagcgggtacgacaggcaccgcgggtaaccgacgccccgggtccttgctgcagccgggtacgcgggataccggcaccccgcctt

SEQ ID NO: 36719 - DNA, 2300 bp, Homo sapien
cctctgtaaagttactcccccatgaaacccccatgaaactcccctcccaccttctactgtggaagtcagtaatcagcccacactttaggagtggagaattatactccctctcattaagagaggttatttatataaatcatttggaattatttggcaaggaagatttgtttcttctcctctgattatttttcaataatttacttacattaatatagactcatggtatttatattatactttgagttataacccaatactactttgtttattttgttgtttaactagttctagttttagacatcgagagctctttctgatggttcctgtgtccctttgacatacccctaacaatgtgggttttgttttgttttctgagcacttcctatttcctagcactgcaagatactccaggcccactttgtatattttcagccccagtcctagagtcagcctttcgtctaaggacccccaagttccttttattagaagccaaaatttgtagggtgtataacagtatccttggcctctgcttattgcatgccagtagcaacctttctcctgtagtcatgaaaatcaatgatgtttccagacattgttaagtgtctcctggaaggcaaaatggccccaagttgagaaccactgctatagagatagacctgctgaaaattacattaagataatatgatggaggccagtgggagcattccagaagaagcttctgaacctgtcagcagatattgctgcagaggaggtttgccagaggaggtgccatttgaactgagaattgatttgcaattctcagttttattgagcaattatcacaagccagacataaggtaatgttttactttaattatttcttataattccaaccttaaaaagcagatattattgtcagtttacagctgaagaaactaaggttcaaagggacaaagtaacttgcttagggtgcttgagctggtcttgaaagttccagctgtgcatgtggatggaaagttacaagggtgctgacatgtgcccacactgcttgagtcaagactatctcaactactttctttgtttacaaacctgcaataccacttcattttaaatttatttttttcccattgaattctgggttctcgagagcaggaatcttgcagtgttcatcttatgtctgctttctagcacaatgtttgcagtgataggtgttcaataaatgttcaacaagtgaattaatattaatctatgtcatcaaattcaccacttacagcttatggaattaattcaagttccttccggtcagatcactatcctggcagcacctctggtagaggactcattgctagacacaccaaccaacctccaggagtcttttagtcactctgtctcattgttttactctcagcatcccgtaaggctagtaggctggtattatgacttcctcaaatgattatggtatgtgatcataatatgttgccatgggttagagctacaaaacaggagttctctaaggaagggaaaaatatgctacatctctaatattaaaatgtcagaatgtattgttactaattttcacatgtaaccccaattttatatatatatatgtatatatgtgtgtatatatatattcttctgaaaatccctttatcttgattgttgtagcattttaagatgaaattttatgcagatcatgaaagagttttttttcctttctttaaattccttcccattctcatcgtaatttccttttatttaatttatttattaatttttggttgtgaggatggaatctttctccttgtttattaaacaaaacaaggggagaaatgtcctttttttgttgcttttctttattctacaacttttggatctgctatttgcagttgctctgaaattttgtccattgaattagaagttgctctctggtttcaagactctttcttcctttcctttgctaaaatttggtctaattaaaaaaacagtagatcatagttaaataaaactgtacccaggataaccctaatttccatatgcagatttatctgcactgacagccaccccccttacacacacacactctctctttctcattctcctttccctcctctccatctccctattgcattgtgtctgactgattttcagagcaccttcgctgtttcccccttctcgttcccttctcataaaatatctagacaggaaggaggtggctgcagaggctgaacaatctcatattctgcctgcaatgtcatcgtttctttcccccattttagggggctgaagttgcccagcaagggatgcagaggagctggaaaaga

SEQ ID NO: 36720 - DNA, 2300 bp, Homo sapien
ttcagctttccattgtgcacccatatctaacatattatcagctgatccatagtgaaaaatcctatgtttcccaaatttggtctgctccatcacactgctggtgttccttcacaccactgtatctttgtacattttccctttacctgtaagtattttccctaagtacatctggctaaattagagtcataattcaaaattcattttattaataatctctggtacttctccaatgtttttactttatttcaattgacaaacattgtatatatttattatgtacaaaatattttgaaatatatatatttgtggaatggctaaattgagctaattaacatatacattacctcacaggtttatcattttttggtaataagaacatttaaaattgactctgttagcaatttgtaagaatgcaatacattgttattaaccatgttgcacaatagatttcttgaacttactcctccgatctacttgaaatttggatggatggtatccttttaccatcatctccctagcccacccttcttctctcctcctggccccatgtaaccaccattctgctctctgcttctatgtgtttgactgttttagattcaacatatcagtgaaatcatacagtatttgtccttctatgcctggcttatttcacttaatataatgtcctccaggctcacccatgttgtttcaaatgacaggattttctttttttataaggttgaatagtattccattgtgtgtgtgtgtgtgtgtataatacaatgtgatatatatatatatatatatataaaatacaatgtgattatatatcacatcttctttatctgtttgatagatgtgaaaagatatatcacatctttatctatctatctgtgtataaatatcacattatctgttcatccattgctggacacttaggttgatttcatatcttggctattgtgaataatgctgcaataaacaaaggagtgcagatacctcttcaacatgctgagctcatttcctttggatatataccaatcactggggttgctggattgtatgtcagttctacttttcatttgctgaggaacctccacacagttttccataatgactatactaatttaaatttccaccaatactgtgtaagagttcccttttctccatatcctcaccaacacttatcttttgtctttctgacaacagccattctaacttgcatctattggatgactattgatattgagcattttttcccatatacttgttgtccatttgtatgtcttcttttgagaaatgtatattcagatcctttgccatttttaaaattgtgttatttgttttcttgctagtgagttaaatttttttatatattttggatagcaacaacttatcaaatgtatagtttgcaaatattttaccccattccgtaagttgtctcttcactcctgtttccttggctgaacagggactttttagtttgatgcaatcccatttatcaatttttactattgttgctgtgctttcaggttcacatatccaaaaaaatcgttacctagaacaatgccattgagatttctttctcttagtttttcagcttcaggtcttatgtttaagtctttaattcattctgagttggttttctataaagagtctaatttcattattctgattgtggatattcattagtttcaacaccatttattgaagacattgcccttactcccattatgtgtttttggcacttgtatcaaaaatcaactgaccataaatgcaggaatttatttttgggttttcaatggcataggcatgcagaaaatgagccagggcgggaaactaaagaaaatgaaagtacagcatatgaaaaatggtagaacacagctaaaacagtgtggagagggaaatttatggcactaaacacatacattcaaaaagaggaaaggcctcaaagcaataattggagttcctatctcaagaacctaaaaataaaaacaaaataagcccaaagcaagcaaaggaaggaaatcatatgtataaggcagaaatcaatgaatttgaaaacagaaaaacagtgacacaaaatgttttttctttgataggatcaataaaattaacatagcaagactgatatataatgataaaaaaggaggacatagattattactgtcagaaatgaaacatgagatataactacagaccttcacacatcataaggctaataagggaataataaaaataacttcacacaaataaatttggcaacttggaatggaccaatttttttaaaaaaacaaaatctaccataacttactcaatat

SEQ ID NO: 36721 - DNA, 2300 bp, Homo sapien
gacaaagttatgggattcctagcagcccccaggcgcgcggccagagtggccccgcgcttgcgctgggacggagcgacacgctgtgtgtgtcctcgcctcgcctcgccgcgcgggtgcgcgcgtggtgggggtgcaggtccgtcctgctggcggcctgtgggctcgcccctcccctatccatttctctcccccacacacgctcataaacacaggacacgtggaaattctcagccaaagcgtcttgcccgggcgggtgctcaacgtggtgatttataaacagctcagccactctccaaagagcatgactccttgttagtcatgatgaattttctggcccgctccagtctgctgtctggattcagatgctcagaggccccaaaatgctccctctgagcgttgatttggctgccctctcaagcctacgaccgccggcaaaaccagcgatagagcgaggggtgagaggtggggacgcgatccaggttccctggggtctgtcattcccttcccggcagtaactgttgattcgctttacagcgcccatgtacacacccggccctgcgtggcggtcacgccgctccagcctgggtccgcgcccaagttctagctaccgggcttgcaggctcggaaactcgcaggcggcacctgctctgggcggctaaagaactgatggcgcgacgcgcccgcgctccgtagagcggcgctgcgggtgcatggtcccatagtcttgctctggagttcactgctgaaagctgagctgggagcttggccagggagcgccaaagacatagactaaccccacccgctagcgcccaccgaagttactgattaggaaggttcccctggcatcagcccatttgcttcacacactcttcctccttcccaaggggctaacggaaaagttgcacctaccagcggtaggagcacggggaatcgcgcacgcaggccctccgcgcggcttcccggagcggcctttggcgactgcgccgcccctacaaggccgcacacccctcgccagcactccggcagcctcgcacaagacggagcccacgcaggcttctagttttctaaaccaaaaactgcacgcgccggcgtgtgaatctgacggagagacttttagagttttgtttggttttcagttcagaccgctacgctgtcagagcaagcaactccgagccttgatgggaatgacttacaagccgcggtgcgggctgagcctgcctctctcggggttctttccccaagggagtgggagacaattgggcctggaacctaaaaggaagagagcctgtgctagccgcggggtagaggggaaggagaagagctttgggccgaagtgtccgcacaccctggagcaagagacacttgtgcactgaaattctaaccgtgggatgcaaggagagttgaacaggggaacaggtctggctcttggctctaggtttaagagatacacactgtgtgtgtgtccctaggtgaataaaaatccgactcccgctggctcggtgcgacccagcttttcccttaccccctccgtttccccatcttaaagccctattgggaaacgaaagtggacaccactgcctcccgccccccaccccaatccaagtcttccaagtgtctgtggccgataagagcaccgggaccgcccccctgccggtcttctctgcctgggagacagatggggggcggggcccatccgagagagggcggaggaggccccgggtgaggaagaagcgggggggtgagaactgagagaatctgaatcgggaggcgaaggggacggggaggagggctaggaggactccgagcccgggggagggggagggagtagctctgcgccaatcagtggcgccggcctgggaggttgctagcggtatccacgtaaatcaaagggcgcggagccaatgggagggggcggagggggcggggcccaggcgcgtgccgctgcgagccggcgctgccaagagagcgggagagagctggagagagcagggagaggggggagcgccgagctagtcagagagtgagcgagagcgagaaggagggagaggaggagaaagagagcgagggcgggcgggaggcggcggcggcggcagcagcagcagtaatagcaggagcagcaacagaaggcgtcggagcgggcgtcggagctgcccgctgtgggagagagaggagacagaaagagcgagcgaggagagggagcccgaggcgaaaaagtaactgtcaaatgcgcggctcctttaaccggagcgctcagtccggctccgagagtcatggcgaccgcagcgtctaaccactacagc

SEQ ID NO: 36722 - DNA, 2300 bp, Homo sapien
gcaaaaacaaaaacaaaaacaaaaacaaataatccaattaaaaaatgggcagaagatctgaacaggcatttctcaaaagaagacatacaaatggccaactggtatatgaaaaaatgctccttatcactaatcatcagataaatgcaaatcaaaacaatgagatatctcaccccagtgagaatggcttttatcaaaaaaaaaaaaaaaaaaaaaaagccaggaacaaaagatactggtgagaatgtggagaaaggggaacccgtgtgcactgttggcaggaatgaatattactagagccactgtgaaaaactgtttgaagattcttcaaaaaactaaaaatagaactactatatgattcagcaattctactattgggtatagatccaacagaaaggaaatacatatatcaaagagatatctgcacttctatgtttattgcagcactatttacaatagccaagatttagaattgacctaagtgtccgcgcaacagatgaatggataaagaaaatggggtacatatacacaatagaatattattcagccataaaaccctccacaaaatccttttatttgcaacaaacatggatagaactggaggtcattatgatgagtgaaataagccaagcacagaaaggcaaataatgcatgttctcactcatatgtgggagttcagaaagtggatctcagagactgagaagtattgggggggtgggccatgggggagcaaggggaggtaaacatacacttagaagaaacatacacttagaagaaataagacccggtgttccatagatcagtagggtgactacagctaacatttatcaatagtacatgtcaaaatagccagaagagaacaatttgaatgttcctagcacaaagaaaagataaatatttaaggggatgagtaacccagttatgctgatttgattacagaaatgaatcaaattatcacatataccctgaaaatatgtacagctattatgcatcaaaaagttgaagaaaataaaaattttaatttttttgtatacaatgtatattgcatatcatatattgattctgttcatatataagtaaatatccttactggtttgcctcattggagcattcagacagcaaataatgtgtagttcaacattttattaaatattttccatcttagtggatattttgtaacaagataaatatgatgcaaactaaaaaaagtgccaagggcgggcgcggtggctcacggctgtaatcccagcactttaggaggctgaggcaggtggatcacaaggtcaggagatcaagaccatcctagccaatatggtgaaaccccgtctctactaaaaatacaaaatattagcttggcgcccttgtagtcccagctactcgggaggctgaggcaggagaatcgcttgaacctgggaggtggaggttgcagtgagccgagatcgcgccactgcactccagcctggcgacagagcgagactccgtctcaaaaaatacataaataaataaataaagtgccatactgaatctaccaaaaataaatcaaaatgagtaagagaggctgccagaccatcttcttcatcagaggtaatggtcagaggcttctgaacgttggtatggaaatgagcctgcaggcaggatttgtatgcagggaagaggaggtttgtaaactaggtgaattataccttcagagtgcatataatgtatattatacttttcctctacgtatgcgtaccagccgtattacctatgtatcatctgatccaccaagtctggactgaagaagtccttgtaggaccacactacacatggcgagccggtactcggaagggattattccgaagaggatttgtagacactacccgctgtgtatgacctaggccctttacacgggcaccactggagctaggaagccagcagaaagctcctccccctggcctgggagcgggctgtccgtaggacccagagcacctcccatgggagaaacgcccggctttgcttctggccccgccccgcctccctccaggccccgccccgcctccccggccccgccccaaccccgcggccccgcccctcctccccggctccgccccgcctccccgggcccgccgctcctcgcggcctccgcgtcttccttccgggtcgcgctaggccgggcttgcggcggttgtgccgcatctagagagtcggggagccgcccccgcacccaggccttctcgcgctgcctggtcgctggtgaagcccgcggcgcgcgcctctcccggaccctgcagggtacggcccttcctttacttctccctcccgtg

SEQ ID NO: 36723 - DNA, 2300 bp, Homo sapien
tgatgttccttaggcaagttatttaacgtctttgagcttcaattttcttatctactataaaatagtataatatgatatcccaaatttaaactgtaacagtacccattctaaagtgtcattgtcagaattaaataagttaacatatataatatatataaagtcattagcatatgcttggtagataattagcctccattcttaccatgacatggcccaaattaacaattagaattagatcgttctggctgatggagcagggattttttgtttgtctcctctcctgtcggttctgaaatttgtgtctgttaatttacatgaaaataccactttgtgatgggaattatttgactggacaaaatcagttaattgtcagatctatagtttgtgctgtcttggaacattgtctaaatgagttcttgattttaatacctgacttctcgaacattccatttaaatgaaaacatttcttttatagttaatattgccagaaagcagcaattttttttttttacttgacatattttcaaaatgagtcattctgtactgtgaagttgagtgggcccttgggtggtaaacttttcaagagagtttgttttactaaatggggatctgcaggaagtgggcatccatgtgatgaagatacaaagagcttgttcttgcttaggtagaaagaagggggtgtggtgttgtactgggaacaatgcgagggaaccagaggctcaggcagggccaaggggaaggaagagtgaagtttatctgactagaaatcagctgggtcaaatgaagatggaaattgcaaaagggtcccgaggagtggggtatgagtggggctgtgtggaatgatgagcttgcagggatgagaccatatctctttggatggggataaattccactattacttaatgcttgatagtttactaaatagttacagtattaccttatgtaatcctcatgataaaccatacagaattggtactgtcctcactcttcaggtgaagatggtggagagatctaggctaacgtggccagtaggaagcagggcttggatttgacaccagttgtccagacttggaatccagcattcattccattatgtagtggttattgaaaagctgtatgcagggaagtccttctcacccaaaagagtagccaaaggaaaagatggatgtgtggctgagacaggagaaaggggaaaagcaggggtactgaaatacatgctgtgtggtaaaagtggggatactgggaaggcagaaaataaggaagacagagctagagagagagcatccagaaggcaggttccatggcattacaggtgaaagaagggttaggtgagggcatgggcagttgggaagagggaccagaatttcagtctcagattccctacagacttgggtcatagcagagcaaatctgcactgttattcctgggtcttatggatgaatagactgtttcatggtatagtctaatggccaaaaccatgggctctgacttcttggttgagtgcccattctgccataactagcaatgtgactttgggcaagttaatcctctgtgccttaatttcctcatctataaaacgtggataacagtagtacctacttcataaggttattatgaagattaaaggagataagacccatgagaccctcagaacaatgtgtgacacacagcaagcacagaatatcatttttatccatccagcttgtcctagcaggtaaatacagccggctggagaataggtggaccagtactagaaaatgttcttgctgcccggaggccataggtaacagaaggaggttgttatgtagttactttgctgagccagtggggtcatggtaatatcatgggagtttgtaaggttctcttgagttttgactaagcttccatgagtgctgggtgaggtaagccccttcgacaaactgggtgctgggtgatgtaagcccctgtgacaaacagatctgcttgttcattgaggagctacaaccctgcagggtcctctcaagaaataagggaaccgaatgtggataacatgtggattgtactttatttctgttttggttttgacaggaaacagcaagagattgactctaaagatgctattattttgcatcagtttgcaagacctaacaatggtgttccaagtttatctcctttctgtttaaagatggaaacttatttaaggatggctgacttaccgtatcaggtacttgtgtgcaaatatgttttctttttatgacatcagtatcaggggatgagtatttaactaaaggggggaatatttcgtctcacacagtggatgc

SEQ ID NO: 36724 - DNA, 2300 bp, Homo sapien
ttatttttatttttattgagacggtgtctcgctcttgttacccaggctggggtgcaatggcacaatctctcctcactgagacctccgcctcctgggttcaagcaattctcctgccttagccttccgagtagctggaattacaggtgctcgtcaccactcccggctaattttttgtattttcagtagagacggggtttcgccatgttggccaggctgatctcgaactcgtgaccttaggtgatccacccaccttggcctcccaaagtgttgggattacatgtgtgagccacctgtgcccagcccacatctgcttcttaaagatgttcactgcagtgtctctaaaaatgtaaaccatatttgaaccagagaccagatgatgctcaacagttgtctgacactaccaggaagcagcagtgggcccctggcctgcatgagtgggtggggcaggtcactatgagtgagagtgaattgtagtcagtggctttctgggataaaaatactacacttcctctgggttctaacttgttttgggcataaggtttgtcaggattgactctcccttttgccttccatattcttccacttaaggtaatttatgcccatccccatgtctagacctagatatgcaaataatgtgatcccaaatatcaaacttatattctttaaatattggctcagtgttcactgagagcaaagactgagtgctctgtgggaagggcacagaaggagcatggagaatccctggtgccagccctccttgttccctcttccagagcactgcagctttggtcccagacttaactactctgcttcttgccgacaaggccaggcagccttctggcctctctccttgaaagaccggctggtgaccacctcagtcaccccaggaggccgttgggtttcactccttgcaacctacttatgggagcctcacttagaaccacacacattacttcttcctgggaggtcacattttcccaggagtgtttggggagtctcacatgctggtgcctaggcatcagctgactagcccctccccccgtctcgttgaggcgacacgtccatatttattatttattaacaagacgaccacactccttgcctgttctaaggggcgggtgtgtcaggagaggaaaaaaagggggagtccttttgcgcctcaatctctgctccataggcaagagcctggaggtttcttttacccatccttccaccttgagagtgatgaacctccacggcccgaatcctttttcagttcttccaaacaatttaaaactatccatgctcttgttaaaatctgtgcatatattacaagcttctattctttgtacttatgaactttaataaatgaagttaaaggaaaaaaatacactgaacacacacacagttgttagacagattttctaaaacaaaagagggacccccgtcccccaaccgaaaccctgtatcagcgagttccctgatagtgacttcaaagaggaaagacttgaactgggtttgtcagagaaatctctctaggtagagtattttgttatttgccaaaccagacatctcgtctctgcgaacacctggtcaagcccgaggtaattgtgtaatgtaataagagtgtttttatacattatgcaaatacgcagcgctttcctgatggccagaacaatctgattcccgactttaatcctggcccacgctcccagcccccgcctggtggcgtctcctgcccgcagctccgcgccgccccaggtgagtcctgcgcgttccctactctggggcccgcgggaggggctggagcgcaggcggagggccggccggggtaggggaggaccgggatccgggccccgactgcagcttcctcgcggtggggccgcatttccaggcacctccgccgcccttgcccgcgcgcggcgagcggtttttgggcgtgccgcccggaggcgcggagcctgcccggcgcgcctcagccctgcagatccggccccggcggaggcggccggaccgcggagatgcggggagggggcagggcgcggggtaggtgactttatcccgcctctgtttccctgccccggggagcaatgacatcacgcggccttctccaggcgccgacacaaagagcggggcggagaggcagctgcggggggagccggcggccgctgctgccgcccagggctctggggccccgccggccaggcccgccgtccgcggccagtgcccttcctcctcctcctcctctgccgccgcctcctcagtcgccgccgcctcctcagtcgccgccgcccgcgccgcccgcgccctccgcgcgcctc

SEQ ID NO: 36725 - DNA, 2300 bp, Homo sapien
ttctcctgcctcaacctcccaagtagctgggattacaggattccatcaccactctcagctagtttttgtactttttgtagtagagatggggtttcaccatgttggccaggctggtcttgaactcctgacctcaggtgatccgcccacctcagcctcccaaggtgctgggattacaggtgtcagcctccacgcccagctgtatatcatttcaaagctacaagggagcactttacccttggatgaaaaaaaaaatgtttataaagttgaattacaaaacagacattaagagttttagagcaaaataaatacgcagacttacgggtgagaccataacaataatagtctggggaaatatctccaacaatggccatatactgcattacagccattacaactttccaataccacttaggcttaagggtcattgggaaagccctttgttgatgtttgtagcgagaaatactatgagctagttttgcttatttgggccagacctgttctgggtgttcaaaagacatacttgtcagcataaagcaaatcattgattccccttcttgttaaaatgtagtggaaaggctctgaagcccagtgaagtgtggtaccttcaaagaaagtacatataaagctcctagaactttatttaattgtgcttgcactttgctttttccttggatgtgtcactccaataaatacaagacgtgctacattttcttttgtgcagagctttctgccttcatgtggagagaggatcatgtatctaagggtagaggagctctgaagaggacatagcaactgaaaagtgcgaccacccttaggaggaggtcaatattttagctaagaaccatgaatgaaagactattgctgtctgggtgaggtggctcccacctgtaatcccagcactttgggaggctgaggcaggcagatcacctgaggtcaggagcttgagaccagcctggccaacatggtgaaaccctgactgaaaatacaaaaattaagccgggaatggcagcatacacctgtaatcccagctacttacgaggctgaggcacgaagaatcacccgagcctgggggacggaggttgcaatgagctgagatcctaccactgcactccagcctgagcaaccgagtgaggctgtctcaaaaaaaaaagaaaaaaaaagattcctgagcggtaaatttcgctaactgaaagaaccctttaccaatttgaccctacctgttgaaaatacagaataattttttgtcttcaatgttggagattcgtcattgttcttacccaaagaaagactttgtgcatttagacgtaaaatgttactgatcactgttcctagctctaaatgaagtttgcctagactgagccacagaagcctcctactacatgatgtatataccctgtacaagataatagtcatttgcagaaaataagttttacatttggccttctggccatctgatatttgagtgccttgaaaggggaaacaattcttcccttgaggaagaagtgctcccatactcttgcattcttagcagtagggtcaatgtcttacaggaatataaaagtccttgaagagacatctgttaagtgtgaaatagagctacatggcaataaaagaagacacagcacgaagtaatggcctgattgaggtcaacttcgaacatgaggtttgaggtgtcctatagcaataaagtatcttcaaagttgtttatgatagtaaaaacatcttgcagtttaattccatgtgcaatttgctaaatgagcgtgaaagtatagccatacatacataacactcaacaatacaatcatgaaagtcggctgcaggccgggcgcggtggctcacgcctgtaatcccagccctttgggaggccaaggcgggcggataacctgaggtcaggagttcgagaccagccaacatggagaatcgcttgaacccgggcggcggagattgcagtgatcccagaatccgagatggggactgtactccagcctgggcaacagaacagactctgctaaaaaaaaaaaaaaaaaaaaaagtcggctgcagacggcgaaagtgatctcggaacctttatgttggggatcttttttcgggagggaccggaaaagaggtgggatcgtttgtcgcgatgtggagtggccgtaagctgggctcctccgggggttggtttttaagagtgctggggcctggaggctgtaatacaaaagctgcgcgtcccttaatttcctcggcgggtgagtgtgtgtgcggaggtccttcgcatgcagtcaattgcgagcgctggcgtctctgcgcatgcgccg

SEQ ID NO: 36726 - DNA, 2300 bp, Homo sapien
tgagctttatgcacacaggtggactgggtggttatggatcaggagacagtgaagatgagaggagtgacagaggatctgagtcatctgacactgatgatgaagaattacggcatcgaatccggcaaaaacaggaagctttttggagaaaagaaaaagaacagcagctattacatgataaacagatggaaggtgtagtataccttttagacttaattttggtccagttttgtatttctttttattttttaactaacctaaaaatatcaaaggataaaataaaggctatattataaataatatgtgatataactgaaactaaagtcacaatttttgtttggttgttttaggagccatttattgcagtggctataagccaagctatttagggtatttttatttcttgctaaaagtcttgaaatgaaaaagatgacttttgaaatgggaaaaatatatttgtaagactattgaaaagtaatttgtagctaggatatataaggataatagagaacctagaagttttttacttaagatactttacctaatactaggaataacaaaagagaaaatttacttagaatttcttctttgaaaaatctaaggtaattaagagttagcagctaagacttctctataaaccacttacttacctttaaaattttgctttagttggacaaaagggaagtcttttcctacttgcctcacacccacctctacatcttgatactgtattttgctacactgtccaggagggtaacgtaactaactacaagctatagagaacttgaaatgtggctaggcatgtgctgtgggtataaattacatgctagatttcaaaaactttacttgaaaaagagaacagaatttttttaaatttattatgtgttgaaatgataatatttttggtatattgggttattttacctgtttctttttacttttttaatgtggttactaaaaaattttgaattacttacatggcttgcatcgtaattctattgaaaatggtgttctattgttacagtctggtagcttgacatttggtagtatgagaattttacatgaacattttcttagtgtttttgtctttttctgtttcagaagaaaagcagcaaacagaaagggttacaaaagagatgaatgaatttatccataaagagcaaaatagtttatcactactagaagcaagagaagcagacggtgatgtggttaatgaaaagaagagaactccaaatgaaaccacatcagttttagaaccaaaaaaagagcataaagaaaaagaaaaacaaggaaggagtaggtcgggaagttctagtagtggtagttccagtagcaatagcagaactagtagtactagtagtactgtctctagctcttcatacagttctagctcaggtagtagtcgtacttcttctcggtcttcttctcctaaaaggaaaaagagacacagtaggagtagatctccaacaatcaaagctagacgtagcaggagtagaagctattctcgcagaattaaaatagagagcaatagggctagggtaaagattagagatagaaggagatctaatagaaatagcattgaaagagaaagacgacgaaatcggagtccttcccgagagagacgtagaagtagaagtcgctcaagggatagacgaaccaatcgtgccagtcgcagtaggagtcgagataggcgtaaaattgatgatcaacgtggaaatcttagtgggaacagtcataagcataaaggtgaggctaaagaacaagagaggaaaaaggagaggagtcgaagtatagataaagataggaaaaagaaagacaaagaaagggaacgtgaacaggataaaagaaaagagaaacaaaaaagggaagaaaaagattttaagttcagtagtcaggatgatagattaaaaaggaaacgagaaagtgaaagaacattttctaggagtggttctatatctgttaaaatcataagacatgattctagacaggatagtaagaaaagtactaccaaagatagtaaaaaacattcaggctctgattctagtggaaggagcagttctgagtctccaggaagtagcaaagaaaagaaggctaagaagcctaaacatagtcgatcgcgatccgtggagaaatctcaaaggtctggtaagaaggcaagccgcaaacacaagtctaagtcccgatcaaggtagtatactttttaaagtattttgtctgatttttaaaaaaaattgactgaatttattcaaagttgaaagtgtcctttctctctctctttaataaactcagtttggtacttgata

SEQ ID NO: 36727 - DNA, 2300 bp, Homo sapien
tcatttctagctttcttgaaagtgaaatttccccacatttgaaaatgttttagttcctaagtttaagttcttaaatgactcccgcgggcatccctaccccttagttttactctactttgtgaccctgggcaagtgatttacctctgtgtgcctcgattttccctcccgaaattggcaaaaataatacctaatttctccctacctcacagggatgttgtgaggataaatgtgttcgtgtaagaaagaaattatataaaacctcaaggtattatttttgtggtgttgttactaaacaaatataaaaattcaacaaaaatagtgctttggattttgttacatttgttaaaaataactttgggcatttggttaggatatgaattagagtggagttagctcattttgaattatatatgacagtttagttcattgcttatttttaagataaacaaaaggaatttgaccaagaagtcataagttgttttttaaatctgtatgtttactgaaaaatctttcttgagatcttaaaattctgtgttgattttgttataaccgcctgttgaatgtttttatgcctaaatcttaaatagaatggggaatgcatcagcaacccccacacccccctccagatcagccatggatgccaccaacaccaggcccaatggacattgttcctccttctgaagacagcaacagtcaggacagtggggaatttgcccctgacaacaggcatatatttaaccagaacaatcacaactttggtggaccacccgataattttgcagtggggccagtgaaccagtttgactatcaggtgaaagatattttgttgctttaatattgtagatgtgcacgtaatccattctttggaagtgtctcatcaagaatacctaagatacgtgtttcacttttcagacttgtataaataagcacattctgtctcagttatcaatttttgagtattaaaataattagaatttgttttctgatttttttatttcattaggaaaatggtataaaagatcattacggaaaacttttgaaaaaattaaaaatgtataagtgcaatagctatatgatgttttattttctaatttatatttcaaaatggtatatttaaatgttaaagactagagaatgcacagtaattgaatatagctcatggttaagacatgaataaaaaatatagatcattttcctaagtgtaattccttgtgctatgtagaattatgactgtttttctagtgtcattttttttccattctgacatgacatgttaatggaattgtatataatttcctctgtagcatccaattcattcctagggacatagaactctgtggggaatagtgttgtatgttgggctttatttacttcattccctctgccagggtctacccttaaattatagtgctaggtgtcattttgaaataactgattgcaattattaacttataaactgctatcataatttaaaattttgaaagaattatttcatgaattctagggtagatttgataatggacatctagtattcaccttgagatggtaatcctctcattaataaatattcagatacttgtatacttggtatacagatacaacagtttttatgttgtttgaagaaatataatggcagggagcatctgcttaccctacttttgcatggtagatcccatgtaaacaagacaaagagctgtattggcagctggcctagaaaagcctctgaaaatagcaaaattgcagaaaatatttaatgattcattaacttctatctttgcttataaatgaatatatctgcaagattatagaaacagcttaagttgtttagttcactttttgttcactgtaagtaggatgttgaaattgacaaaaatgtctagttaaagagaaattagtatctatttgatgtcttagtgttggtaggattagcttgtaaatggattcagaatgaaaaatttcatatacttcttgaaagtagcttatcagctggcttttagaagcctctttgcatttacatagccggaaaatcttaagacaagtaagcctaggttcttgggaccatagaagtatcggtggatattagagccatggaattcttggatgtgctgcacacatggatttctactgtcccagttcataacacacgtgtgtcccagagagtatattgtattaatttgaagaaaaaataaactgcaatactctttcagcatggggctgcttttggtccaccgcaaggtggatttcatcctccttattggcaaccaggacctccaggacctccagcacctccccagaatcga

SEQ ID NO: 36728 - DNA, 2300 bp, Homo sapien
aaaggtgatgacatttaaaaattcagtaaactaagatgcaggggataaattttatatgaattaatattagaaatgggttaagagtgttttttgtggagttctttcctgaaagtgtaagtagtttatattattttttagcctgaatatgggttatttgctaagtaccctttcagacacagtatgctttaatatttaagatctcattcaaaaaaaatttttctaatttccctcataccctctctgtctgaaatatttaagatctaaggaatagttgagctgcttattttacatagaggcactattcttttaactcctacattctgaatgctgaagtcagtgttaatttacgttaggccagattgattgggctgcattggcccaagcttggattgcccaaagagaagcttcaggacagcaaagcatggtagaacaaccaccaggaatgatgccaaatggacaagatatgtctacaatggaatctggtccaaacaatcatgggaatttccaaggggattcaaacttcaacagaatgtggcaaccaggtttgttgtttatgttttcacaattttaagacttttaaaaaacagaatgaagattattattaaattttttaatttgcttagttgtatgacttctggaaattaatgcttcttaaagaataggcagttttcaatttgatttgactttgacattttgtggttaaaattattctgtactcattctgctagctttgtggcactcagtttgattcttttcttggttcttcattcctaggctgacaggggctgggaacactctggaaacctcacttggcatctagggaagagagcattctttgtctctctattgcaacctctggccttttcagaagcagcactggcagagtaaaacatgtctagcctctaattaaagaaaaattgtgtcactgtgtgacaaattagtctgtcaaatatactctgcccctaccatccgcctacctttttcttccctttttttttttcagatagtgaagatctttcataagtttttgtgtgttttacttttttgtttgttttatttcacagtatgatgtagatttcttgatgctaattcagtcttccatggcttgtgttattcctttttaatagtcacttgaaactatggaggaatcagcctctcatttgggtatgctgatggtgaagtcataacctcctttccctattaatactttttgtttctccttataagaatggagacctcagtcgagaccagcctgggcaacatagcaaggccctgtctctacaaaaaaaaaaaaaaaaaaaaccttaaaacttagtcaggcatagaggcgcatgcctgtagtcccagctacttgggaggctgaggtgggaggattgcttgagcctaggggattgagactgcaatgagctgtgatcacgccactgcactccagcctgggtgacagaatgagtccctcatttaaaacaaacaaacaaaaaaaacgagaattcagattacttttaaaaacataaatattctagtctttgatactgtgaggtggttcatttctagctttcttgaaagtgaaatttccccacatttgaaaatgttttagttcctaagtttaagttcttaaatgactcccgcgggcatccctaccccttagttttactctactttgtgaccctgggcaagtgatttacctctgtgtgcctcgattttccctcccgaaattggcaaaaataatacctaatttctccctacctcacagggatgttgtgaggataaatgtgttcgtgtaagaaagaaattatataaaacctcaaggtattatttttgtggtgttgttactaaacaaatataaaaattcaacaaaaatagtgctttggattttgttacatttgttaaaaataactttgggcatttggttaggatatgaattagagtggagttagctcattttgaattatatatgacagtttagttcattgcttatttttaagataaacaaaaggaatttgaccaagaagtcataagttgttttttaaatctgtatgtttactgaaaaatctttcttgagatcttaaaattctgtgttgattttgttataaccgcctgttgaatgtttttatgcctaaatcttaaatagaatggggaatgcatcagcaacccccacacccccctccagatcagccatggatgccaccaacaccaggcccaatggacattgttcctccttctgaagacagcaacagtcaggacagtggggaatttgcccctgacaacaggcatatatttaaccagaacaatcacaactttgg

SEQ ID NO: 36729 - DNA, 2300 bp, Homo sapien
atacattttattaccttgtatcatctaagttaataataggtggatgagatcttcatttcaaatgtttgttgttccttttttctcaatctctaaattgtttgacattgttttttattatgaaggaattgttcaagtaaataaaagatttggaaagaaaaaaagatgttaaaaagctttgcctcttcatttctggtgtatctcttttccttgattttattatgataaaataattccccattataaagttaatgcaaggaaaagtgactaacttggagatgatcacacttatgttgcatctctagaatttatttttatgtgaatcatgataatctataagcagacatctactttttttccccctagggcatacataatcttgctgctatgcttcgaagctgtagtctgaatcaacctaagttttaaacagaaggtgaacctctgaggtcagtttaaatagcagttggtgtgtcttcttggtgtttcctatttatttgttaactcttaattaaagttgtaagcgaagttacttttcaagggctctgataacctatttagccttaaaggagtctaaaggcgtacttgggaaactggacaggacaaaaaggggaggaagaaggaaacactgaacagaggttagaaaaaaatatatttaacttggaactgatacccaaaccagttgttggcctcatttgtgctatgtagtgcctattttgccatattctaataatgtcattgtaattgattacattagtgtaacttgaagacaggtacatttgactcataagtaaatcaaggtgacaaagaaatacacctcccataactcacagtgttcttcatttgagggattagtatctgccgcagatagaactatacctgtatggcattctgggaatgctgcgaagactggagttggaaacctttaaaagcctgaattgtaatcgccaattgtcctattagagttaatatctctattttttttgttatccaacttgcctactttttgtgatcctgcaatacaaaggcttgcttttatcttgtttttagcatacaggaaaggatcaatctagaaggattcatttagtaaacatttattaaatgcctgctatgaactaagccttgggatacaaaaataaagaagaaaccatgccctggttatgtgagtcactggttcttgaacagggttgtgtatcagtgttggaataaagtacaaagatattagacttgtaagacttttaaaccttttattaggaatgttttcagactagcttacagaaaagttgggctagtgtgatgattcccccccataccatctcctaaattaatagttattaacataaagtaccttccctcccatcttttccatgctatttatatgttaagaaaccaggtcttggaggctgtcttactttctggatttaataccgtttatctcatttctttatcctttaaaattgctttatattggaagtaaaatccaaaagctcagttggactcagttaaacatttttgatgagaattcttagtgattctgggagcatagtagacacctaataatctgtaggggtgatattttggcaacctttgaatttctgatttctcatcaacttttcttgtaaggtttcctgaattaatattttattacttttggcaatatgatagttttctaattctgttctacattcttcatttttttagctgtaattatttataaggaaaaatttttcttcatctgctgaagctatttggttactatcttaaaggaatcttgattggggagaaatgaaatcacttttttcctacaatcttcaaaataattacatatccagaaatttatattgtacaaaaaatagagttttttttaaagtcttttttgagctaaattcattgtgttatgcttgccaccaaattctgagaccagcattaacataaaattttctacctcgtttggtaccctaaaaattctagttgcctctggcaagctattgacaagaattttagacctctgatgaaataaatgtatcatcatataataatttctgatgtgaggttttaagattaaataactcactataatttttaaactatgtttaatttattgaagatagaaaatcaagtatattttaaaagaagggatgtgggatcaaggaggacagccttggcagcagtggcccttgaaccagcaacaatggatgcagtcattccagcaccaacaggatccaagtaaggaaacaaattgaatttgaaagggcggggttggatatgtggaaatgggtagaagacacatgatgggattaagggat

SEQ ID NO: 36730 - DNA, 2300 bp, Homo sapien
caagattgtgccaccactgcactccggtctgggaaacagagtgacactctgtctcaaaaaaaaaaaaaaaaaaaaaaactggagaattggagagtcggttataaatacccccccaataataatttaaaaataaatgtagcgagagcgcccaaaatgacaccctagtagcaacaagcacacctaggcacgagaacttggttttaataccattcttcaataaaaggaatcagagatctttaaagaaatagctgactctaggactgcgacaggaaatataaaagatgagtctggggcatgtatactgccaggaagcaataaagtgctaaaaaaaaaaaaattgataggaacatgtcaaaggagaacagtagacaactcgaagagctgccaatggccaaagctggtacaatttgagcaacaaaataaagaagtactggattataatataagttatgtaataaacatccacaagcccataaggatatgataaaataaactaacaaataaatgtgagggaagacacaaatctcccacagagaattccaaataaattatgtaaatattccaccctaactgaggaagagcacaactgtccattcagtaagcgtgggctctgcaaagtgacttccttccaaagagaacagtataaaaaggggtgggggaagtaactttacagtggataaatctaacaaacgctactccagaaggatgatcaaggtcagtaataatgtgataagtcaccttgatagtatgtatccttgatagcatgtgttgaaaagggcatcttacctctgtgatcttcccctgatatagtccgtaaggccattttaatcatgagaaaatcgtctggcaaattccaatagcagggcaccctacaatatacctgaccatactcctcaaaaaatgtcaaggtcactgtattagtttggtatgcttgccataacaaagtaccaaagactgggtggcttaagcaacagaaatttatttcctcactgttctggaggcgtatagtgtaagctctatggggttgatttcattctaaggcctctctccttggcttgtggatggttgtcttctccctatgtcttcacatgatcatccctctgtatcctactctcttcttataaggacagcagttattaatatattgggctaaggtccaccctagtgacctcatcttctttaaagaccctctctccaaatacagtcacgttctggggtactgaggttaggacttcaagatacgaattttagaggggcacaagtcagcccttaacagtcatcaaaaactagttaagcctgagaaactgtcacagccaagaatatacagcctaagaatatacaacaactaaatgtaatgtgatatcctagctggcatcctggaacagaaaaaggactttaggtaaaatgtgaggaagtaggaataaactatggaccttagttaataatttatcattattggttcattagttgcaacaaatgtaccatactaacatctattaataagaagataaactgtgtgtgtagtggggacgtcgtatgtgctcaacgtaaacaaaaactgttctaaaacataaagtctattagtaagttaaaaaaaaaaactctcaagaacatctttaaagaactgttttctctataagccctttgccactttacaaaaaaattccacaagtaaaatctttagtagtctggttgctgttgttttcgccctgctgcactcaaatgaggaattctaagtttattttgttttacttgggggcagggggaagtaaaaagatgtaaaagattaatgttgaattaaaatcttaagctagaatgttaatttaacaacccacaaacaaatttgtctaatgctcaatttgttcagatgacgatactatccaccacagggtaaaaaactgaaatattggatactacctttagcgaagcttaacacataatatccatcattgggtaagaacacacgaaaaacacaaactaaggaactgcgcctgcgtagtcagagcctcaaagggtataagctccaggtcgcgagcccccgcctcctccgcccccatgaacccccttcccacaagggggttcccactgcgcacgcgcagtgtttaacggccggtcaggaacccaacaattagtcccttctcgtccgagaggaaactctgtgagaagatgggaccgtgagcactctctttaacaaggacatttccttttcagcgaaagcagcgctctgatttaccaagtctggcggaccgcagcgctttaaaggaatgaggttccagcggtcgcgccaagcagcgtacgca

SEQ ID NO: 36731 - DNA, 2300 bp, Homo sapien
atgtaaaaatttctgtgtgcaaagcagatgctggccacttggagggcagaggtgagggggaaatcccttacccgaaaattgcctcacctttactagggaaacaagcaaagaattacaatatgattatagagagtaggaacatgacagtttcactaggccaatcaggtttctctaagaagatagaacattcctctgatgagaatgtttctcagagaattaaacttgaaaatcagacctgatgcaaaaaacttggaaaatgcacaaaatcacagagcaaaattagagattactgataacatgtggtatatgtccttctagtttttgctccatacagtggtttttatttattttattcttttgagacagagactcactctgttgcccaggctggagtgcagtggagggatctcggctcactgcgacctctgaccctgagttcaagcaattctcctgcctcagcccccctagtagctaggattacaggcgcctgccaccacgcccaggtaatttttgtatttttagtagagacggggtttcaccatgttggccaggctggtcttgaactcctgacctcaagtgatctgcccgcctcggcctcccaaagtgctgggattacaggcgggagccaccaagcccggcccatacagtgattttttaaaatcagactgtccagtagtcttatttgtgctaagtggaaattagggaaagggtcagagaaatagggatttccttttgccttcagtagtatcctcatgaacctgcgtcatggtgttgttaggtgtaattaatgaaggtttctcacaagataaaatgttattttgaggaccacgtccgtggattggaggaaaggcagatggttagctagtgacgactttattataatgctaattcaggagtatctgggtctctagtgctgaggaaaactgaattttcatgcaaagggcatctatattttcacatctgtatctttatccatctagctgtgctcttactattttgtttctacggtaatttgctatttcttttgcacgacaattgcccaatgaaataattcagatacttcgtgcactttgtcacgcagaagttttcatgttactctctggaaaggcacttcccaagatgtagctaataaacactgtatctttggaacatttttgttttccttttaacttgtagctcctagcctggaaattgatacttttgacacttgaacgttgttcatataaaaacactgtgaaatcaacatactgtctttgaggaatggcattgcatgcgtccttttgagaagccatcttgtagttgaaggaaagcagcaggacggaaaccagacttcccccccacggttccctaaaagtcacggataaagaatgaaaaaccgggactagttaagccaaggagagaagagcaagtgttcccggaagggggcgcgatgtgttgaggttaacaaagagaaagacagctgcggggtcagctaaggtctccgctttcgctaccgacccagactgctcaccttcacaaactcacgttttcctcaagcggcaccctcggcagcgctcaagtgagagtattccatccttggaatactccgagaaggttcgagccagaagttggattgcctgaaatgccgcttccagcgcactaagtaacttgaactgcgctaagcaactggccagaattggtttggtttggtttgaccctggggttcctccgtagtctgtaagtggagttgcgaactcaaccccttctccaaggcgggagtgtttctaggagggaacatacttccccttaaaggaagatcacgttgctaaagtaaaaaatttgaaggcgccctatgtgtagaacacttacgttcttggctttctggccactataaagatgggtcgggaatggcgccagctacgttaaaaagtaacgtgcaggaatggttcagttgcccggtgttgaccagagtagagatggttttgcccacaaaaaaaatggcgccgaaacatgtcaatccgcacaatcacgtgttcacaaacctggatgagagatggtatggcttcagatgacaaacggatgttattattctttacttccgggtgagacaaatcgggcgccatcttgtcttgttcccgaagaagtagaagcatcgaaagcgttggagaggtgttaccggaacggcggcgacaagggtgttcccgaactagagtgggtaagtgatggagaacaattatacgtgggcacttgccggaccattacaacgttcttggtttctgtggcgaaggtagcataacttaaaataggctgcgtacgctgct

SEQ ID NO: 36732 - DNA, 2300 bp, Homo sapien
cttgaacccaggaggcagaggttgcagtgaactgagaccatgccactgcactccagcctggacaacagagagagaatccgtctcaaaaaaaaacaaaaaaaggaaaaaaatacacttgatagaaatataagaggaatatatatagcctacagcttaacaaagattccccatatttccaaacagaacatgatggtaaatttaagatatttagcattatttggaaaatacatggttaggtaatcttaaggtaatctatatttttatttgatgttttgttataatgtcattgtaatagcactaaaacatacttactgagtaatatttaaaaataatttcctttctttgaataatccatcaagtagtaaattttacattcaattaagtgaaaaggtaaatgaggaacatcagaaataaaataaaatagtgttagagaattttccttaatttatgccaagttttgaaacaaagaatgaaatctctggagattttggttatgctaagggtctatctagtggaaatcaagatagctttgaattttgtcgtttccaagaaaatttaagtattgtatggtatttgataatttctaatttttttcttatgaagaaaagaacctaaatttccataatctaattcaatcccttttaaaaaatcaatcataaactgggtttccacatatattttttaaaatctcttttacagtgacacaattaagatgcaaattatttagatttgctcaagtttgcttgttcttgttcttccaagttctaggtcaaatccaaagttaaaatacatgaaagcttttgatttatgaagtagacaattttgccttcaaaattacaccacatgacctcttcttatttgaggaatattttctttttccctagggaaaaaaattatcctaaccccaaaatgatagtgtacctctatacctgtaacagcaactggcatatctgtgctcaattatgtttgttaaatgaatggtccttgttaagtacgatataagcaaatatcaaccttctttgccaagttctccacatgtaaatactgttagaagagtttttaaagaaaaatttagtgtttgcaattttaactctcgtatcttctgatttctacgccaatgctcttatccttaaagccacatttgtcccttggctgaagagttgtgaaagatcaggagacttttagaacctatccataaccagtgttggcatttgcaatatccatgattgaaacaaaatattttcaaaccaactacttttactaaacatgcaatgtgctggccacttcaacagataaccgggctttgaggaggtataggtgtatttcaagaaatgtactatctagctaggaagagagaaggataggtaagacaacagcaatgggggaaaaaccacaataatatatgacgaatgttagatgtgactttaagagttcagggggcggcgggggtgtgggggcggagccgggcgcggtggctcaagcctgtgatcccagcactttgggaggccggggcgggcggatcacaaggtcaggagatcgagaccatcctggctaacacggtgaaaccccgtctctactaaacaaaatacaaaaaattagccgggcgtgatggcgggcgcctgtagtcccagctactcgggaggctaaggcagtagaatggcgtgaacccggtaggcggaggttgcagtgagccgagatcttgccattgcactgcagcctgggcgacagagcgagactccgtctcaaaaaaaaaaaaaaaaaaaaaagagttcagaggagggtaacggagggaaatcggaggctgtttcagaaggtgcccagcaacaagtgggacttaagccggactcctgcaacatccgaggtgcgcacgctggcccaggatcctaacaaattgctagtcggtggctatgagtcttagattatcagggactctccgggctctgcggacacgcagaacgcaggcgccacgcaagccggccccgccctttcacccctccccgcgctcccgggccccgggcgcgccgcctggaaccctcccggtcctggctgggggcgggcgaacgaggccccacctctgccgggagcgggacgagcgcgcaggcgcagtctccccaggttgtagacgctgcggcccggcccggcggggtgagttgagaacgcggcgctttggtcgcagcggcggtatggtcgccgcagtttctcggtcttcgcttcggcgaccttgacccccttgtgggtgggcgaggctggaagagaggctccccaccccactcggcttcctgatccctgggggcgccggg

SEQ ID NO: 36733 - DNA, 2300 bp, Homo sapien
gaggcaggagaatcgcttgaacccgggagccagaggttgcagtgagccgagatcttgtcactgtactccagcctgggcaacagagtgagaatctgcctcaaaaagaaaaaaaaagaagaaaagaaaagaaaaaaaaaaaagaaaaaaagtcttctttccaatagcctttcactaacacatgagtaacaacaaaaaattaaattagttgtttgagaattaatgattcatatcaactcagcactagtaaatctttctcagaaaagtgaaaactatttctccctcttttatcaattttaagtcttgcttaaattattccttaacaatgatggaataacttggacacaatgatcaagataactaggaacaatgatcaagaacctcttttgacaagatctttttgctgcaaggactcttaaataaactaagtttagcagtgtgctatatatggaaaggcatatttatctcctcagaaaaaaaagtcctacataaaaatattttttaaataataattagttatgagccctaaaagaataattgtttagtaatacttctcctgcaaaagcagaaatcagattaaatattattcagtgaggccaagtatattgtttccctatcttgtgttcatactacctgtgatttatgatgtatatttagaatgaggatgccacagagactacatgaatctacagtatatagtgatatcttagttaaaagtgaatccacaaaataaattacacggagactatggttaagctccaaattatttggaaaataattataaatgatgtcattggtctagaaatctgaaatggtttatagcttattaaattattgataactgaagaatttaaaagtaaatgcttaatgaaatgattccttggacatacactttaataatgccatttaaacatgaatattttaattttttttttgagatagggtctcactcagtcactcaggctgatcacagtgcactatagcctcatactcctgagttcgggtgactctcctgccttagcctgctggtaactgggactacaggttggaaccacagcacctggtcaaatattttaatttttaactgtaaatctatttgcagttaaatatagcttttattatgtttgggaaccaacctgagaataaataaaaaataagataatgagaaactttatgtggtagttttaataatgacctcctgccccaaagatgttcatgttctacaaacctgaaacttgtgaatgtgttaccttaactggcaaaagggacttcgaagatgtgattaaattaagtatcttgagatgagaagattatcatggattatctctgtggtctgaatgtaaaggtccttataaaagagaggcagcagaatcagaggaagagaaggagctgtgataacagaagcaggagtcagaatcagggatttgaagctcaaagctgttggctttgaagatggagaaggaggccatgagagccaaggaatgcaggcaaccactacaagacagaaaagacaagtcaagaaattctactctggagctcagaagaaacacagccttgctgacaccttgattttagccaagtgagacttctaatctacagaattgtatatagtaaacttgtgttgttttaagccagtaaatttggggtaatttgttacggtagcaataggaaactgacacatattatacaatagttggacataaccctgacaaagctatagtcaaatatcatcaattcgtggaggaaagatggtaatatgacgttattttaatgcctacatcagttgagccagctatcagagttaagaacaattcctagaaaagttatccatgtagtcagtctgttttaaacaaatccagtgtatgaaaatcatgttataaggtaaattggaaacgtttatttcctttaactctttaaatgtgtcacactttttgctttctatttttaaactttgtgtctcctacaaaataataatcaaaaacaaaaaaagtaagcataacccgtagtttctttccaaatgcctttaaagtttcaaagcagtaattacaccttgcggcactacccggttcggccggtgcctggctggagggcgccggagagcctggagcagggcgccaggaggccggagcaggaggagaaggagtaggaggaagtggtcactagcgcggcggccgccggcccgcaatggtgctaccctggttgctgctcgagactgcgcgcagggcggtcctcgggtccgcggaggctgcgctctgcggtgagcttggtggtccctggggaaagggagagcgcctaaccttaga

SEQ ID NO: 36734 - DNA, 2300 bp, Homo sapien
ttcctttcagaatgggcagtatgtataaatcacgaaggaaaggcagaaatagatattgattgattgcactgtatatacattaccttacttaaagctcataggtttaaatgataataatattcctattttacaaataagaaactaagtcctacaaattttaagtaatttctgtagggttacagggataagtgggtaagccagaatgtgactctaggtttatctgactctaaaatcccttctcttttcattataaaactgtatttagagcacacatatacttttttttttttttttttttgagatggagtctcgctctgttgcccaggctggagtgcagtggcgcaatctccgttcactgcaacctctgcctcatgggttcaagtgattctcctgtctcagcctcctgagtagctgggattacaggcacgtgccaccacgcccagctaatttttgtattttcagtagaggcgggagtttcaccatgttggtcaggctggtctcgaactcctgacctcatgatccgcctgcctcggcctcccaaagttctgggattacaggcgtgagccactgtgccccgccaggagcacacatatacttttgatgtagctggaggatagagcaattggggcctaagaggagaaatgaaaggaggagtgggtttggtaaactgtgctggtaaggggttgttgaaaggcattaaggaacatactaaggagcttggattctatcctgtgatgtaatgctgcagtgacatccaggtgatgttaagtctactaatgtggaaaccacaaaactggaggttattcaaaggttaggctgaaaaggtaaaaatcaggtgcagtctgtattactcttgaaaatccctctagagaaccacacatcatctctcagtaaatcccaaatagccagtttttcttcaatataggaacagattagtgtttctttgagcacaagatgaagtggttgatttgcaagtggagcacatgctgtacataaaaacacacactattggctttaaataattagtatgcaatagaggctcatatcatgagaggcttgggggagctgagcctcatcaaacaaataggcttacttcaggcttttgctcactgagtgttcactggttcgagtgttcactggttccagtgttcactggttatttcccccatcctccacctcccaataggagtataattgaattatagaaagttaaatatcagttagatgactacaagaaaaacataactatttgatccagttaaagaagttacttgctgtcactgtctttcacagtggctaagagccagaatcttgagtttaacataaattataaaattaccatagttttctagttcctaacaatgagaagcagtaatgagcattaattcagcctgctggctctttatattctgggaattcagaaaacagctagctggatgagaaacagtttgattccaggttaagatctaatgttgtagacacagtgaatcaacttttcaaatctgaagggggtgaggaaacctatatttttatttttaagttttgtttattgtggtaaaatatgtataaaatgtgattttaactattttgaatgtacaattcagtagcattaattatattcacagtgttgtgcaaccatcaacactttttatttcagtgcaaaaattttcatcaccccaaacaaaaactccccattcctcctccccccacctcctgacaacctctaacctactttctatgaatttgcctgttctatatatttcatataaatggaatcatataatatttgtcctttgcatctggcttatttcactcagcatgttttcaaggtgtatccatattgtagcacgtgtcagtacttcatttttatgactaatattccattgtatgtatacatcacattttatttatccataatctgctgatgaacacttgggttgtttccaccttttggttattgtgaataaatataagcattagtgtacaagtatttgtttgagcccctgttttcatttgagcatatacatgggagtggaatagctggaaacctgttcgtttaaacctttatagctatttgtccatttttatgttactttcctagccatgaaaatgacagatgaaaatagaaaagtgtggctggtctgaaggtaagtgagttacctcaattgattgtccagtcagttacagatcgaacttgttctactctttccctccttctcactactgcacttgactagtcttaaaaaaaaaaagaaataaaacaaaagagtgtctgtttttcataagaagatacgcttttt

SEQ ID NO: 36735 - DNA, 2300 bp, Homo sapien
tctcactctgttgtccaggctggagtgcagtggcacaatctctgcccaccgcaacctctgcctcctgggttcaagcgattcttgtgctgcagcctcccgagtagctgggactacgggtgcacgccaccacactccgctaatttttgtatttttagtagagacagggtttcaccatgttggctaggctggtctcaaactcctgacctcaagtgatccgcccatttcggcatcccaaagtgctgggattacaggcgtgagccaccacacctgatgcagactaattctcacatacaaacaaatgcatttcacatcttgactgtgtgtgtatatgtgtgtttgtgtatgtatatacacacatatataactgaaccaaatttaaatataatatccttgctatttctgatttacctagtattttctgttctatttaggaaaatgattatacttaattttaccacaccctaattggtctccacctacaatgtgaaaaatactgtcttaagttgcctcagatgctgactgtctataaacaagtttctggagtgtccaattatttagaaaaataattataagttttacaataaatgcattgctacaatgaaaatgaaatggaaaatacaaaatatttcgtcttgtaaaattaaattatggctttttttgcagtatgtttctattaggtgcatacatgtacatacatgtgcatacatatatgcatgaatatttttagatgttctgcaaaactgttgattccgctgctctgtaagtttgcactttatcactccaaaataactccattaagatcgcggccgagatctcgccactgcactccagcctgggcgacagagcgagactccgtctcaaaaaaaaaaaaaaaaaagatcgcggccgggcgcggttgctcacgcctgtaatcccagcactttgggaggccgaggtgggcggatcacgaggtcaggaaatggagaccatcctggccaacatggtgaaaccctgtctctactaaaaatacaaaaattagctgggcgtggtggtgtgagcctgtagtcccagctacttgggaggctgaggcaggagaatcgcttgaacctgggaggcagaggttgcaatgagcctagatagcgccactgcactccaacctgggcgacagagcaagactccgtctcaaaaaaaaaaaaaaaaaaaaaccgcctgatccaggccgggcctggtagcccacgcctgttaatcccagcattttgggaggctgaggctgacggatcacctgaggttaggagttccagaccagcctagcgaaatcccctctccactaaaaatacaaagattagatggacgtggtggcacgcgcctgtaatccctgtaatcccagctacctgggaggctgaggcagcagaatcatttgaactggaaaggcagaggttgctgtgagccgagattgtgccactgcattccatcctgggtgacagacccagactccgtctcaaaagtaaaaaacaggcagggtgcggtggcttacgcctgtaatcccagcactttgggaggttgaggagggcggatcacgaggtcaggagtttgagactatcctggccaacatggtgaaaccctatctctactaaaaatacaaaaattagctgggcatggtggtgcgcgcctgcagtcccagctactcgggaggctgaggcaggagaatcgcttgaactcctggaggcggagcttgcagtgagccgggatcgtgccactgcactccagcctggagacagagcaagactccgtctcaaaataaataaataaataaagtaaaaaaaaaaaaggaacacttgatccctgagaacaaagtcatcttcatttatttctctttccaatcacaggaaaaataagtcacaaaaccttgtactttattacaatgccacattgttctgtttttgaagtcctggaagaggtaataacagaaccccgtatctgagccacttcgcctaggttagacccactcagcaactcccgtgctgaagacaggagaccgagcggcttgggcccccggccagaattctcaagacgctctcgcgagagccttccaaccgccgcgagctctcgtgaacactagttctcttcaatctcagcacctccaagggtcagcacctcccctccggctccctccgctaccgcgggccggaacttttgtcgataggaacgggtttgcacagttgagtgttgtcggccggcgtgaaggagactagggggccatcctcttcctttcgccgtcgccgccgcggagcggagtcgagccgagctgatttgatcgagga

SEQ ID NO: 36736 - DNA, 2300 bp, Homo sapien
tttaaactgggtgtcatcccagagtcgccaggccagaggttagagggacatgttcatggcttaaatttattgccctgactcttcggagcggcttcctctcctcctccccaccccccggcttttgccattcatgggccgctggatcaaagcctccctctgctctgttgagggcagtcttcgcagccctcagaagcgcaattggaggcttctgaggaaaaatcagtggcagctccctcagaaagtgacctgggcatagtgtggctgcacggtcccagaggccacagtgtgtggccctccagacctttcaagcggctcttctctgcctcggcagccatgtatacacaggccctggagttggcccgaggccagccttccgtgtgtcctctcatggtctgacttgagatgcttagacttgaaacctttggcctggcctggattttcccattaggcaaacaaccagttttggagcttctagaatgcacgcactctacagattgttgttacaaaccgaagtgaaccacggagaggaagcaaagggtctgtttgtatccatcattcccattttacagactgggaggctgagcctccgaagcaatccactaaaggttccccgagtcttgagtgggagagcacagggtgaatgatcctgagtgtcctggtcctgcccagtgtggtgaacataggtttcgagtgaggggcaccacacggagcttctttgaagaccctcctcagataaactgctgagttgcaggtgtcgccaccttgcgtcctgccacccttgctaaccacaatcgctccagcactttcagccgacaaagcctcgaggagaagctagcgtgggcgctgctgagggccctctgcccttttgtgcagtggttgggcctctggcgctaggcttggaaatacaccaccactcaggcctctcttggaagaactgcatcgggctccggtgctggctgcataggatttggggagctgtgctcagaactagcagcacgcggcaggtgccggcagaaatcacaaatatctgatgaacttgattacttggctactatttatgaaaataaatgttctcacgccaattggaggcttccctaaaagaaaacgggtagctctccggtttaactctgaagtacaacgtcttgttagttcacaaagtaggtgtaagaaagagttgtcccaaacgcccacctcgcccctcttctctacaacctttaacagattgcggtgattttcgtttttgtttactgttttttttttaatagaaaagtccaggttgctggttttagggaagttagtccaaggacatcttctaggggacgtgatcaataacccactggtagaacttcttcctcttcaaccctgggctgcggaccggggcgcaggatccccattcgaaactgttggttctggggctgtttcccattctccagagaaagtgcaggcccggggtgtgcccgagaaaagtgatgagcagttgacctccccttctcaacttggtctggaggcttcatcatattttcggacgaaatgggacagaagtgagaattaaagcggttctgaatagacgactggcctgaacccaatcccctgaaatggtaatatggttgttatttaaaaagtgtaggtattttctggtgttttcccatcaagtacctgcctaatttctgtatggcacacgccagaaatcaatagtagttaacaagtcctccaaacagtctccatctctttgtttaatctcctttacaataaagccaaggggagagaattaaaaatctttgaagtagatcaaggctcaaaggaatcagccaagtagacttaaagtagtcacttatttcccaaaactggtttgtcggggaacaataaaaggaagtaaaatttatggagaaattatacagtggatttgtcacttaaaatatcgtaactgtctggaggacaataccccatgctgaggattaatggtcccgccggacctttgattcaccagtgccttttcttcgcccttgacaaattggatttttaggaatgggaaggtcgcctggaccattgtgtgctagccattcagcggcctcgattatgcagggggctgagggaaccactccatgtgaccctctcgggtgggactctgcagctgcttcgcagcgcaactctctcaccaaactccgcgcccttgcgctagcggtgccaaaaggctcccgccccgattgaaaaggcgcagtgcatgcccgcccgcgtcactccgcgggcggaggacgcacgtcggggcgcggctctctggctagcgcgcagctccagctctg

SEQ ID NO: 36737 - DNA, 2300 bp, Homo sapien
tttatggaagagtccattctttcctcacttctctaaagtgacatcttttcatatatcaagtgtaatatatatgtatgggtctgtttgggggctctctttaatgtttccttgacctatttgtctatccctattcaaatatcacactgtgtagattactgtatctttataatttgtcttagtatcaaataaattaagtccttctatctgattctcttttttcaagagtttatttagtattcttagccttttatgtttaaatttcagaagtagtatgttatcatctttcacagaataaaacttggaattttattggaattgcattgaatctataagtcagtctggggaaaattgacatctatagattaatgagtcttcaaattcattaacttggtatttttctccatttacaaattttctttaacatcagttaaatgttataatttttccagtagagttcttacaaatttttgctgagtttagcattaggtatatatatttttaacaaatgttaactcttttaaactttctttttctaatggtttgtagaaaatatatggaaatataattaaatttttgcttgtttttatatccagcaaacttactaaattctcttagagttacgtaataacaactctgagactttcttactctccaagtctcatacatcctatttttttcttcccccattgtactagaaaagtccaatattgaagaaaagtggtgatagtggacattctttcatgttttgaaagggaaatgttcagcatttcatgattaaaattctcttcaggggagattcaattatcaaagtaacatgacagacatgaaaaggaaccaaatgaaaatgaagaacatttttttaaaatcacatctctctctcaattgatggaaaaagcatctttaatattaaactaaaaatctactgatgataaaaaatgcttgctgaactgggaatagagggaactttcttaatctgactagataaaatacacttaattatgaagcccctgaggctccagctcagaagagggtatctcctgtaagattccccagcctcagtaggccctggaccctgatttttctctggacttcatccagacatggaaccagacttcaaatgttatgtcatccataagtgccttctaaatcaagatagcattggtgcttcagtattccacttacttttcaagatctcattcaaaacctagccagggaatgcccactgatttttcagaccttgagtatttttaagttgctgtatacacacacgcagacacacataaatataaatacacacacacacacacacacattttgtccagcatattttattttcagtgggaagattaatctgagtaatccaatttatcatttccaaataccagacttagatgatatttttaaaatgtcttttatcaaaagtttgatcaagcaaataattttctagttctattttgctttatttacttgtttattttttggcagtgagcatttggccttgaatacttctttgcacatggtgcctccgctggctacaacgcttttcccttcccacaactctaatttgctgagctaactctccctcatgcttcaacatagtccaataatcacatcaggaggtcttacccattccatttctaaacaatccgagttcagtagaccccatgcattttatagcagacagagaggatatatttaacaacataagtgttacaagaatactagccaatatgaacagatctgcaggccaataagaatagacgtgatctgtaaacaaccaggaccagtatatactagctaaatatcacctatgctcaaagcatatagtacagtaagatgtggtaagatacaaagattatcatgatgcttctcaagttgttctgtaacttgctgtttacctatctcttgtggtaatctgtgagattactatgaacagggaccaatcatactcaccctgggatcctgtgttccatggaatcttggttttaaaaaagaggttccaaaaaatattatttgaattaggtaaaggaagttatattgagggaatgttcactaaataaatcacttcctattacttcacagctttaatccctggaaagtccacgaacaatgaatccatttcatgcatcttgttggaacacctctgccgaacttttaaacaaatcctggaataaagagtttgcttatcaaactgccagtgtggtagatacagtcatcctcccttccatgattgggattatctgttcaacagggctggttggcaacatcctcattgtattcactataataaggtaaggaat

SEQ ID NO: 36738 - DNA, 2300 bp, Homo sapien
gaattaatgagactcaccaaaaatccttgaaccaaatgaaagtttttctgataagcatagtcagaagtctgtagccatagcaggacaacaccaggtcagccggagctctgcccacaaatccacctcccagcacataaattgccagtaacctgaagagctttgtctgacaaacttcccagtttccagctgagaaaaaaaaggcagggactttacaggggtggggttttaactgggcattctggctctcctactgctatctaaagaatgttacctcatcagaaagctcaaggtccagggtgagaattaggtgggattctatttctggttcagcctctgtttcactgtctatggtttactttaacttttaacctcagtttctttattagtaaaatgggataacacccatcttgtgtaccttccaattattataaaaataatgtaatgataccttttaaagtatgcataaaaagtggcaccaaaatgtaaggtaaggccacatatcctccattgacaccaatagaaattgtcaaacttaagcaaggatgcaattaagcctcatatgctaatatttccctaaatagtgacgtctagcacaggctttttagccaccaatgctccataaaacacaatacaatatattgggctagaaaaaaaaagtattcttcacttttcaatttagcaacaacaacaaaatgagatttattcatccttcatttagagtacacaactagatagaattcgtcaacatcatcatcctcatcattatcaatcactggaacaaagaattgaagtagcaaaaattggcattgccaatattcctgtcttttttaaaatggattgcctacaaatgagaaattcaagacaagccactctgagttttctttgaaacgacttaacatttggtcagggataggaaagttgaacaggaaaatgtacatcaaaattttaacttggaaaaaaacataaggtgtataaacttatagtggactgaatttttatattattagagaactagaaaaggcttttccacaagggtattgtagagggcgtttagataatcagcctaataaatgggtcaagtgtttcttcttgtttttctttcctaagagatgctttgaaatctcccactttgaaatccaaattctctttaaatttaatctcccatcctcatatctccttgatttttctgagagattttagagatgatgtctttttgcacaaacactaactctaaggcgacttccagttctgaaatgtataatcattgactctacacttgcttttaaaaattctgatctgttgaattttgaaattttaaccaatttcactaacctttcaagtttttctcattttcctaacttaatgtgaaatacaggacattttgccatgccactctgactactcatcttatagatgaaggaaggattctgaaaggtgctctaatgactataattatcatagggaccacatattgagcactaactacatggcaggcctgatttgagggcttttgcatatgtcaagccagtgaagcctcttagcatccctgggagggcagttttacaattctggtagtaccaaatgagcaactgaggatgagaaacattaaagaacctgcccgaggtcatatgcctaacagtaaatgataaagctgaggtggaatgcggggcgggctgcctgtctccaaaatcgtatgaggctcccttgggtggaaagtgatccaactccagcttcgtccttgtcaccttatttgctaagtagctactaaggccagcagatttgatcagggtgcaagcatgaagctaaagatcattataaagcagttgtactgggtggattaaaagttcgtgaaaacaaaacaagttccttggtggtattatgggtttcttctttcctctctcctttcccctttcccttcctttaaacctttggtacatcaataaacacttgttcatataaaatggaggtcgagtttctattactgcttagctgaaaacacctacaaatgttcacaggaactttagtgactaccagtctagataagcacttgaaaataagaaagaacaagctccgcgagagcagagatgccttcagattttattcgcgaaggcaccccacgctcctagaaaagagcacgacgcacccgatgctcggattggatgaagtggcaaaggtaaccccgctggttcgggcgtttggctgttcctgtgcctggacccccgctttggaaatggaggtggggctggctcccaacctgtctcagagaccctcgcactcctcccccaccttccgtcagctgg

SEQ ID NO: 36739 - DNA, 2300 bp, Homo sapien
actgtatcctttctgtaaggaataatcatgttggacttttgtttcctgaaacaaaacccgacaaagagttggctaatgtttaagataaaggactgttgggagctatgtatctctatatcaatcattctattttgccctgaaatgtaagcttttcccctagtgtccccctagctgctccccataggaaaactccccggccgagtttccacggtgaaaaaaatcagccccaaacccaagccatttcgaaaaagacgcacttctttgggattaatttaaagacagttattgtatttatttcctctggcaatgaattccgtgtcgccatggtttcagagaaacgagaaagagaaaataactccccaaaccggcctcgcgcacgccgtcggccagcgactgccagcgggatgggcctttgggcgaaccctgcctcctccgccggtagacctaacccgcaggcccgacctccgctgcctccggacgttcccggttctgctgggccgccgcgctggactgagcgctcaaccacccgaccccagggagctcgaggagcgcgggtcgcgcacgacgtcgggaaggcccaggaggccgcgagcagcggcggcaaccggacagcgccgacccggcaccctgagctcattaggagtccagcggtcccgcgggtagtaagattcagagcccggagcctgggcgcgcggagggcggctcggggccgactcgtgtcactcagccctattggccaatgagcgcctcgcccctggccgcgccaggccaatgggaggcgagggggcttgtgagtggcattgagggagggcgggagagaggcggccccggagtgaagttgaagctaaacccttaagctataaagaagttacggggggcagttttcggcttccaattaggaataatagtgaactggcttcgtagcaactacggaggaccaggattctaaaatcacctcactcgtcccaaagcttgcatcctcctctttctgccacgcacccctcctccaattcatgatccagaaaagggagccgggaatgctctgctcctctctgccggtgggaagcggagaggccggcggtgtcgctgggttggacggtaggcatgagaacagttaagagatgggcgcccccgaaacctctgccgcttgtggggactgaaggtaggtgaagcagaagacgccccgcgcccgcccagcagccccgcagctccgcggtggtgtgggagaggccgcggcgcctcccacccccgggggagcctgcgaggggctgtcgcgagcgcgccacctgttaacctggcgctgctgggccccgcttgttgcagcccctgctgggcagccagagcgctgggtcgccttgggagtcccgagagacttggtgtgtaagtgtcactttttgaggaatccctcagacttgagacccaagttaaagaggtagccaaggtccagatctgccaaggtagggagctgaaaggcccctgcctcgccttggaggaattctgatttgcggaaacctgctttcctgggacgtgcgcccggcctgggcgcggactcggggatccgcggcggaagatcccttgcgggtcttcagaaatatgtattttgttgtttgggcaacttcccaggggtctggaggatgcggctggcatgggtgagggaatgccagcattatttgcagggggctgtctcgctgccgatttacccgtttctttaaaaacaaacccaaaacgcctggctaggcgcactgaggccctttccggccgtgtttttggaattgggacgagtgtgtgagtacttgtggagccgctgatctcttatgctctgatgctgttgtcttcacagggccttgaaagagttgtctggggttcctgctcttcccaaaggggctcggagataccttaaatgccgcgagactgaagagcaaacgtcagggattattatgtcgattttccgaggaccagggttcgcagctggcagtagaagaaaaggctggctcctcaggggtcccactggcatttgataccctgaacgaccctcaggattgcccaaattcggtggatcgcccaaattcggtggatcagcaactttcctatactgcatcccgaattttcaaagaacatattttccgttcacccccgctggtcttttactgccatcaatacactgttcttggtgcaaatacttcagcctctttattcaaagtatgttttatgtttttgccaaatatgatctctaattgaaagtttatttttggttttggatgaatctgcggagcttaagttgtgagaagaaagggggaaca

SEQ ID NO: 36740 - DNA, 2300 bp, Homo sapien
tagccctgctgccctaacaaaactgattatttggccctttttaggaagtaatgtacagtaaatgctatgatcagatttgttccctgcaatccaactgtgatttattttctggtttctatgttgatgaatagtaatttagagatacaatgcttggtttctttgttttttgttaaagctaacatcagaatcccagtggagggggcaagtaccatgatataattcttgtaacatgtgcattttccctgttcaggcaatgctggacgtggctgcaaaccagggctggctggtgactgtcctgaatatcaccaacctgattcagatggtgatccagggtcggtggttaaaggactcttctcttcttacactaccaaacatagaaaaccatcatcttcaccttttcaagtaattgttttacttttcaatgtaattgttttgttttgatttcaaaaaaatattttttatatatgtagtcactgaaattttatgttatggagaatactgattattgacatggaaaatactcctgtttcccagagtgagacatggccaagtgacgtaacattcttgtttggaatttgatcatcagtcccaagctgaactacagtttaaacttctcctatctaaatcattttccatttgaagcattggaaacatttttatgttaatgtgtttattcttttataatatcaatcttcatttaagaagatatcattaaaatgctttgtgatctaaagcaaaataaatgatcaatgtctgttatcgttgaggagatttgagatatctgaaatccattgtcaaaagtaaattgtgcatctgcaaaatgtcccaaactaggtggttatacatattaggagctcaagatataacctatacgtaagagtttatgttagcaccaaacccgtaagtctcatgtacatgactgaaatatgtttgcagggaaaagaacagtgtctaatacaagcagggttggcaatgtttaattggaaatgtttctttcacaccagtgtttcacgccagttaagagatactttgcagccaaaatattggttcacagtcatgtagacaagcaaaacaatctggccgtagcttgccgtcatgcactccctactcctgttcatctggatgaggggtggcagttatttgagacatctagacacagatgccaacaagaacctcaggcacacagcaagtctcctcaggaaagtccctcaatttgacttaaatatattgggttccagggcagttgtctccatagtacttgggttcttaccatgggatgtccctagaaactaaaagacactcagagagcgtgccataccagcagcagatggcatggggagaaaggcagataaccccctgtgtgtctgcagctcagtttcaggagcccttccagtatggtataaaagttatgggagtagggtttcagcagtaaagaacgcacattagggtactaccacacgtagcacacaggtctgctatggtagctgcttggggcctaagagatttgatacagttttcacagcactcttaagagtgctgtattaatgtaatttcaattatatttttcttcttactggaaaatttatgtggcctgtgtttctgggatctagcactacttatgctgtaaatctcaaaaattctcaaaatgaacttttaactttatgttcccaacaacttataatttaaaactttatttaagtaattatattaaagacatttgctacactcattaagcacatgtcaggggtccagatcagtacttcatctacatggaagcattacttcacattagtgccttcctgtggaaagacacccaatgtctgtgaaccctaagtatttactgacttcacataaaattaatacatttgatgcagtgataacagtactgccttgggctgttatcctatacagaatgctggctgaatttttaaacttagcataatggtcttaaaatgttatttcttaattaaaacaaaaaaagctataattatataaaccaccattgtcagaaaatcttctttgtgctgtgaaacaattatttggttggtttgatattatttcctaggaaatggaagccgattatgaagggcccacatgctaggggtcggacctccatcgagtcccttcctgaactgatccatgcctgtggagggaaagaccatgtatttagctccatggtagaaagtgagctacatgctgcaaaaacgaaacaggtaagaccatctcttaagtgttttgaaggctcccctactctgagaaggtgtaccaagagttttctaacttagagcatggattttgga

SEQ ID NO: 36741 - DNA, 2300 bp, Homo sapien
ttccactgtacataacatagtgtttcctctggctgcttttcatattttctatttattagtgattttgagcaattcagtagtgatgaattatggttgtatagttctcttcatttttctttggttgaggtttgttgaatatcttgaatctatagatttatagtttatatcaaattagaccttttccagtgactatatcttcaaacttttttctgcccttccttccacactgtgcattaggccacttgaagttgtctcacaactcattgatgttgtgttgattttttaaattcttttttctctttgtgtttcatttttaatagtgtctattgatgtctttaagtttacaaatttcttcaatgtgtattcttccattaataaaattcagtgtatttttcatctcagacattgtaattttcatctctagaaatttgaattgagtagttgtcagtaactttttaaatatgtaaaatacagttgtaacaactgttttgtctgctaattctaagatctatgtcagtcctaagttttcattgattgattattctccttgttatagatcctcttttcctgtttttttgcatagttgataatcattaattggatgacatacattgtgaatttcaccttcttgagtactgtattttttgtattcctataaatcttcttgagctctgttctggaatgcagttaatttacttggaagctgtttgatccttttaggtgttgctttttgatttgctgggcaggtctagagtaatatttgtcgtagagctaattattctccactacttaggcaaggttgtcttcatctcctcaatacaggtagtcctccaggtgtacctggattctctctcactacaccacagtgtggtaacgctccatgcagtaagctgaggcaatgctaagggtcacctagtttgttttctatatatcagagatcattctctttcatagttttatgttcagcatctggaagaccactgtttcataggtttttgtcttttttttttttttaattttttggaggaagttggcagttgcagtaggaggataaatccagcccctgtttgaatattaacatatccaattaatgctatgtctgatgtaggattcatatcaacatccatggacaatctcaaataactacatatttggaaaaatatgatgtttgtttcacaacaaacgctaataaatagatcagtctattttttaacagaacagttctagtttcgcttgtaggttcaattggcacttattgactgatatcatggagactacttttcactactgtaccctaaaaaatctaagatgaaaaatcaaaacattccagaacaatctaactctctgtatgatctaattggttacaataaatagtaagtaataattctgctctttacccttttctcatcttgccaatcttatccttgcccctttctccagccctgtcttatttcttccattcattcacaagatcttaagttaaacatcactttttcagaaagctttccctcaccctctaaaataagaaggtcccccaaactgaattgccattcaacactctgtacttttaccatatcgtaacatttattacactttatataatttttttatctacctctcagtttctggttcactgctgtggccccagtgtcatgtatagtgtgtgatgcctagtaaatactctgttatttttgttgactataaatacaaaggaacattcatgaatttcacagattgtacgttattcactatcattaatacattgcttgtgtattaatgataatattgaacaagcaaaattctaagggatatggttattgtatgatttttctgagccatgttttaaatgtcagtaaagctaagaagtacattaattattatactttgatccaacaatgtggggctttttttttttttcaggatgcagaagaatatacagatttgccagtgagacacaatgaagatcatatgaatagtgaactggcaaaatgtcttcccattgaatcaaatcctcattcatttgacagccctcacaccaaagcacatctcctgctacaggcacatctcagccgagccatgctaccctgcccagattatgacactgataccaaaacagtcttggaccaagctctcagagtatgtcaggtatgaaagtcatttctaatacctatgtgtgttttctcccatcattcctgccctcttttttctagttttaggataaaatgtacttgcatttaacaactttatggtagcattgttgagaaacaactggttgatcatatcaagaatttccaaagtaa

SEQ ID NO: 36742 - DNA, 2300 bp, Homo sapien
cttcaggttctctatatctttattgattttttattttggagggaagattggcttgacctgacaataattgaagtatttaaacttttactttgatgttagacttgtcactttctccttgaggtctgtttgttttattttgagactatcctagcagtgcatacaaattcagaacttttaagtcttcttagtgagctttatcttatattattatgtagagaggttttttttaatcccttcctaataccttttgttttgaagccaattttgtctgatctgatatttttgatagagccaccagctacgtttggttgtttgcaggaagatcttatcctatcctttcagcctttcctttcctatgttttcagtgtagcactagtgttttacttttttgttattttgcagttcatcctgtcaatcttttgagaggtaagtttaatttgtatttattatgattattgatatatttcaatttgtttttatttatcctgcattatctatacttagtctgtgacagcatgcatgggttatttcttcaagtcttttccaggttatcacttttatttttagctgttgcttaacccatctgttgattgttttaaaatttaacaagtatatatttttatttctaaaagttgtattttcaaatcatcctacttgtattttattattcattattaaaaaatttctattatagttgttatagatagatattttgtatctgattattctaatatataggtcatagatttttccaagtattaccctttttgataacttcaggaatacagtagtcaagaggaacagcaggagcagagaatagtctgagacattctgtatgtctcccctttcccagttctttccttcccacgttggacattttggtgtagataattcttagttgttggggagctgtcctctgcattttatgtttagtagcatcattggcctctatccagtagaaatcagtagtccccttccacctccctgatagttgtgacacccaaaatatctaaaatattgccagatgtcccatgtggggcaaaatcattcctagctgggatgttttaaagacttacatagcttatgtgacattcttcagggagccgtgccttatagatctgtagatagtagttgtgttataataagcaatcttaaactagtacagtcctccaagagtctttcatagatcagggctctcctaatagtaaatattattaatctttttgcctggaaattgtttagtcatcagcctgttaaggaggagattagaccaggccatctgaattctctctttcccggtatgttcttccccctcatcagctgttttcttttctggcctgttgtccagtctgttaccatttttgccttttcttcatttatcttccatttattcattaacagatacttattgagtaccaaaaatattctggttctgttgtctatttgctggggagattagtaaaatagagatctttctgtcatgaagcttactttttgtgggttgaaacaacacatacgttagtaaataaacaagaaagtgtcaaatattacttagtgctataaaaagaattaaaattttgggctttgatagacagcgactgggtcgcctgttttagatggggtggtcaggaaaggctgcatcttaggaggcatcttttaagccaagagttcagtgtgaagccagctatacgaacatcaagggaaaccattccaagcagaggaaaccactggaaagtggtgtaatttgaaatcagtgagcataaaacaaaattagggaaaaagatgaacaggtggtttcatctctttaaatattattggcagtagtaatatagtatttgatgcctgtacttgggaatctacagaacccaattttgaggaaatgtttgtttctttttcctttctccaaccatagctaatgctttttaaaaacaaaaaaacttcatggatagaaaatatgtcaggagaatttttcaacgttgataacaattgctttttaaccaattttttccttttttctcttgtacaagctaatttgttgagtttgattacctctgccacctcttccgaacagataaatatcatcttgttttgtttcagtttcaggtttcttgctgtatggatcactgattgaataatagatggctttacctcgtctcacaggagccttgcgttccttttcaaatgtcaccaagcaagataattataatgaagaagtggctgacttaaaggtagatttgttaaaggtagaaatgttgaacattattataaacacagactatggacaactatttgacattctt

SEQ ID NO: 36743 - DNA, 2300 bp, Homo sapien
taagcagttagggggtggggatgaaagtcccaaccttctaataattccttgacctttctggtaaccagcccccatcctgaagctactaggagcagccagctagctaagacaaaattcttagtcaattcattagcatacaaaaaggcaaaatggggcccgtaatcccagcactttgggaggccgatgcaggaggactgcttgagcctaggggttccagagatacacaggagatcaatcagaccaaagtgaagactggaaagaaactgatttctacctcaaaagaaaaagctttttatttatttattttttttgaggtagaaactgaggtagaactgtgaactttatatttaaacaagctttgaaaaagaaaaacttactcttctgaaatggcaaaccactggtacatatactactttttgatcaaaggcaatatcaaatcatgctgttaaagcaagatcatctgttcccctttcaatgccaattacatatatacattgacaataactttttcttttaaaagctttgttttggttaactacagatccatggcatgagaaagaaccctagtcaagattctgtcttaaaaggaggctgctggattatagaaagttcatgagcacagagactgtctctctcttgctctcctaggcctagcccagcgtttgacacataggaagacttgaatgaatgaatgacaaaaaactgttaagcagggatcaagaaagctgaaccatgaaaaattaatttctcatataaataggattatttagcctaagcttaagagcatctttaaggatcatttttctcatgcaagactattataaccatcattaaaaaaaagagacaacataaactggagcacaatccatagtaaaaccaaaagcttaattctcaacatttgagaactttgagaatcagaaaaaggatttcaatctatgaaacataaaatctggtgatggagaaaatggctgtcaatctcacctaacctagggaaagaaagaaaatgtaaccatgagtttgaatgcacaagtgacaacacatcaaacttttaccagcccctagaattatgcttcttttaaaccaaagaatagcaaataccattagcacactgcattccatgagtaagttaatttataagaaacctatttgaaatgactgcccagtactcacaaaacctccctagcacccacatacacatttatttatttcaaaatgacattataggctccttgattgcgaaattcacccacaatccatcacggtcagctacctatttactttccagtgtgttgggggaaaaatatgaggaagatttctttccccaaatctacgtgaagaaaacgaagttatcaaggctttgtaacagaaaaaaagaaaacaaattacccatgcatgggacagaaaaacctcatctggtcacgttgtggcttaacacttggacaatatgtagcttaggttaagttttctatccccaaccccacctacaaactctaggaatgggcggtattgttgcgagaccccggactcgacctcatgccactgaaaaggatgacaggtcgggacttgccccggaggcaggaagagaatctctggcgggtcgcgtagcccgcctcgccgtccccgcctccagccagctcccctggccgcggcgacccttctcgtcctcccacctccacctccacctcctcacctctcggcctggctcacgcgtttcccatcactctgtcagctcctgccaccgcgccttcttccctttcggttttactttaacttcccacgccgggtgaggagctgagcgcagggccaaagatgcgagcgggcagctgtatcgccgcgccccgtccgccctccaagccgcgcttgccggggtcgcgcccagtcacagggaaccgcgtgtgaggaccatcagtcagacagacagacgcaaagacgcacagacccggcgaggagggacagagtggagctggcgccggcctacacgtcaccgccccgctgcagcgccaacgtcggcacgtcgactcgtcgactccgggccctctgccccgcccgcgtgcgcgcgccgctccgcctcccgcctccagcctctagtccgctgggttcggaggagcagaggcggaaggtcccggcggcggcgaggatgcgccccagggcgggagcgggacgctccactttaccctggctgcccgcaacgggccaggcctgccgtctctacctctctacctgtgagttttttccctgcatttacttcagtctgccgcgtcttctccccgcccttctctgtaaggtaaatatgtggagga

SEQ ID NO: 36744 - DNA, 2300 bp, Homo sapien
agctcttagagttcaatgaagtaagaccatccctcagtgtccacaggggattggttccaggacactcccacataccaaaaccccaggatgctcaagtccttacacacaatggtatagtatttgcatacaaactatgcacattgtcccatataccttaaaccatctctaggttacttataatacctaatacaatgggaaatgctatgtaaacagttgttacatccatattgttaaggaaataatgacaagaaaaaaagagtctgtgcgtgttcaatgcagacattaccattctttttttttttttttttcaattgtttttgttccaaagttggttgacacatatacagaagccatggatacagagggctaactgaatttccttccaggccaggactatgtaatacaaatatgatgcaagccacctatgtaattaaaaattttctagaagtcacataaaaagtaaaaataaagttgaaattaattttaacatattttatttgatccattatatattatttcaacatgtaatcgacataagaattacaatattttacatttgttttctaagtctttgaaatctggtgtacattttggactcattgcatgtctcagtttggacaagccacatttcaaatgtcaagagacgtatttaactggtggctaccccaatggatagggcagttctaggtagtctattttcagttcctctcttctcccttaagcctctggaactgtgatgggaataatctgtcatgtgaattcctagcacttatcagcacctctcattatcacttggcctccttgcattatttatttttgtgatgcatttgtcttgtctcatgaactaacttgtaaactctatgaagtccaggaccaaagacacatgtaatctcaagactggaaatatctttaacaaaaccatcaactaattattctgttgatgtgtggctcccctgtaccaagtccctattaagtgagcttcagaatctccttgaagcaaaattctgtggttgaggtattcacacatgctaaggtaggcaattctttgggtcgtgctacaagggcatcttcttttcaggatcttaaatctgttccctgaagtttgcatcacatgaaacaaatcaacttcacatgataggtcatttcatatttggagagagtccagtagttttctctcttctaggtgagtcctggaaggtttaatcaatccttcttcacttgccctgtttttgagttctcgtcatcattttgctcttccctgatataatgccagcttgattaaagtcttcaaatgctgaacacagcacttcagaggtggtctgaccagtaaagacaataactggatcactattggctgcctctacaaaacagttctaccaggcatcggggcacattaccttgaggaagcgggaatggcagaagagagccacaacaaacatattaactcatactatctttgcattgttggcttttagtctagaactctttgcagataaaccacacaattctttaggttagtttttcttcgtatcttcctatcttttcaatcgagttagggaatctttgggctttctgtttttggaggaggtcttctgaccgaagagccgacttgcagagatcactttgagggaactaagctgagaatccagaaagcttatggaaaacaggccttgacaccagagaaccatgtatactctctagcagccagagggctttggctgaaaacgacgatagcaactacctgtttcttcattcaaattgctctcctttcctttacctttaataggaattatttcctccacatatttaccttacagagaagggcggggagaagacgcggcagactgaagtaaatgcagggaaaaaactcacaggtagagaggtagagacggcaggcctggcccgttgcgggcagccagggtaaagtggagcgtcccgctcccgccctggggcgcatcctcgccgccgccgggaccttccgcctctgctcctccgaacccagcggactagaggctggaggcgggaggcggagcggcgcgcgcacgcgggcggggcagagggcccggagtcgacgagtcgacgtgccgacgttggcgctgcagcggggcggtgacgtgtaggccggcgccagctccactctgtccctcctcgccgggtctgtgcgtctttgcgtctgtctgtctgactgatggtcctcacacgcggttccctgtgactgggcgcgaccccggcaagcgcggcttggagggcggacggggcgcggcgatacagctgcccgctcgcatctttggccctgcgct

SEQ ID NO: 36745 - DNA, 2300 bp, Homo sapien
tttattgtgctactttcaatgtactactccagaataatgaatgccaggagcgctgtccgtggtcctgaagaaaggtcgtctccagtcttttagaagttcaactggacaggtggaattgctgtctgttgtgctaaagcctttcaactgagttgatggatgtaaatgaatctaatttaccatatgtgcaaaattggttctttggggatcaattaatattaaaaaagtacaatcttttaactgtttaatttattgtgtaataacttcatgaatatagaggcttgatctttcacttttccaactagacatccaaataaccccccaaaataaatagtttagaatactagtttcaagtgcaaaagttgcaaccataatgtaaaatgtcattatattaatggaatacatgaacaaagagatgtggtacattttgttttctcaggttccaataaatgccagctacactgtgaaatttcagtattttgattagtcacaataaaacatgctattttcaggtagtagatatcagttatattggcagataaaaatgtgaaggattatttttttcccctggcagtcattattatctctgctaggatcaaaaagaaaatgaacaaacagaatggaataaatgagacagcaaatagaagacagaacgtgttgggctgtgtatgtgttttataagagatattttaaacatggactgaaggagtcgctagatacccttggttttagcactaggtgttccttttaaggtgctcgaacagtcgaattatttgattgaattgcctgctatactgcagaactagccattcatgatacttatttttgacactgcagttattgcctccatcttaaaaaaaatcaatgccacttaatgcctttgcaaaatgtagatttctctttaaattagcactttataatatcttaagaaaatttaaattaaaaaatcgctgtaaggaaatgaaaacattacagtgttttcttgctgtttggaggaaaaaatagcaagtcgaatattcatatcactcatatcactccttatttaaaaattagccttcagataggatatttttttgtgagatttaacctatgccctgttagttggttatgaaaaatagattaatgataagatataggtccaacagtttgccttttgtgatgtttaatcttttaaaaatgttgacaatatatatttattatacaagttagttttacttagtgtaaaatattaaaattgtatatttttaataaatagacagaatattacttattttaataataaaaatgtatttttatgttgaaagaaattctatttctgtactttatttcttgaataaactcctaacgaaagccaagagagtcactacctagtgactctaaatattcctaccagaaaactagcaaatgataagacagttttagaggaatctgtaacactcaatgtcgctcatgctatgatctcatattctgcctctttaggaaaaagaatgttcaaaaaaccaaaatacgaagaaatttgggcataaattattgaaggctttagagtttgctgcacccattcaaacatcattgtttttatatatgcacaattattttctttgagcttaaaaaatgggtggaaaatttaacttctccattttaatttgagatttctcccataaaagttcactgaagaaatttctcctacttctgggtagcaatcaaggaataccccagtcaagtttttaaagagtgggtttacctctccaattgcattccaatctatattcattcctggtcaaaataaaagtataaataagactctttcaatctaaccacaagttagatttgcagtaaattcctccgtcttagatcactttcttttttacagttcccagacaaactgactttgatttagctagtaatttaatgaaattcatcagttgattgtaagaagtccgcttacatacaccagtcattctctcagcaaatactcatggaaaataaaagcaatgttctccccataaataaatcctacttctttcttgcaactcaaggcgggctgtcagatcggttgcataatagatattggggagctcactggccgggagccttaagaggagagcagctatctcagtctttctcacttaatcttggcttcacgtcagaagctgtgcagcagtgcagtagaatagggcctggcaaaacctttgctagcaaagcgccttttgtgccgggctgtggctcgctatcgacatctcgtccgttaccaaggctgggtttcctactgatttccctcctcctctgctttcacaggctcgcgc

SEQ ID NO: 36746 - DNA, 2300 bp, Homo sapien
cagccccttgcctcccttctgggggcatgatcctgattttgtgtttaccattcttcttgcctgctctttaaaagcagctttacaacctatttgtatattgctaaataaaacatagcttagtttttattctatttgagctttacaaaaatggaaccatactctatgctgtcttctacaacttgcatttttctctccatgttataatcctgtaattcatctttattttagctacaatctattcaaatgtatgtccaccaaataatgtttcattgtatgaataaactatatgttcatcttttttaactttaaagatttaggtaattttttttaaacctaagttctcaatcattgacatttcaaaagaaacgtagcctgaatccctgtagaaaaattctgagaaaaatcgatagtaggaaatatttctaatgtatgaataaaataatatcatgggtatttttaagcatacatacaacaaatagatatatctctaaggcaatacccaaactatgtctctgaactcagttaactcttctgctccattgattagcacatctattaaaatcaagtgctctaaattaaagtagctatatttttggttaatataaaaacatttttaactaacagattttccaaactaatagcaatgatatatgtaattttctgaaggaggttctatgaggagtgtatgatttcaagattcctaaaatagtcaaatcagttataaatttttccaaagtccatggaaaaggaaacatctgactctatgtttaattaaacataggaaagagttcaggtaaacatagtggtcttaactgcctccaaacttcatgggatgtcataggctctcctttctactttctccagagagtggtctgaataacgcaagtgaacattgctttaatgatactaaaaacagagttttcagtgaatcattctagcttgatttagataaaactcaaatttgcacaatggttaagttgatataaaaccctaaaattcactttgtatcatactcatttctgcaaactttccctcaaatctttacccaattcacagatcccacaaaatatgcatataggtttatgcatagctgaatacataaaactattatttaaaatacttcatgagctaacagtattaacatctgcctttaaaattagaaagcaaagttcgactgatgtatatgtcattagtctacgcagttaagaaatgaaagtaaaaacacctataagtgaccattttaatttcattttcatggaactctgatcatggacaacacgtatattcatctgctatacataaagtcaaatccatgagtagaagtttaaaaattctgtcctgaaatcatatatttagaaatatccatacttttaccattttaaaaaccatttaaattaaatatgtttggcaccatttaggcaagaacaaatattctatagggttcaatattatattaaaggattaaggcaatgaggaggatatggatttttgaattttaatatgagattaagatttttcaaaaagaaaatatttagtccaacttcttttacttggaagaaaaaaagtcccactagttgaacctagtcctaaaacacatgaacagtgtttttaacttaagagcagccagtgaaggagttcagctagtggatgttaaagccagactccctgggcttagaccccagctttgcaaatgagcttagacctcatctgtaaaatgagaataattattctacatatttcattgaatgaaagcaaggattaaattggttaatttatttcaaagtacgtataacaatgtcagctcataatgagtactcaaaaagatttatattttgattacttacttgcaatttgttaatctatgcctattaacaatatattcgatccaaatttaaagcctttttgcatgttttaagattgacttttaatgtatttagctttttaaaaaaacgtttcttatgggaatgattagagatcgccactacttttgctccatttttcagatgaaaaacaaaatgtcttctgatttctagttttttttttttttttctaatttcttcaagcagtttctgtctatacaagtgactctaagtcttatattcttcaaggttctatcagagaagtgttttgacaatcattctctcgtccccaatttctcttcactttaactgggtacattagctacttacacctttgggactttgtcaaactagaccaataatttgagagaactagtgtgtattcagtaaggaaatgtctatgcaattatggatagtattgctctggctcgttatttcagt

SEQ ID NO: 36747 - DNA, 2300 bp, Homo sapien
ttatcatacctatcataaggtttgattttaagtttttgttgtgtatttaatatccactttgaagaaattcatttagtgattgcattacagatctgaagaagtggaaatttatgttgttataaaatgttgtttctaaaaaaggcatcgtgctattgcatgtttaattttatgcagaaatgcattaattcattactgtttcatttataaactatttcctaaagtgaaaatacataactacatgtcaaaagaaaaagtttaatttaccaataaataatctttaatacatattgtaagcatggcctactaaattgaaatgtttattgtataattattaatatatatgtaaactatatttttatatatagtttatgaatatttaaacctaaaacttgaaaatccagaaaacttttacatgagctaacctaagtttgtggcatctctttctaaataactcaaatgaagaatcagtagttatatttttcctttcctacattttcttacattttgggtccaagggttttttttttttttttttttttttcccttaggcttactctacccttagaagacattattgtagttctttcaaaataacagaagtgaatgaaaaagcccgtcatatggcacaaggttattttataagtagtgttgagtaatacaagtcacccaggcaaaactgctagtcgtctgttaataattagtagtctggagggagttatcctcataataaacatctgaccatagcaagactttcgttttaaaagtttcatatctctttgacaaagaaaacattctttttttctacttatattttaaaaaaatatttggaggtctttgagaatttgtatgctcataggacaaacttgctattagtagtatttaggaattagaggtaaaactctatgttattatctctgaagataatgacaagcaattcaagcaatgaaaaattcaaatatacatttgcttcgccacataactacgtcactgctggtggatacatgaaagaggaacccatactattctggctgatgcccagcttcccaggaattagtgggatatagtgctggacatgacgttaccttgagtacatgacagtcagcccctaaccaggctctgattcacaagactaggaggtactcgctttaagtccttgggtaagatatgaacttgtggtaattgggccatttatgtcaaatgtctccactattcttttctttcccagtcttgtttgactttattggtgttgttgtttaaacaaaacaaaacaaaacacaaaaaaagcaaaataggcagccaatgctgctcatcatcttgggagtatttagtgtttcagtgtccgagtgtgtgtctgacagggcctaggagcaactacatcagaaaggtacttttctgtttttttttccttacagagctgtaggcagaatctggagctggagttggctgtcatgtccaagtttgtctgcttttaaaattttgtttgtttgtttgaaattgcaatggtaagatgaactgcagtataagatgggctgttttgatatagtgcagtcataataccacttatttttcaagcttcacatgaataatttgttttattttttattccatctaaagatgtgttaccttactgcatcagagattatactaaagatatgactgtaagtccgtctttgcttcattccattttactcaaacacaaataaaattaagtacttttagtctatgctttcttgatagattcaaaatgattaaaagtgaacagtaatatatgcatatctacaaatttagtataccttacttataaaaaaatcacacatactgatatatgtttatttaagcattaagaatataaacaatgtggtaagctgtaattaaaatttaaataacagaccaaattttaaattggtaggattttgttttatagtctaaatgaattaaaattaataatagtcaaaagtaaaatataattctcagatcccattcttttattaagatcatgagcaggcaactccagccgtacattctgatatagttataaaagatttatatatgtataaaaataaatgtgacaatttagctatatattcttattctaatttttttaattgatgctaaccatagtgatgggagatccttgcttatacaggagaacataatttattatcttattttaaaataaacattacactaaaaccccacatcatttcaagaaatgtgggcaatagtagttattttattattatacgtaacttttaaaaataacaagatagacaaaatgtttgagctacatgcacatgaaa

SEQ ID NO: 36748 - DNA, 2300 bp, Homo sapien
tacagataggaaacttggggtttgaaattcagccaagatcttccagaaaactaaacaatcaggagaaaaattcaatattcagcttgatatttcttctactgtacaccatcctgactctttttaaagaagcccaaaaattgaataaaaatgatactaaatcaatcaagtcaaaaataattcagtcatttaatgaataatttgtagatggctccatctcatctattcaaggattttgctttttactgaatcaaatggtgatgactattgcacctttaaagaatacagagcaatcaagtgatttagccaactggagtgaattaaattttaaaaatgatgactttccaagtggttcagtggtaaaaaatttcaaactacttaatctaattcaaaataaaacaatatcttgtgggtgctttataaatatgactgctcttatagttttaagatatttttagaattattcctgaaaccattcactttgtgaccctcctttcctaatgtttaccttctgttttcaattcttttaatgcaaaatacttattaatgccccaggtggcctatattaattaaggatatgatgtgtcttgggaaaagaacagttctctcctatatatgtatatatatatatatatatatatatatatatatatatatatatgaatgagattattatatataggagagattattatgtataattatgcattatatacaattatataatcatatatttaattaatataattatatataaaattatggcctcagcaggtgttagcagaaagaacaccatatatatatatatgatcatatatatataattatggttgtctgttagtcaccttaaataaaagaaggctgttttattctttctttttctttttaattcaaccaagaaagaaaattctataaatatagaaggaataaggaaggttgttcaggtcacataatggatggacaggctcaagagggaatgagtcttagaataatgtttggcattagtaacataaataaaaattgaacccactcaaaaaccttaaaaggtagtccattatatctcttagccttaatttgagttgtaaaaaataacattacaatttataagtgtacacattgataagtgaaattgaattttgcattgtctctcaggttttccacattagcatgagaacatatatttcagttgctaggtgcccatggggccactgtaccaaaggaggtcactgtctcctgtgcataaattcatccctgtgcatttatgaatgatttggagcttcccctttttcagtgtggggtgggggagcttattaatcattttccaaaccactaatggacagacaagcacattgccagctgctagaaaatggtagcagcagcagaatgtaaagcacctttgacatgaatatggaagccagccagggctaggagccacggaagaaagaacatatcttcagtgactttgtcaatcagtgggattaaaaggtcaacatatgtcaataaagaaaatgtaaaaataatttttctttgctctgatgatagccttcagaccgcttaagaatatcactaacgacagctccagtctccagcaatggaacaaagctggatggagaatgattttgacgagctgagagaggaaggcttcagacaatcaaattactctgagctacgggaggacattcaaaccaaaggcaaagaagttgaaaactttgaaaaaaatttagaagaatgtataactagaataaccaatacagagaagtgcttaaaggagctgatggagctgaaaaccaaggctcgagaactacgtgaagaatgcagaagcctcaggagccgatgcgatcaactggaagaaagggtatcagcaatggaagatgaaatgaatggaatgaaattaagtgagaagggaaggttagagaaaaaagaataaaaagaaatgagcaaagcctccaagaaatatgggactatgtgaaaagacctaatctacgtctgattggtgtacctgaaagtgatgcggagaatggaaccaagttggaaaacactctgcaggatattatccaggagaacttccccaatctagcaaggcaggccaacgttcagattcaggaaatacagagaacgccacaaagatactcctcgagaagagcaactccaagacacataattgtcagattcaccaaagttgaaatgaaggaaaaaatgttaagggcagccagagagaaaggtcgggttaccctcaaagggaagcccatcagactaacagcggatctctcggcagaaaccctacaagccagaagagagtgggg

SEQ ID NO: 36749 - DNA, 2300 bp, Homo sapien
ggtatagtacttgtcattcaaaaccaaaagtataaattttttttcttttttaatttttggattctgtattctgtattctgtattagtttatatttagatactgaagtatctttctacaggtctgtagtataatttagcgcaaccttactgaaaaatcaaacgtgttccaattgttgaaccaagaattaatacaaaaagtgatttttaaatatttttatagtattgacattaatattttgttgctctataaggccatcttaaatgttttactgtttcattatcccttaagaatcagacttgatgatttcttttttttttttttttttttgaggaagagtcttgctctgtttctcaggctggatctcactcggctcactgcaacccccgcctcccaggttgaagtgattctcctgcctaagccctcccgagtcgctgggattacaggcgcttaccaccatgcccagctaattttgtatttttagtaaagatggagtttcaccatgttggccaggctggtctcgatctcctgacctcaagtgatccacctgccttggcttcccaaagtgctgggattacaggcgcgaatcactgtgtccggctgatttcttttttttctcttttcttttttttttgagatgaagtcttgctctattgcccaggctggagtgcagtggttgatctcagctcactgcaacttccaccttctgggttcaagcgattctccttccttagcctccaattacaggtgcacacatcacttcgcctggctaatttttgtatttttagtagagacggggtttcaccatgttggccagtctggtccctactgatctcaagtgatccaccagcctcgacctcccaaagtgctgggattacaggcgtgagccaccgcgcctggccaattactttttaaataaaatagaaatatgccatttttgtttactgtaattttatactgtataatctaagtgtcataatattcaaccaaagactgttttatttatttttctcatatatacttatgcctgatgaattatgatcttaacatgatcagatctgattatataagtatggggccagccatatttattcatagtgtaggaaaagaataaggtttcaggaatggtttatcagcttatagaataattttaattaagatgttaaaactagaggatcttctgaatttttaacttaccgttcaaaatttacttgtgtggaggacattagattgatcatattgatattgaaatactgtgctataatttgtataaaaatcaatgtcaacatttattttctcatcttgccttgataaaatagttacatttaatttgaaattcgacatcataggaaattcagaacgacttgatttttatccctttttatgtttggtcacgttattaattttttaggcaaaagttaaatctataaattaactaatgttgaattttatttcaacttacaaggagatatagccaggtcttctgtatatattctcttgctgttaataggaattgtttatgcattagtgtcttataagcaagattcaggcatacttttaatgttgccttggtttattaaagtaagctcaagaatttcatcagtaaaccaaaccagacgacttcccagatagaagagaaaattgctgtttttagggattctttcatattggattgttaaatgtttttttccctgtggatgtatacatatcagtgatttcaaatagacaatcctggtgcatattttcaaccatttgtgtgtgtgtgtaaatgcatatcataaaatgtatcatttaaacaatttttaagtgtacacttttgtggcattaagtgcattcacattaatgtgtgactatcaccaccatccatcttctgaattttttcatctttcccaactgaaactgtactttaaacactaactccccctcctcctttcccacccgcctctaacaaccaccaattttatgtctacgaatttgactactctaagaacttcgtatacatggaatcatacaatatttgtccttttgtgattgctttatttcacttagcataaggtcttctagattcatccattttgtagcacatatcaaaatttgcttcctttttaaggctaaataatactcccttggctaaataataatccagccatctgttgatggacacttgggttgcttctaccatttggctattgtgaataatgctgctgtatgcgcagatacttctttgagtccgtgctttcagttcttttggatatatacccagaagtggaattgcctgatcatatgataattctgtattgta

SEQ ID NO: 36750 - DNA, 2300 bp, Homo sapien
ttctcagtcatgacttgtgatcataaacttctttgttcttggtatttattctctgtatctttcatctcttgaaccttatcctgtctccaactttacctttgttcatgtttttattttcagtgtctcagctgcatcactgtccagtatctcctcctaaatccctaatagttacaccccactatatctttaaactcacgatacataaaatcttactcatatttccaccagtaccttctaggagtgtgggggtaggttatggggaaagggcttttccactttaagttatttctattcataagttctatcttgcagagatcttaccttacttttttttttgtagagataaggtctcagtttgtcactcaggctggagtgacaaagtgagcacactacaattatagctcattgcagccttgaactcctgggttaaagttttctcccacctcagccttctgagcagccaggactgtaggcgcataccactacgcttggctaattaaaacatttttttttttttggtagagacagggtctcactgttgcccaggctggtctcaaactcctgggctcaagcgatcctcctgccttggcctcccaaagtgctgggattacaggcatgagccaccatacccagcctcttctcttacttttaatgcttattcaaagaagtagtatctctcggattggcttcattgttcctctttgctaccatgaccaggacttctatagctcatgcttcattgttgagaaattgatattatatatatatatattgtgttactctgtgttagtcacatctctttaactctattaaacagtttttagcaagttcttggagtttttactgctcttacattacatgcagtgttggtacatagtaagtactcagtactttctgattaatcaaaaattgtagataactcacagtttgcttacctggcagatgaacaaaagggagagactctctttgctattcaagagatcttattcttcaatttttagggtggagaatgggaagggataacaaattacgttccaatttctgcatgtattctaaaggatagaagtaagaataaagttaggagtaagaggccgggcgcagtggctcatgcctgtaatcccagcactttgggaggctgagatgggtggatcacctgaggtcaggagttcgaaaccagcctggctaacatggtgaaacctctctctactaaaaatacaaaaattagccaggcgtggtggtgcgtgcctgcaatcccagctacttgagaggctgaggcaggagaatcacttgaattcaggaggcagaggttgcagtgagcagagatcgtgccactgcactccagcctggacaacagagtgagactttgtctcaaaatgacaacaacaactacaacaataaaccaaaataaataaataagattaggtgtaagagattattttcatgaaaaattaaatggaacacgcaacgtaatttttctgggtgtgaaaattcattgtaataaggcttggatttaaaagaattgagaataaatatattcaattacatgtctgatattaagttctgagacataaccaaatttatcaagtcttttgtgttgaaaatgtaggaatttaaaaaaatacatttctctaggtagtcaaactatttcagctaagttctgtctttttgtaaatagttattgaaatgttcaaacattatccagtaactccttattgtaaataaagatctaagaatgattatttgtagaaaaggcatttagcaagctagtaaatctgataattagatgactgatacactgctaacatattttactcttattttttgagctagccttttaaagatcgctgtgaatggttctatgaacatttgcattcaggacagccagattcagatatggtgcacaggccagtgaatgaaaatgatatcctgctggttcacagaggtatgcttaacaaagaaactgatatatgtgtgaagcacaaagtgctttttattataaattttaatatgtaaaattaaccaatgctacatatttagattctatttttaggagtagctgtgaagttgtgtcaaaagcaaattgtgcaaagctaaagcaagggattgctgtacggttccatggagaagaaggcatggtgggtataaaagaagatgatgtagaaatcactgtatgtaaagaaagattgaaatgccttttgaataaagtttaatatttagttgataaaggaagaaactttatatttaaattttgttatttagaaaaaaatttcccaatataacatatttctgttgatgcttaa

SEQ ID NO: 36751 - DNA, 2300 bp, Homo sapien
tttatcaagttcgctatattatatcacaaacttttgcctgtgtattctgattgatgttttccccccacagaatgacttcacctcgtttcattgaatttgtctgcaaacatgatgaagttttaaaatgctttgttaataggtaagctttctgggtttgtggagtaccctgctagcctttcctctctttacttacagtttcatctaaacagaaaaaatactatttctcgtactattcaaaatatgctcaataacaaatgaaactttaatagatatggattattatgtgtttttcttctgtttcagtgtcagtgtatctgaatttgcatttcacttaatgctactcattcttcctgtccatttaaacaaaatatttttcttttagaaatcccaaaattatatttgaccactttcactttctccttgaatgtcctgagttgatgtcaagattcatgcatatcataaaagcacaggtagaaatttttcttcatctttttattctatctaatgaaattaatttctaaaattctaatactgtttagtggaataattattacacttcagacattctgttgtaagaggaatgattgcatgttactttaatatgaggagtaagttttcttcaagaaatatgtactgagtgcctactatgtacagaggtctgtacaaaaacaacagaacacattgccacatttcctgaaaggagcttaatgaaactctttagttctataaggctgattgtccttttgaaaaggattttagcccccaaatacatttgggaaattacataacatatgccctttggaaatttataaatcacattggcagcatgttaaaaggctttgagaagcccttcagtaaaaatagtgatttagctttgttaatcctcctaacttatttgacctgaccacctttcccctaccagatgtgtacctgttcattccatacatctcatgttacatgaagctagctggaggaaagcttgttttgctccttaccagctatgtgaactttgggcacgtttcctaatatccttgagcccttggtttcttcatctacaaaatggagataatgacagcagcctcatagaactattgtccagaataaattgtcaggaatgactgtgatatatgctcaataaatggtagttgttttggagatagaaaacttacttcccttctctaagaggattctaattcagtctggctggggagataataaacatatgtataaaatagtaactacaacataacctggatctttaggagtttaagggaggaagagctggctctggcatctgtagtcaggggaaatttcagaggaggcagattttaagttaccttgagaaagcttgaaaaaatatgcaacattttgatgggagtaaacaaagagggagaactttctagccaccatgtgggctggagcatgtagaccgaaaagtatgtaaaactgcagtattgcagcagaaattttgtgttgataggagcaagatagagttatggaaaggtagattgaggtcatccaatgatgagccttgatttccagattgaagaattttctttgtttgctaggctgttaggagccactgatacccttgctttaggagaatggcataattctggcaaagttttagaaaataatttgccagatatgtaggacagactgtaggcaatggtttggttagtagttgtaagataataaataggataagtggtttttaatgtctttagggacacttgtcctttcagaagttaagctatgaactaatttttataaaattatacataactatatagagggatcttttgacatctgtttaataatgataatgtgaaagagaaggcagtaataatgacttacatttactgattttaggtcaggtactatgtatttgcttccatgaatgattttattttcttaaccattgtataagatggctactcttttttttgtaagctgaagtggttaagtaacttgtttaagtcattctgctactaaatgggagaaccagaatttaaaagtctgtctggttctcaagttcaatttctttctttattttatttatttattttttttgacacagggttttacctgtcactcaggctggagtatagttgatctgagctcactgcaacgtctgcctcctgggctgaagcgatcctcccagctcagtctttcaagtagctgggactacaggtgcataccaccacacctggctaatttttgtgttttttgtagagacgggattttgccatgctgcgcagactggccttgaactcctgagctcaagtgatccacctgcc

SEQ ID NO: 36752 - DNA, 2300 bp, Homo sapien
ttagtttcattacttatactttaatacaaatttaaaattcagttgcaccagccacatttcaagcacccagtaaccccatttggttagtggatgctattttggacattgcagattatagaatatttctatcattgcagaaagttctgttggacaggaggtgataagctgatagtagtactgcagctttatacattttgaagcagagctattgggagacggcatcatattgcagaatttggaactgacaattcacatcagcattacctgttccattatcttctgctcctgtggtgaacagtgaccagcatgagatgcaatgcccaccatggaggctgctgggggctcctacccctgcccacaaactccaggcttggtcctcacaggacgttggaggtaatttatatggagcaacagcctagagagcaatggtgataacagcagctgagagaagctgaggggccaacttctgtacagcagtgggaatcctgactttttgaatagcataagaggccaagcaagactggaacatttttagttgaagccaggttgcaaatggttgagcctgggctagactggtccataacgtctggtatttctttcttcctttcctttttttttgagacagggtctcgctctgtcacccaggctggagtgcaatggcaggatctcagctcactgcagcctctgtctctcgggttcaagcgattctcctgcctaagcctcccgagtagctgggatttcagaggcacaccaccacgcccggctaatttttgtatatacatatttttagtagagacagggttttaccatgttggccaggctggtctcaaactcctgacctcaagtgatccgcctgccttggcctcacaaagtgctgggattacaggcatgagccactgcgcccagcctctggtattcttttgaaactttgacctctaccaccttgttgccagactggtttaggtatcatctgattaggtgaagattacagaggtcttccccgtgcctgtggcaccactggcacaaatggtcactagctggaactgatttaggacggcactggcagggaaaacacatgccaaccaccatctgccccttcatatcctgaatgggcaggtgagactctctttcacttggccagccaacatacatcatcaacgtacatgtgcccattcatttcaggaacagctttgtctctttgaggaagagaagctgaaaaagacaagccttttgtttctccctcactccagcatcatcttggcactggtaatatatccaagatatattggtgttagccaggctcacatttacccctttgattgggttaattttttgaagttccaacttctgttgtttcaagtgttcaacttctgtgcagagcttatgaatatgatttttcgccactgagttcatttcttccacaatgtaggtatccaaattttttgtaacttacaaagtcaaatcctttggatttcccactaggctgtgtcatcacatagacactttagcattgtaccaaataaatgaaaaaattttttcaggttgtcatcattcatatcttccccagagctttaactttgtgctaggtgccttgttaagtacagggatacaacacagttcaagattaaatgtccctgccctcataaagccgcccggcaggaaaaacaactaattaagctattgtcaagttatttacaatgaagacaaaagcacaatatgcttttggatttgtttgattttattactctttaagtttgacatatgaaaataccatacttaaaacagttcatgtagggtacctgaaacaaaggcactaatacagtactagaaaggtggtgacggatttaagaacaattgtgccaatttctaatctgttttatagtaaagttatagaattggaggaaactgctcctgtacaactttggaggagggtaggaggagcagggcgtgagaatgcctttccagaagcttaggagtacgcccagtcgctgcgtggcttcccgcatactcagccctgcgcccgcgttggcgtggcctgggcgcccccaacgtgactccgcccagggcgctccgttctgccagctggaaactacagttcccagaaggccacgcgagcccgggagggacgcggcggcgggggctgcaggaaaggcgcgagcagaggcggcggcgggtgtactgtaggtggtcggtccggcagcagcccggcccccggacgcaggacgtggccccaggcagccctcgcagctcagtgctctagccggggcaagcccgcgtctccgcctgctggacgggcccag

SEQ ID NO: 36753 - DNA, 2300 bp, Homo sapien
aatattttacaaagctaaactatactggcctgtgaattttgtgatcattacttttatgtaagtaatagcatttcacctcaatttacatgaatactttctgagatttttttcctcttataccagatgttgattttttaaagtgattattaaaatatgaaaaaatataaattactttctcgatttcatattatgtcacaagcttagcctgtaatgccatcattgagattactttcttgtcagtgtaatcagtataatagaagtaatttctaccatcaaaataatgcctagtaaatgttttgttagtaaataattttttcagagctttgagcttttgttaaactttcaaagtcattggatttttgcaccttttcttttctccctaacagctggcacaggattattcctcccaaaataaataaaatgagaaagtagccctttttcctgagaaataacaaaaggaataacagacaaaaaaaaaaatctttccaaattgattagttttcattaaaccttttatcaaaaacagctgaaaataacttctattttttatacatccattttccaatctgagccaattaaatttatatttagttgtttaatatggggagggagtataaataggtgtatacagctttttccatagctcttcgattcataatccctacattttagcttgtgtgaaacagtgctggagtgtggatgtgtttgaagagactgggagggggattgctggcatggtgggggagggtcaactcggtagctttgtcgaaggaagtggtatctgaacagttagtttcttggtaaactgcttgtttaagaaaatggggggtggggtaggcaagtctggtggtgcattttaaggttttaaaatagcgatattttatattttaaaggaaataaagtctttttagttaatctataatatttattatagtattcgataagggcagaaatactgttgccagcatcttgtaatcaatcgtttgaaccagtttgaaaggtaaagggggtaggcattttgaaactgggggtcagttgaggaaggacagtaggagcttcatccgttgttacattttcgtttattcaactcttctagccattggtagtggacttttaaaatgtcagggtacaagtcaatatgatatgaatttaccttttttctcccacttgtccttctttctccaccccaccccctgcccgcgccggctttttttctctcccacctctttctttgactctgctgccgcctatcctggcggctcctcttcacctcccctgcctggcgatcccctccccctcctgccctatgtcctccagctcttggggaacaatcgccactgattgaggttcactctatgttaggctggaaaactgggctgttatttaggaagtcattaatcacatctcctcccccggaaagagatggcagagaaacctgtgaagtacaattccttaccaaccccctctaaaattttccaaaatggtttacctaaacacaatttgactatatgaaggtgaaaacgatttttctagtaggattttattttaaatttgaaaaaatttcgggcataatcaggtaatttatgtgcctctgccttttcctaggtgtatgttttcattatctaaagtttcatggggatgtaattaggtttaattagatcttttataaattatatattttcctctaagaattgaattaaatatgaaattagcgttccaagcaggtttactgccatggaatagctgaattcttaaggggaaaaaaagcgttaacatcggttgttttatttaaacgaccccctcccatgattttagtcaggcttgtgtgtaaggcacgcgtgtgcacatatatgactgcctttttttctaaatctatgattcacaaggtccctccattgtgtttaagtagaagcacgaaatcagcattctgatttatcctaaagaagcgttccaaattgtctttaagataacatgtttgagtttttcgtgttcattcataaattattttgatgtcagcatagatgaaatggcgattggttatctcttcctcttgccagccccttaaggatacgaggtgaaattagtagcaagaaagcatgtaattgacaaagtcacgtgtgctcagggggccagaaactggagagaggagagaaaaaaatcaaaagaaggaaagcacattagaccatgcgagctaaatttgtgatcgcacaaaatcaagatgttagattgatgcagaagatcactccgttccaaagggaaagttttcatctcacgagtttggagctgagggcccgtggggc

SEQ ID NO: 36754 - DNA, 2300 bp, Homo sapien
gtaccaatttctggtccaagaaaaatgacaggaaaactactattatgacccaagaaccagaaaatattattagcagtttttagaaggtacggtcatcctaaacatgttttgacgcacgacaccttattaaagagagagagagatatatatagatatatgtatctatatatctatataattgtctattgtgaaatgccagttacctattgtcgaaaatattgatcagatcagtttactttgattaccacttaatcgttaagtggcttacacttaacaattcttatacagagaataggtggaaagagaaaggttagactgctaaattggtaaacttttcagattaattttgactaaatcaagagaaattatttttccctcatcagatcatcaaagttgaagtccttaaattacctatactagtaaagttttgtttatcgtttttcaaataggtgattgtagggctaaatagctaaatgctgaaactaacattaaacctctaccaaactaaaaaaatgaaaaagataactgcaaacgagcgtcttgctagtcgagttaattcattctgtaattctaactgaatcttcgcacatctcccgaatggcaaatggcattacattgctaagagtcttttcgcacttattcatgcttcaaagcaggcagtttctgggacttgtctggccaacaacccgttcccaaaggctcggggaaggaggttgcgggtgggtggcgcggacctcgggtccccagccatcggcgctctcccggggccctctgacctcgctccttaaaggaggagggtccgtggcaacggtcctcctcggccaggcgctctcgggacgcgggggtgaggagtgagcgccgtggcccaccctactctccgagcggggacggagtgggcgacaccgcgcgcccggctgcacgcaggctctgcgcggctcgaggcggccctacagggggcgaggaggaaccccggagactcggcggagagagcagagacggagctcaccaaggggcttgccgccgcagagcgcgggagccggcactcggtggggccgagggcccggggacgctggggctgcctgacctgagcggcggccgctgaccgttgagggtctctgtggccgcagcgcccagacccggggagaagggcggcctccaagggccgggagcccctcgagggcgcggccagcgaggagggacagagggcggcgcccccggctgcccgggcgcgtagaacaagcagctgccgccagggccgacaaagttgctccccgaggggctgagatccaactttcgcttcccgatttagccaggggagcgcgaggccgcacacaacccggcgcggggggaaagccggctgcagctgcgcctcccatccttacccggctggtccctggcggggagcctgggcagcgccgaccaaagttcggagcggcagcttcggggcgcgggacgcggggcacacgggctcagctgctcgacgggagcccgacgcgcgctcctcggcgggtcggcgggtccggaagctccgctgcccgggccgggtccccaagcccgcagccgctttgactaaaataggcatcgcgacggcggcggcaggcggcggcagccagggctggggccgcaccgcgcacgcgcatgcgcccgccgccccgcgccccccggcgggcggagcccggcgccgcggccaggatttcccacctcgctcccgcgactccgctgcgggtctgcacacccgaggactcggtttgaaacgcccgcttatttattttcttgtcgcctcgctacaagattctatccttgtttgggcatgagtggggggcggcagtctcgtgggaccggcggcattcgtcgttcctccttacggggataattcgagaagtgcggtccgggtagggagagaaatcaggagagaaaatgagaaagagaatcctcgtttcccctcaaagttggacgacccactcgtatatctcctttttgggagattcgcccataactcagcacaaacagggaatagcccggaaagcgcgcgagttcccgtccgattgtggcgggggaggctgaacgtttggtccacacgggtgcaggacgcgggggtcaggcctcctgctgcggaggaagagggggaagaggccgcgcgggagggacttctgacacgcgccactgtttttgttttcaaacaggggtacttaaccgaaactagcaatcccaggcggtacaaggccctccatcgtaggcaaagcactacctgaatgtagatttgggccatacgttggaaaataagacatgagagtatgctc

SEQ ID NO: 36755 - DNA, 2300 bp, Homo sapien
aacaccattttaagacccttatatataattacaccatttagtcctcaaaactatactatgaagtgcaggtacaattatcataattatcatcatcatcatcatcatcatcatcattatccccatgttccaaaaaggaaactgaggcacagaagggctaggtaacttctccaaggtcacacagtaaactggtaggagagggagtattcaaacccggcttgtgtgacatcaaggcccatgctctttcttactaggctgcaccatctcttcaaccagagacttgtccagtgtgcacctccaggtactctttataatgtaccttcacacaatcggtggtggtattttttatattgagatcacatttcacatgcatgaacgatctcataatctaataactgatgccaattttaaccaataatgggacacttttggtggaaactgggtacccatctaaccttcctctattgtcctacaagacaactcccaacaacgccaattctttattaagtttccttgcttttcttacccaaaatagttgtccagtgaacagtaaaagttgatcggagcatactctcatgtcttattttccaacgtatggcccaaatctacattcaggtagtgctttgcctacgatggagggccttgtaccgcctgggattgctagtttcggttaagtacccctgtttgaaaacaaaaacagtggcgcgtgtcagaagtccctcccgcgcggcctcttccccctcttcctccgcagcaggaggcctgacccccgcgtcctgcacccgtgtggaccaaacgttcagcctcccccgccacaatcggacgggaactcgcgcgctttccgggctattccctgtttgtgctgagttatgggcgaatctcccaaaaaggagatatacgagtgggtcgtccaactttgaggggaaacgaggattctctttctcattttctctcctgatttctctccctacccggaccgcacttctcgaattatccccgtaaggaggaacgacgaatgccgccggtcccacgagactgccgccccccactcatgcccaaacaaggatagaatcttgtagcgaggcgacaagaaaataaataagcgggcgtttcaaaccgagtcctcgggtgtgcagacccgcagcggagtcgcgggagcgaggtgggaaatcctggccgcggcgccgggctccgcccgccggggggcgcggggcggcgggcgcatgcgcgtgcgcggtgcggccccagccctggctgccgccgcctgccgccgccgtcgcgatgcctattttagtcaaagcggctgcgggcttggggacccggcccgggcagcggagcttccggacccgccgacccgccgaggagcgcgcgtcgggctcccgtcgagcagctgagcccgtgtgccccgcgtcccgcgccccgaagctgccgctccgaactttggtcggcgctgcccaggctccccgccagggaccagccgggtaaggatgggaggcgcagctgcagccggctttccccccgcgccgggttgtgtgcggcctcgcgctcccctggctaaatcgggaagcgaaagttggatctcagcccctcggggagcaactttgtcggccctggcggcagctgcttgttctacgcgcccgggcagccgggggcgccgccctctgtccctcctcgctggccgcgccctcgaggggctcccggcccttggaggccgcccttctccccgggtctgggcgctgcggccacagagaccctcaacggtcagcggccgccgctcaggtcaggcagccccagcgtccccgggccctcggccccaccgagtgccggctcccgcgctctgcggcggcaagccccttggtgagctccgtctctgctctctccgccgagtctccggggttcctcctcgccccctgtagggccgcctcgagccgcgcagagcctgcgtgcagccgggcgcgcggtgtcgcccactccgtccccgctcggagagtagggtgggccacggcgctcactcctcacccccgcgtcccgagagcgcctggccgaggaggaccgttgccacggaccctcctcctttaaggagcgaggtcagagggccccgggagagcgccgatggctggggacccgaggtccgcgccacccacccgcaacctccttccccgagcctttgggaacgggttgttggccagacaagtcccagaaactgcctgctttgaagcatgaataagtgcgaaaagactcttagcaatgtaatgccatttgccattcgggagatgtgcgaagattcagttagaattacagaa

SEQ ID NO: 36756 - DNA, 2300 bp, Homo sapien
tacccacaccttaaaatgtatttagtggtagctatcaaaacagctggtagggacgtgggcacacctgtaatcccagctactggggaggctgaggcagaagaatcgcttgaacccggggggcggaggttgcagtgcgcccagatcgcgccattgcactccagcttgggcaacaagagtgaaactctgcctcaaaaaaaaaaggctggcagagcatctagaaagaaacagactctaaagaagtaatctcaaaaagtaatcttttatggttataggaaagttcagacgtattagaaaaggagttttataaatacaatatatatacatagaacttatgtcccaaacaccattttaagacccttatatataattacaccatttagtcctcaaaactatactatgaagtgcaggtacaattatcataattatcatcatcatcatcatcatcatcatcattatccccatgttccaaaaaggaaactgaggcacagaagggctaggtaacttctccaaggtcacacagtaaactggtaggagagggagtattcaaacccggcttgtgtgacatcaaggcccatgctctttcttactaggctgcaccatctcttcaaccagagacttgtccagtgtgcacctccaggtactctttataatgtaccttcacacaatcggtggtggtattttttatattgagatcacatttcacatgcatgaacgatctcataatctaataactgatgccaattttaaccaataatgggacacttttggtggaaactgggtacccatctaaccttcctctattgtcctacaagacaactcccaacaacgccaattctttattaagtttccttgcttttcttacccaaaatagttgtccagtgaacagtaaaagttgatcggagcatactctcatgtcttattttccaacgtatggcccaaatctacattcaggtagtgctttgcctacgatggagggccttgtaccgcctgggattgctagtttcggttaagtacccctgtttgaaaacaaaaacagtggcgcgtgtcagaagtccctcccgcgcggcctcttccccctcttcctccgcagcaggaggcctgacccccgcgtcctgcacccgtgtggaccaaacgttcagcctcccccgccacaatcggacgggaactcgcgcgctttccgggctattccctgtttgtgctgagttatgggcgaatctcccaaaaaggagatatacgagtgggtcgtccaactttgaggggaaacgaggattctctttctcattttctctcctgatttctctccctacccggaccgcacttctcgaattatccccgtaaggaggaacgacgaatgccgccggtcccacgagactgccgccccccactcatgcccaaacaaggatagaatcttgtagcgaggcgacaagaaaataaataagcgggcgtttcaaaccgagtcctcgggtgtgcagacccgcagcggagtcgcgggagcgaggtgggaaatcctggccgcggcgccgggctccgcccgccggggggcgcggggcggcgggcgcatgcgcgtgcgcggtgcggccccagccctggctgccgccgcctgccgccgccgtcgcgatgcctattttagtcaaagcggctgcgggcttggggacccggcccgggcagcggagcttccggacccgccgacccgccgaggagcgcgcgtcgggctcccgtcgagcagctgagcccgtgtgccccgcgtcccgcgccccgaagctgccgctccgaactttggtcggcgctgcccaggctccccgccagggaccagccgggtaaggatgggaggcgcagctgcagccggctttccccccgcgccgggttgtgtgcggcctcgcgctcccctggctaaatcgggaagcgaaagttggatctcagcccctcggggagcaactttgtcggccctggcggcagctgcttgttctacgcgcccgggcagccgggggcgccgccctctgtccctcctcgctggccgcgccctcgaggggctcccggcccttggaggccgcccttctccccgggtctgggcgctgcggccacagagaccctcaacggtcagcggccgccgctcaggtcaggcagccccagcgtccccgggccctcggccccaccgagtgccggctcccgcgctctgcggcggcaagccccttggtgagctccgtctctgctctctccgccgagtctccggggttcctcctcgccccctgtagggccgcctcgagccgcgcagagcctgcgtgcagccgggcgcgcggtgt

SEQ ID NO: 36757 - DNA, 2300 bp, Homo sapien
gccataaaaatgaacgtgactgggttccaataaaactttatggacactgaatttgaattttatataatgttcacatatcatgaaatattcttcttctgattttttccaaccataaaaaatgtaaaaatgggtatacaaaaacaggcagtgggctggggttttgggggcatagcttgctttatataattagtagacattattatgatgtctataatatctttctagaaattatttttaatggttgtttaaacatagagtctgtttctatgttttttatttttaatggctgtttaaactggtaggagaggggggattcaaacccagcttgtgtgacatcaaggcccatgctctttcataaacaagactgtctggatgttctataatttacttagtcccctgtggttagaatttaggctatttccaatattcattattataactcaccctccagtgaacatctgtgtagttaagtctttacgcacacatgtatacccacaccttaaaatgtatttagtggtagctatcaaaacagctggtagggacgtgggcacacctgtaatcccagctactggggaggctgaggcagaagaatcgcttgaacccggggggcggaggttgcagtgcgcccagatcgcgccattgcactccagcttgggcaacaagagtgaaactctgcctcaaaaaaaaaaggctggcagagcatctagaaagaaacagactctaaagaagtaatctcaaaaagtaatcttttatggttataggaaagttcagacgtattagaaaaggagttttataaatacaatatatatacatagaacttatgtcccaaacaccattttaagacccttatatataattacaccatttagtcctcaaaactatactatgaagtgcaggtacaattatcataattatcatcatcatcatcatcatcatcatcattatccccatgttccaaaaaggaaactgaggcacagaagggctaggtaacttctccaaggtcacacagtaaactggtaggagagggagtattcaaacccggcttgtgtgacatcaaggcccatgctctttcttactaggctgcaccatctcttcaaccagagacttgtccagtgtgcacctccaggtactctttataatgtaccttcacacaatcggtggtggtattttttatattgagatcacatttcacatgcatgaacgatctcataatctaataactgatgccaattttaaccaataatgggacacttttggtggaaactgggtacccatctaaccttcctctattgtcctacaagacaactcccaacaacgccaattctttattaagtttccttgcttttcttacccaaaatagttgtccagtgaacagtaaaagttgatcggagcatactctcatgtcttattttccaacgtatggcccaaatctacattcaggtagtgctttgcctacgatggagggccttgtaccgcctgggattgctagtttcggttaagtacccctgtttgaaaacaaaaacagtggcgcgtgtcagaagtccctcccgcgcggcctcttccccctcttcctccgcagcaggaggcctgacccccgcgtcctgcacccgtgtggaccaaacgttcagcctcccccgccacaatcggacgggaactcgcgcgctttccgggctattccctgtttgtgctgagttatgggcgaatctcccaaaaaggagatatacgagtgggtcgtccaactttgaggggaaacgaggattctctttctcattttctctcctgatttctctccctacccggaccgcacttctcgaattatccccgtaaggaggaacgacgaatgccgccggtcccacgagactgccgccccccactcatgcccaaacaaggatagaatcttgtagcgaggcgacaagaaaataaataagcgggcgtttcaaaccgagtcctcgggtgtgcagacccgcagcggagtcgcgggagcgaggtgggaaatcctggccgcggcgccgggctccgcccgccggggggcgcggggcggcgggcgcatgcgcgtgcgcggtgcggccccagccctggctgccgccgcctgccgccgccgtcgcgatgcctattttagtcaaagcggctgcgggcttggggacccggcccgggcagcggagcttccggacccgccgacccgccgaggagcgcgcgtcgggctcccgtcgagcagctgagcccgtgtgccccgcgtcccgcgccccgaagctgccgctccgaactttggtcggcgctgcccaggctccccgccagggacc

SEQ ID NO: 36758 - DNA, 2300 bp, Homo sapien
ttttacatggcctttctctattagcatcattttaacatttcgctgaggattataaatttttaaggaagttcaaaccaaagttcagagctccactagcaaatctttttaaactggctttcgtgggtgtgtttggtatcctgaagaattgattgatttaaaataccctagttttgaaacagcagggagactgacatttgcagcctggtattttgcagttctcactactcattgtatttgaacaataatttttctttgttgtaatacccagtagaataaaattttgtgctttgtttaaaagaggagaaattgaacatgttcaggatgctggcctgtcttcaatttcatcaccatcatctcgtagattgattgatggggagaataattagggatatgcagcatgtttgaaatgtatttgaaaacaagcaaaaacaacaatatgactataagttgtaagtctaagctttttttttctttttttttaaatgattcacctggcagtgttcttgaagtcattacttactgagaaaagaatcactatccaagatgaaaaatcaggaacttcaacaacagctcctttatttccatttctacttctgttggtgattacactgttccattttttactccagctaagtcattttcacctctgtattttttctcctatggggcaagatctgtgatatctgatagtttattaacaggtgtgctggaaataatctatttcaaaaataaaacactaaatatagcacacaagttcaaggcttttgaatgttaccatggttttaaaaaatcaatgtcatgaatgctttacactgaaatcatttattgttaggaaactgggtggcaaatgatacatatatcctgtagctctgtcatcatggctaatgctctcctgactcagattacatattagcatttccaccatatggctgaaagggtagagaatgtatgtgcagaggaacagagttggtaatatttttgaccatctgataaataaatatgtaagtaacaggaatattaatatttatttcatcatatgatgcaagctttaacctgaaataaccactaatacaacaaagtagtacatttgtttctcaaataatttcaatctaatttattaaatatttccatagtcaattaatgctcttagaatgtgacttctaattatgtttcttatgtttattgatatagtagggttccttatcatgccaaatttaaaaatctttcctgagaggccacacgattggacccagcatatgggcatgagcgccaaagttctgctctgccagtgaccactgtgtggcctgggataaattacctgacctctctaagcctcaaattaatgtgtaaagagtgaataatctattatcagacagtatccctcaaagggtgggccatggaggaccatggattaacacatcagaatcacatggggagcttaaaatacaaacatctgggccccacccgcaatgattctggttcatgtatctggaagcagtccatgaatctgcaaatatatatatgtattaatacagagtcttactcttttcgcctaggctgaagtgcagtggtaagatgatctcggctcactgaagcctgtctcccaagttcaagtgattcttgtgcctcagcatcctgagtagctgggatcccaggcgcacgccaccacgcctgggtaatttttctatttttagtagagacagggtttcgccatgttggccaggctggtctcgaacttctggcctcaagtgatccacccacctcagcctcccaaagggctgggattccaggcacacgccacctcgcccggcccgcatttttagtcactgtcccgagtgattgtgaggtacactgaatcactcccatagagacgagattaatatagagcacttagctaccttgaaaaatatgtagctaattttaataaatatactttttataccatagaaatttaacacccaacagcatttgtgcttaaaatactctaacttcatagaaaatgggaggtcagcttgctaagtaatgctgctgatcattaaatataccccacaattctcctttttgtttaattagatcctttatctttttttctcttgcataggaaataccaaaatatttgcagactggatccaaatcaggagcccagatgaacttaaagaagcgagcatgggattcttagtttttcaagatccgtacacacgaagcctttaatcagcatcaactccagtgtccgttttctctggttttgtgaagactgcacaaaactctcatgatggagaaccaaaggacttagttacctg

SEQ ID NO: 36759 - DNA, 2300 bp, Homo sapien
agacagtcttttataatgtaatgtggtcatgggagtgatatccatcacctttgttatatttattttcagaagcaagtcacaggtcccaacccctcttaggaggaggggatctaacacaggtatgaacatgaacaggtactgggaatcagaaactattggggccactgaagaatctgtcacacagggatatctttgttgcattgagacaggaaagctattttaagatggtgtggtgaaaaaggataaaagctccttactcaagctctagcttatctaactctcagtcaataggtaacaaaacacccaagaagctgttaactgcaagctcctatttcagagggctagggacttccccagatccccgcctgtacagttagacttaaactccaacctacatttaccccttcctcactttaatgctaaaaattactcctggggtggagatttaaaatgctaatgctacatatgatgtatgaaaaagcatattgggccactgtgcaagcactagaaaaactcctcctataggtgccctgatgtaaccctcccctatagaaagaccctataaaactgacccacacactatcctcagagcagtccgttcctttgcctttcttggtgctgactcccttgcgcacaagctgaatacactttcctttgctgctatgtttggtgatctctgttaatctctatcatgggagatcataagaatccagggcaacagtaacagcttctgagtttttaaattaaaaataacagtaatataatccttaaatttttaaaatgtaggacactaaacaagtaaaatctaaatccagagtacatctgacctcaaagttcatgggcttctcacttccctggccatagtttaaaggtgtgtgtgtgtgtatatatatatatatacatatatatacacacacacacacacacacacacacacacacacacactatggactacatccagttcaaactggatttccaacatttgagtaaatccctgcaatgaagagaaagagcaaaggcctaggagtcaactggtttctagccatttctggggtgtaagaatatgtgtatttcttgatcctcagttccagcatcaattaaagggagttaattttaccatctatattcactgtttttgtggttaccctggggctcaaaaaagacactgattgctcaataaattcttgttcctggagtcgctgttatcaatatggttatataaaatgaaagcgaactagaagacaggagatgacattcttaaattagtggcgtgttttactggtcgtcaccaaccctcacatttgtttcatcacaaaaacaaaacaaaactttgctaattgcaaaggaagaaaaaatgcacctgatcattgctttaaaattgtatgcatttggttattactgatatgagctttttgtcatttgtgtttttaaattttttccttttatgattgtctatgccctttactcatttgcttttagagatgttcattgatttgaatatagatattttatttttcatgcaacagtccgtatttattggttgggtgcggtggctcacatctgcaatcctaagctttaggaggctgagtcaggaggatgcctgggcccaggaggtcgagattgcagtgagccgtgatcaccactgcactccagcctgggtgacagagcgagacaccatctctaaaaaaaaaaaaaatactatatttacctctctctctctctctctctgtccaatacaccctaatattcccgtccccactatggtgatttacctcttcattttgtttacggtgtgtgtggagcgggggtgagagagcaggcgtgcagttgccttggttcagcagccagcccatcgctcctgcctagtgtgactgtgaatactaggtgtatgttacaaccgggagcggtgtacactcggggaaccgcatctttggaaacttcggtccgtagcggccgctaggattctccgcagccccgcaccccggtggccgaaccgcctgccccggcccagacgcagccgccgcgcccgcccacccggctgcgccccggggcgcgcgcccgtgcccggcacccgcccgcgccgccgcgccgctccggagcccgctgcggtcacgctgcgcccggcgccgcagggtgggcggcgaggcactcacgagggggacgctgagggcttccgcgcgggccacccgggtcaagcgcgctccgccgggaaacttctgcgggcgccgggctgaagctccgggcagggctgggaaggaaaggtaagaaggtgagcccgggggcgctgcgtccgccgcc

SEQ ID NO: 36760 - DNA, 2300 bp, Homo sapien
gtaatcttttaagctattttatataaggttaagatactatataaaataataatttttatcatatcatctgataaagcaagacaaaggaaaaaaaactgttttaagttagatcagcatttcccaaactgatactcaaaggaacattgtttcatgaaatgttaaaatatatgccttgaaaaaaattttatggatgaaagtttaaggaatagtatatcttaaaaatcttgggggtgggcaaaccaaaacttttttttttttttttccagtaagtaagtatgactatttctatttccaggagtgatctatgcaggagaaacagcttgggaaatgctgaaatttctgactgtaagaaatgcttggatatatgtatctgtttgtttggataatttactcatgtgatctcttggaaccaaggatccttggatccaaggaactctgatttctaggaatactttgtaaacaaatcaatatacaaataggtgaataatctgaattttccagcccagtgatttttgaaaggaggcatccaaaccaaaagagccccagatcagatttttacccaactaagtggtcagtgtttgtttatgacagtgaaccccctctgacagcttcatcacctctaacaaacaaacaaacaagggagacagagtggatgaacaacttattttcaaagctaacaaacattctatgacttaactgcttgaaaactaacttgttgcagaaaggtgaaatgctttattctcacagaaaactccacttctggagttgcccctcaatatgaagaaaccggaagtaaaagcctgtcattcttaaataacatttattattgttgcaaagaagtcttctccatgagaacagttctcacatttatttaaagatatagaggttatggatatagataagtatgcccgactatgatccttaattcagcaatctaatattcacaatgtgtttgttgccatttagctatttatcccaacatgcccttaaaaaaaacaccaaaaaaccacatgtgcctagacagggtggaaaaagaaacaccaaggccttgctaaaaaggagaagcctaaaaaagataaaattcccacggcagttctgttcaactgtagcctgtgagtgcaggaataatgttcccgtggggaagcattatgcccagtggtttcttggtgtcaacgtgggaaagcccttgaggttttctgtcgctgtcaggaggaagcacgaaaactgtttatggaatccagtcgacgttcaggcaccgcgcgatgaacgcaaacatgtctgagacttcctctatcactttggctgtgggcttccccgccccgtggcccgccttggtgtccacgtggataagcagggggttgctttgcttcctgctgcggcccacgatgtactgaagggtggcaatgaacttcagggagtgaagcgggaccacgcggtcatcatggtcagcagtgaggagcagcatggacgggtactggatgtcatctgcttctggtaacttcacattatgcaatggagagtatctggaaggcaaaaacacctttgtgaggctggagagcaacagtagagttttatggcacagggacctaggtagttaattagcagtgaggactgcagttaactagtacgtgagtgaccaccatggactgtgcctatgcgttaccatttaggccatgactggcaagggctcctggaaactggggagctgtgtcatttatgtggctccaactttgaaagactgtaggaaggaagctcacaggtctgttgaaacaacccaaatcacaggcatgcttactgtctcttaaggtgagtagtttcatattctctaggctttttttttactgctacaaagtggagtaataattgtcattataaccacactcagtggttcaaaaaaagtccaagcctttcttttgttgagaaacttgaaatccacagtataaaggggcttgctgcccctttaataacatctataaagcctttattccaggctcagttttgcaatcttaggaaaagcacatgtcctctctgggcctagtttctttgtaaaccgagaaacctggatgggctgttgagcctcctgctggctctcagtccggcagaaagcaacagactttgccagaggaggagggcaccttccgaagtaccaggcaagtttcctgggtaagttaacaaaaagggtgttaagtataaaagtaatgttgattttaacagtgactgataatagttgaaatatctggatattttttctttacattctcctaataggggtgtcatgtttttcaatgtatttaatattt

SEQ ID NO: 36761 - DNA, 2300 bp, Homo sapien
gtggcacttccattctgagatagttcaaatacttcctttctctgcattgtctatggaaaaagttgactttgcagtcaacttatgaatatgaatcttgtattgtcttagctgtgtgatgactttgaactcattcccttaaagctgctgagattctttttcctcatctgtaaaatggtctttgctataaggattaaaggagacaacacattggcaaacaaaagtgcaactaacgtggtcaataggaggggaaagggtgctctcccatcttccctcccactccatctcactccagatgcagacaacctactgctgggagcctcttgcactgtctgtgccactacaaacctttacctctcagggcccagaggaactgggcaccagaacggctgactgaaagggaagagaggatgatacctaggtttgatttgtcctttgggtaccacaattcccacattttctttaggtcctgctaaattgaagttttccctgcaaatgggtgccctgtagactctagagtatctctacttatttatgagtaggaaggccgtcagagtggttaagaatgagcattggtattggagagacctaggttggaatcctggctctactttttcactttttgtgaagtcctgggcaaaagtcagcccgttttccttaactataaaatagggacattagttctagatagtttcctgatacactgaaaaaaacactccataagcattaatattatcattagggggtctgctgggtcaagtgctcctgggttgctctttaaaaaatccctcacagtggcagaaggaggagacaatgcctgccagtccctgcgtcaggtgacagccagggaaggcacgaggtgggaactggaattgggacttctgggctgtagtgggctatgcccccgtgtttgcacaaagtttgttatcaatagcgtgagttctcccagaattgaggattctcagattgccccaggagggggtatctgggatcagatgcagaaaatgattatgacacatcactatgaacagaaatggtgaactaagggtgaggcatggaattgggaccatatcacaaaagagacggaggacacaagtttataatagttaccatatccacttagattccggaggtgaaggactttctggtcacacctattctttcttccaggactttttggaagccagggatagaaaacacactgggcacacactatacccctgatggctggggctataaagtctcttctgggtggtccaggaagcaagaccagaacacataccgctgctggcccgaggatgatgacatgtaactattaaattttcatgggtttgaggtcaagtatcttgtctattatcttttcttcccataaacagtaggtgctcaataaacaagcatgacagcaggagaggaaatgaggaaaaggcaggataaataaaatacccctgatgagttccaggcctcttaatcttggttctttctcaatcggtaaatatcaaataagggctcaaccgtagtcctgccaacacctccaaagcatctccatagtccggatgctaaaccacccagtgtccaccaggggtcctgggatgaagggagacgtgtttctttcacggtcatcatgatcgattacttcttcccttcaagtccagagtcgcaggcagtggacataaggccacctccagccctctgcttccaaggctggggagaggcaaggtctcccttcgccgccgtaaccagcccgggaacaggaaggctggggaaggtgggggactccatcagcaaggaaaccctggggcttcactctcctacaggcggtcctgcgagcgcggccaaagagaggcagggcgctagggaaggcgcggggacccggcctcggtggaaggacttgtccccggcgcagaggacgggcgggcggccgggcgtgggcgagcgcgtagccggcgtgctcctccgtgcgcccgggcggcgcgggcgcggccggcgatcctgcagagggagctgtgcgccggccttagcgcacgctcggtgccgcccgctccctcttgccgccgccgccgccgctgggcccgcccgccggggaggggctcccggcctcgcagacagcggcttcctgctttctgcacgtcctcgccgccgcgccgccagtccgtttgtgctagctctggccgtgagccggccgcccgctgccgccggccgccccgcagctgcctgcgccccagccgcgcctcgcggccagcccggctagctcaggtccgctcccggagcccgcgcccctccacgctgccccctgcctgtccccg

SEQ ID NO: 36762 - DNA, 2300 bp, Homo sapien
tgtctgaaaatttactttccttaaagttctacccgtggccttgtccagctcagctgggacacctggaactaattttagggttgcctggctaagccccacactggtatttgaagtttgcgtcctccctagactcaagcccatttcaccacctctgaaggtgagtgcaggctgatattaattaacagtgagttgattcactggcatcttccagtcattaaagcaaatatttggcttaaaatagccttcttcccacctcaaatatcaaactttttgcctattcccttactctatcatggttgactcaccagcagttgcatgatggtgtatgtggcctaagaacagagtttgattctaaaagggaagtgaaatactctttaacatctgcaagtgagactgtttgaacagcaggccagccttcagtatgactacattgtttttctgtccattgtggtgctgactcagcatcagttaataaaccctcttgagcaggctggatttctcttgtttaattatcagcttggagctttctgaggactcttaggaattgttcattcagttttccacccccagcagatctgccttctaaaagtcctgcttcctcttggtgctagcgtcccctctggcataacatgcaatcacaggtgggccacgcagcaagcagcgagtgtgtgctaatcatgtcccctagtgggaatttaattgttctgtactgagagagagattgcagcaagactttagacaccatttcctggcaaataatcttttgcctctccccctctcccctaaaaaaaattctagaaaagttttctaaaagtgagaaaagaaattttaaagataaacagacatattttttaggattgagttgggcttttgttttgctttgtttcatttcttcctgtaaacaaatactcagatgtccatttcattgtatgactaagttggtatcattaggttggaactgggtgtgtgtatgtgggtgtgtgtgtgggtggatgtgtgtgcacacgtgtatttaaaatgttagaaaagacattgcaggtcgaaggagaaatgattttaaaaaaacctacctatggtaaggcaagcaggaaaaatggaagacctggatttcaatgatctaaataataattgaaatggggtgtttgctataaacattgtttctctgaattaaaggattccttgctgaaggcacaagaccattgaaggaagtaaagcatctggtttgttttgtaatgagaagcaggaatgcaaggtccacgctcttaataataaacaaacaggacattgtatgccatcatcacaggatgtccttccttcaacagaggactgactgggctggaggaaaagctggccggggctcagaataagccccactaattactgcctccgaccgctttccacttgcagtgatcagttcaatattcctctgaactgtgaaacgactaatgctctacattttacttacactcctgggaagtcagcctgtgggttctgggaggagaggaaaggaaaacaaacaatctgtagaattataacttttgcctatttccctatttactaaatagttaaaagaggaaagttagttctgccaagtttgaacgttagcaggagaaacggaatgttacaacttttggggcggggggcggggaaacgtgcgttacatacacaacagcttgaggaccagacagctccactgtattacactagctgcaaaaacaatttaacttgctcttttgaagtaagatttgtgtcttttgtacctggggatttgagctgagaaatcagaaactgtgtaggtaaattttaagtttccttaatttaaggaacgtgcgccccctaattctgccgcgccaggaaggagggcgatctggagtgtttagaatacaatagagcccaagtaagcgttgaggttaagtgccttcaaagggaagtaagaagattccaagtcaatgttgaaatacacatgcgaagagaggaagctctcggcggctgtgctagcaatctgggggaaagccctgggctcggccaggtggtgttggccacgttggccacgcccccacttcgcgcagccgagtggctaaggaaatcttaagcagggaggggaagccagacggttaacacagacaaagtgctgccgtgacactcggccctccagtgttgcggagaggcaagagcagcgaccgcggcacctgtccgcccggagctgggacgcgggcgcccgggcggccggacgaagcgaggagggaccgccgaggtgcgcgtctgtgcggctcagcctggcgggggacgcggggagaatg

SEQ ID NO: 36763 - DNA, 2300 bp, Homo sapien
aagaatttagtaagcgtttttttgtgcatacttacatgaaatgtacattatttgaattctttaaaaagaaacagctgcatgataacaaaaattgtgttatgcttgctttagctggtatttttgcctagaacgattatatcgttcggacaagaagctattcctaagaaacaatatttttaatccaggaagtttttcatttttagaaatttatcttactatttcccaagcaaaagagggtagttacagattcactaagaatcatgtgctcacaatttttatttaataattattcctccttaaaatatattaatcacctgacttacaatggtggaaccatgagtgcatttttgcctttattgtcaataacgtcttctcagaagtgagccacaaaggtgcatagttcttggagttaaaggtctgaattaagacaatccagcataagtctcattaatgtgtgattattttgagaaaaggcaagaagtacctaagaatctccccctcactgtccagttccctgtttcatttaaagattcactgtaagtaactgaaaggctttccttgggaggatttatttgaatcagtctttcacatgcaaaggatattgtagaacatctcgtttttgctggcaggaatatgaacatctgttgtgaggaaagaaaaagtttcatgcaaattacactgccaaagaagggatgttcaagttgagaaaccagtgacatttcttgtaactgtactatgaatcagcgcattttaatcttctagataatatatggaagtgcaggaaggtggtaggaaacggtgttcattttacatatgcgttattttattctgtgtgagtgacttcatggcaccgacattgctgtttttaaatgaggatacagtaaattgcagtccgaggaaggctaactggaatcaacatacccgtagctttagaaagcagtttccgcaccagcgaagagtacaagagcgatggaaccccatgttcctggaagtttgcacatcagagtaaacaaacttgaaaacccctcttgatagcagaattcacccagccttgttccattttctcttaacaaaacacaccgcaaaagctctcacaagctgctttgatgaagccacatgtatttcccccttcacaatttacaggaagttactcttaaaagaaagtgattctggtgtttaccgcctgtgttaaagggacagagttcctttttatttctgataacgtttgagcgaaatacagaaactatctgtagactagcatagtcggtacgtgagtaaggaaaagcaataacctgctgtccggtgagcacaaaattcctgctacgaacagtgccttactgctgcttggagactgcaagtcgcagatcacactaggtattgactgattgtataaggaaatttcttaaagtctaaagtaaaggtggtacctcctaaaaagaggggaagagagaaaactttgtgtggaaggataaggagtgtgtttatagtttcagtaagagtgtacgttttaatttttcttcttcctctgcctctttgccaagtagcctgagtgcatctgttatccagaagtagtattactctaggacaaacttcaaattcttcattctgcgttgcctttaaggaacaacatactttcttcctgttctttttccaaaaacacacgcctatggctctgtgtgtggtgttttagccagcctcctcccagataaggggttcccttccctcctttgcattgaaaggaaagtgcaagtctggacatgtttatcaagaggaaaagtgacttctcagtaatagactgtcaaattcgggctgctgcccgagtgttcgctttgttatggcaggtgaagttcacctttgccccacccagtgtttccacaaaaaggcaaggttccaagtattcatatgaacaagtgttactttaggacttggagggttgggggtggaggatgtttgcatagttgaagccttgggcgggggtgtaggaaacggcgagtacagaggccatagaaaaagctaagactcagtttgacgtcgtcagccggcttggtcttctacccagtgactcaaagcactaaaagtcagcataatcggaactgaagtcagtagcatcgcccatttgccattcactgcagtagcaaaagtagtactctgtggtgggttaatcggtttgaggcagctccttaaatgaacatttgtgtttcatttttctgttattttcccgaacatgaaaagacgataaaactgaaatggaaaaggtaactgacaaaagtgtgccttacctgtttccgccctgatttctg

SEQ ID NO: 36764 - DNA, 2300 bp, Homo sapien
gttgtgcaggctggtcttgaactcctgggctcaagctatcctcttacctgggcctcccaaagtgctgggattacaggcatgagccactgtgcctggtcccaacattttgttaggaaataattttgaacacacagcaaagctgaacaaattttacagtgaatacccatttacaatgaacctagattctaccatctagattctaccattatattttaccattatattctaccattatattttactatatttggttaatcacatatttatccatctatgcgcccctaaatccatcttattttttagatacattttaaaggaaattttatatacttttgtctgacactgggaaggcaatgcaccttaatcccacaagctttcttacagaggctaatagctgtttactggggacactgtagtgaggatttctgcattgagtaggtgaagaggaccataactgtggctttcaaacttttctgactgctacccttactaagaaatgtatttcacattcctatccagtgtacaccacatacatactgaagtaaaaattttgggacacaatatttaccctttacatgtgtgaagcatgctgatattttctattttatttcatttaaaaagatgctgggcatgcttccctaacttgatttagatacccactaatgtactgtaatttaccatttgaaaatcattgtacttagtccaactccaagaagatttttctttttaaaagaatcctgtggctactactagaattttccttatgttcccaattatcaagaacctgttttgagtctcagcacagtacttacttaacatgcatggcgttaaggcacgtgtaattaagagaaaaaccttaaatgcctgctaagacttctggatagagccaattcaaagattctttattagtaagtttaccaattattactattttttttttgagacggagtctcgctctttcgcccaggcgggactgcggtggccctatcttggctcactgcaagctccacctcccgggttcacgccattctcctgcctcagactctccagtagctgggactacagaagcccgccaccgcgcccggctaattttttttgtatttttagtagagacggggtttcaccgtgttagccatgatggtctcgatctcctgacctcgtgatccgcccgcctcggcctcccaaggtgctgggattacaggcgtgagccaccgcgcccggccccaattatttttacaaagagtaagataaagatatgtactcttggatgggtgggagggttcagtgctcatatagtcttctgttaaattaggttattaatgcctgcggtggttccaacaaagtagagaagaagatcaaataagaaaatggatgggaaagtactttgaaaactaatgttttattaatactgttgtgtgatgccaggaagaaagggatgttgcgatcaagctctagggaggcagtgtttcagtattttaaaaactgtttttgtggaactgttaagttaacctccccaagccccaataactacgctttgacgcaagattctcagaagagggtagaagctatgaacttggagaggtttggtcgcgagttcaagcgtactgccccgttggcgcatgctcaagagcgactcgggcctccttgctgggttaggcagaacacggagggcggagttcggaccacgtggggtctcgtgacgtcatctccgggcgccgagggtgactggacttgtggtgcgctgccagggctccgcagcgttgccggttgtattcgctggataccagagggcggaagtgcagcagggttcagctccgacctccgcgccggtgctttttgcggctgcgcgggcttcctggagtcctgctaccgcgtccccgcaggacagtgtgtcaggcgggcagcttgccccgccgccccaccggagcgcggaatctgggcgtccccaccagtgcggggagccggaaggaggagccatagcttggagtagggtacgtgtgtgtgtccaccttgtgtgaggaaattcctagaggaggagggctggggaggggccaggtaggtgtggtaggaaggaggggtgagtagttgcctggaggagcgcccgcccggccgcgatggcgggtgaaggtggttcctccgggcaaggtggagttggcgagacgccggcccggagccctggggccggttggcgggtgtggcctgcggggtccctcttggggtacatgtctgttgcttactaaggtaggaaagcgagagtctagtcgcaggctctagagttcagttcaggacctgaattgttt

SEQ ID NO: 36765 - DNA, 2300 bp, Homo sapien
gtcttttagaagaagagttagttatttctgttgtatgttgtagatgggtgaggaagagagaaggacaaggggagaaagaaagaaaatggtcaatttataaaaattacaggaagttgaattttaagtcaaatcaagtaatcacctttcacctattgggtttcttcatacatagtttcccccaaaacaatttttttttttttttgagacagggtctctctctgttacctagactgcagtgatacaatcatagctcactgcaaccttgacctcctgggctcatgtaatcctccttcctcaaccactggagtagctgggactgtaggcgcatgccaccatgccctcctaatttttgtgttttttgtagagatgtggtcttgccatgttgtgcaggctggtcttgaactcctgggctcaagctatcctcttacctgggcctcccaaagtgctgggattacaggcatgagccactgtgcctggtcccaacattttgttaggaaataattttgaacacacagcaaagctgaacaaattttacagtgaatacccatttacaatgaacctagattctaccatctagattctaccattatattttaccattatattctaccattatattttactatatttggttaatcacatatttatccatctatgcgcccctaaatccatcttattttttagatacattttaaaggaaattttatatacttttgtctgacactgggaaggcaatgcaccttaatcccacaagctttcttacagaggctaatagctgtttactggggacactgtagtgaggatttctgcattgagtaggtgaagaggaccataactgtggctttcaaacttttctgactgctacccttactaagaaatgtatttcacattcctatccagtgtacaccacatacatactgaagtaaaaattttgggacacaatatttaccctttacatgtgtgaagcatgctgatattttctattttatttcatttaaaaagatgctgggcatgcttccctaacttgatttagatacccactaatgtactgtaatttaccatttgaaaatcattgtacttagtccaactccaagaagatttttctttttaaaagaatcctgtggctactactagaattttccttatgttcccaattatcaagaacctgttttgagtctcagcacagtacttacttaacatgcatggcgttaaggcacgtgtaattaagagaaaaaccttaaatgcctgctaagacttctggatagagccaattcaaagattctttattagtaagtttaccaattattactattttttttttgagacggagtctcgctctttcgcccaggcgggactgcggtggccctatcttggctcactgcaagctccacctcccgggttcacgccattctcctgcctcagactctccagtagctgggactacagaagcccgccaccgcgcccggctaattttttttgtatttttagtagagacggggtttcaccgtgttagccatgatggtctcgatctcctgacctcgtgatccgcccgcctcggcctcccaaggtgctgggattacaggcgtgagccaccgcgcccggccccaattatttttacaaagagtaagataaagatatgtactcttggatgggtgggagggttcagtgctcatatagtcttctgttaaattaggttattaatgcctgcggtggttccaacaaagtagagaagaagatcaaataagaaaatggatgggaaagtactttgaaaactaatgttttattaatactgttgtgtgatgccaggaagaaagggatgttgcgatcaagctctagggaggcagtgtttcagtattttaaaaactgtttttgtggaactgttaagttaacctccccaagccccaataactacgctttgacgcaagattctcagaagagggtagaagctatgaacttggagaggtttggtcgcgagttcaagcgtactgccccgttggcgcatgctcaagagcgactcgggcctccttgctgggttaggcagaacacggagggcggagttcggaccacgtggggtctcgtgacgtcatctccgggcgccgagggtgactggacttgtggtgcgctgccagggctccgcagcgttgccggttgtattcgctggataccagagggcggaagtgcagcagggttcagctccgacctccgcgccggtgctttttgcggctgcgcgggcttcctggagtcctgctaccgcgtccccgcaggacagtgtgtcaggcgggcagcttgccccgccgccc

SEQ ID NO: 36766 - DNA, 2300 bp, Homo sapien
ggtcaggtgcaggggctcacccctgtaatctcaacactttggtgggaggctgaggcggacaagtcacttgagctcaggagttcgagaccagcctaggcaacatggaaaaacccagtctctacaaatgtaccccctccaaaaaaaaaaaaaaagcccggtcctgtggtgtgtgcctgtagtcctggctgctcaggaggctgaggtgggacgatcacttgtgctcaggtggtcaaggctgcagtgagtgcagtgagaggtgatggtaacagtgtactcctacctgagtgacagagtgagaccctgtctcaaacaaaacaagacaaaaaactgctacaatataagcaacaatatagatgattttcaccgactaatattgagcaaagcaaaccagaaacagagtacatattgtgattttccactaaaatgaaattccagaaaaggtcaaattaatctccagcaaaagaggatgaaataatggttaacttttacaggtgggaggggtaatgtactggaagaggacagtagggagatttttaaagttttgaaagtattctatatttttataatcatatatatttacctattattattatttgagacatagtctcatcctgttgctcaggctggagtgcagtggcgccatctcggctcactgcaacctctgcctcctgggttcaagcgattctcatgtctcggcctcccgagtacctgggattacaggcgcacctccaccaccacgcccagctaattttttttttgtatttttagtagagaaggggtttcaccatgttggccaggctggtctcaaactcctgacttcaagtgatctgcctgcctcggcttcccaaagtgctgggattacaggcgtgagccaccgctcctggcctataatcatacatttaaaagccacatacggaagaattttctaggacaatgtcaactctccattaaaaaacttttcacaccccaaccacataaatatgtaaaaatttgagttttacccttatgatttgtgcattttactgtctataaattacatcttgataaaaatgtaaataaaaacaaataaaaatgaatgttccttgaatgagtgaataaacgaatgaatgagttgtgttttcaaagaggaaaataaagacattaccgtgaaagaggatcttgtactgcattgaatttttaagtagtgcttagttcttgcactttctttgctctaatgatgcccaaaataattgttcgtttacttactttgcttaagtattaatttcctttgctatttagccacgactgtgaagttaagacaagaaagtcatcaacagtaatgcagatgatgtaaataccttgtgggactggcatttaatttactgcgagggatctattaagctcttggggaattggggaatatgcctaattcccttctggcgtttttaatttttttaatccttttgtgttttatgagatgtgagtacaaattaattattcagactcttgagagaggagacgagttggcggagttgccacccgtgttcacgaacaggaacagaagccaccagcacatgacattgcccaagccacccagagatcagagtggaagagtcctaattgctgggcggcccagccccgggatgtgcctctcccatccttctccaggcggggctcgtggctaagcagcgactcaccctgccagcctgtcacaggccaagagcggccaacaactccgcaggcgacaatggccgctgcaccccaggcgctgtggaagcccgacccggctctgggtcccatcttagagcctgggatgcagtgtcgggagtcgcggtgcccagagcatccagtaggtgtcgctgtcccacggccgccgcgcgcccccggggtggggagccggggcgtgtctgcctcacctggggctcccggcgcgagcgcctcacctgggctagcgccccttgccgcccgcgccgcgcgggggcgctcttccgcggctgggtccccgcctccgccccaacagctcgggctgcagtgctgctcgcgctgcgctgggtgctggttctgcaacccgcggccgtccccccgcatccgcgacgagggggcggggtcccacggcgcgctgagaaaggcgggcgagctggcgctcaggtgtgttcttccatagggcccgggcggcagagaggaccgcgtcccggcagtcggagcgggaggaggacaagacgatgccgctgtccccgccagcccagggcgaccccggggagcccagcccgtgcaggccccctaagaagcacaccaccttccacctctggcgctccaaaaag

SEQ ID NO: 36767 - DNA, 2300 bp, Homo sapien
atggggtgggcaggaggcgacttggatttgaattctgactttactgctctgaccgcctctcccccccaccccaattttgtgtctctttataggctggctgagcttcctttcctcatctgtgtggtaacagcatgaccttactgggctgtagcggggtgacactatgttacagtaccaggactgtctcaacaaatgcttgttgacctgttaatttcatgcgttatctttcctatttcccatcgccaaagtccatttgctgcatgtaactcaaacgcaatggagcttcaaagggtgattggggaacctccccgtagtcggtactgtcctgaatgttccttttccaggaaaggtggggctctttcctgcgtcgccaggactcaagctagcacctaggttttgaatgtttaaaagttgattcttaagaaatacagtagccgcacgtttggcctggtttcagaggagtccttacgcaaatacacttccctctcctaggagccaggctgggctcgccgcccctgctcccccgctttcccaggctcgcctcctcctcttcctgcccacctctatgccccgcacctacccagtccccactctggcaaaccccggagcgccaccgcgcccattggcgggtttgcttttattggtttgttctgcgctccctcccgccttctggcgcgggcactggatgctagccgttttgctccaggagatataagaagcccaggttttcccccttcctgggagcgctgcggatcattcgcaggcggcccggcaccctcgcataggtgggccggcccctggggctccagccgtgcgaccccggaaccacacgtgtggcgaggaacgggtcccggggcggagtaggcagagtcccaagcgcatccttcagccacacctcctcggctctagggggcggtgagcaaaggcggtcacccctgcaacctcgcccgctacccccacgcactcctccgtgttcacatggtaggaactcccacaggcaaaagcctttccgatgcgctctgcagccgcgggatcactcgggtgtttgaacgctcgcgcgctcctcccattggagctccggctaaggcggggcccaggtgcttgcttcctccgagcttgcttaaggttttcatgttgcaagtactagatgttgaacccaggtggcttcttactgttctggaggagaaggctgctaggactggttttttttcttcgtcctccttccctcctacaaaaagaatgggcggtgtttcgggaaaaagtccgccttaggatactttagtgtgtttactgctgccccatggtcacatgcacggctgtttataaattgcatctttattgaggaagaaggtaaaaaacctagagagggcaaggaactatttattttgtatatgtgattatttggaccgttcaaattttcctttaaaaaacaagaattataattcaaagaaaatgctattctgactactgccagaaacttaaggtgtttaagcaaaattcaaaagtaaaaccagagtttattttgttggaatgaatgtaacataaacataactttatcattttcaattagaaactctggtctgttatcattttggctggtggttctgtaatgtacgtctaaggggaaaaacaccagattctcatatgttccctcctcatcccttttatttttcagtccagagcacaacctccagaagacaacagaaggaagccagttttggggaaacttggcactctattcactgcaggaaggagaagaaacagtagaaacgggttagagagtcccaccagatcaaatgccaaaccactctctcccaaagatgtggtagcctctcctaagctcccagagagagagagtgagaggagcagatctcagagcagccaactgaagcaaacggacacaagcgaggagggctccccgcgggagaatccccgagaggcagagggcgagctccccgagagcggtggccccgcagccccccctgacgccgagctgtcacctcgctggagcagcagtgcagcggctgtggctgtgcagcagtgccatgaaaatgattcaccccaattagaacctctggaggcagagggagagcctttcccagatgccaccaccactgccaagcagctgcattcctcgccgggaaattcctccaggcaagagaacgcagagacgcccgcccgcagtccgggggaggacgcttcaccaggtgctggccacgaacaggaggctttcctgggtgtgaggggtgcgccagggtcgcccacccaggagcggcccgcgggaggactaggcgaggccc

SEQ ID NO: 36768 - DNA, 2300 bp, Homo sapien
gcatggttgtgaggattagatgaagttctcagtggcattccttgtaagctctagggagatgttagctgttactaatgtttggcaccatgacaaatgattagatggaactttggagcaattaataatacaaattaaaataaggggacaaagccagccaaggagaaaagtaaaagatcaagaataggggcatataatggctttatttttccttgagtctagtgtgattctaacacctgagtccaaccattcattatgtaggtccgtatcctctcctgttcttttcctctcatcctgggtaccagacagaaggaaaaactgaaacaaatgatgagtcggctccctttctttccttccatggtggctatttaggtggctgatttatgaagaacctggatttcagggtgttcctttcatcctggaacctggtgaataccctgacttgtccttctgggatacagaagaagcgtacattggatccatgcggcctctgaaaatggtaaaaatgaaatccaaatgtccttgtggtgattctttgtcagcttgacgtggtaattcacagggtgtgactttgaagcaataaagctgacttttaagaaacaaatttgtagtagattggacctattgctcaatagaaatcatggaaagaataacttgctagatgctatagattaaaaaaaaaaaaaaaaaggcaggtaagactatgtcctttgtctttaaggcattctcagccctgcagagctgcagatgggtgcgcaaagcttcagcgcagtgtaggtttaacaagtgaggaaagtgaagaattaaacattggtggaaaaacaggacaaagatacatacaattccaagttgtgggtgatgtgacagaaaagggataattaggaaagcttcatgctaaattaaattcagtcttaaaaaattagcaggatgattttttaaatggagctgtcggtgaatgcactgtgtgagctagggtgcagcctgagagagagcagggcacgctgaggaccggctcggctgccgtgacacgagtgggtggtgtcttgggggtctctggggctggaccagatgagtgttgtcctcctgagtatctgctgtggaagctttgtgcttcctctcccttgtcccagtgtcttgctttgttctttgtttcttccgctagactgtcagctttgggaggaagcaggccgcatctgtcttgtccccagtgttgagcgcagtgtgtgctgcagcatggaagttgttccctaaatacccacagtgagatgaggctcccattacaaacatgtttttgaagctgcacttcgcagttgtcttctgagacagtttgagacaaattagaaagttaggaagacaatttttttaatgttaattttacccatccttccaaagtatttggtttaattatctgtatgtttgctggtcttaatgcaaatgatttgggcttttgtttctaaaattaaactcactttcaaagaacaaagttttgttagttttgtgaatgtatgaaagaattcatccaggttttaggagcagtttgtaatgatgatgaaaagtctccaaagtctatggtgttcaaacaggattacttttgaaaaggtcatgtgcttagttgtataatctctggtttgctgataatatcagccacattcctttttcctttttttttttgcttgttttttcataaaagttaaggaaaccaacacattcttttataattatagttcatttggtgcctttgagcatccttggtggtacttttttttaaaaagctattaaagatatattaattttaaaaaaatccaactttcccattgctgatttaaactcttgaactatttaatatttttgtgcaatatctttttaatgtaataccatttctctgattttagtgagtttttttgtttttaaaaagctttctattttataacaacccctcatagactcatcctttgggatgttttaaattttatttaacagtttatctaattattccatgagtcccccagatcttattatgtgaacttcaacacataatagtttcgtaagccctggttgcaaaatcaaataccttcaggggccaggcagcaaatacaaatggctgagagttaaaccgaagggaatggtagagacggcaaccccgggcctgtgcccagctgaaggatgaactgagggcaggatcgttaaatgcagaagccgaagacagtggcctgggagaatctgggtccagagatgtcagctcttggaactgctttttcaagagaagtatggatttttatgataaattttccaagttaaaaaaa

SEQ ID NO: 36769 - DNA, 2300 bp, Homo sapien
tggctgttcatattctagtaattactgtacttgagtttttgtttaaatcagccctttggatagtaaaatcataatctgctctaattataaagtgtgtggactgttttaggcatggtttactagaacagtaaatgaaagggaactttccagggcacatggcaggttgggtcacaaagcaaggagagcctggtgggcctcaggacaggtaggttcagtcacgttctggccaatagtcgattgtgtcaccctggacaagtcatttcccattcaaaacaaataccaacaaatacttccatgtgatgctgcttacccatctgtgggctttggaggacagagattttgtctttttcatctttgtatatctagtgccagtctagttcctggcacctggtaaatgaattaacttactgtgtcttaggtttttcccatctgtaaaatgggaacaccaatacctccctaggagattaaatgtgataacagatgtggaaacattttgcaaagttctgatcaccctacataatacatacatagatattattcctttaagctttgagaggatcatgagaatgatgaattaattgaaaagatacttaatgtcttcaatataatggtattaagtatctctttaatataacagaactgaaaaaccttttcctttcaaagactttatctttgcataggaaatagcatcattaaattggttttgttgattttcctctgggtgtagatcacttaaaagagaaaaaaacattccaaaagagatttatttttagtatttctatgagtttgctcaattttgtttatttaatttttacatatttatgtgatgttggaaacactgttggaaacaatattttagttctgttctgcatttttaaaagcatttcttctgttaacttctttttcagtgtggtttgttgtgtaatagacacagcttcctaagatctttctgcaaaaatattttaaggttgagaatgaaaggacttattgattgcttattaaaagaactaggttcttcttgaaagtcctgtttgttttgtttccttagaatacaattagaaaaaaaaaagcacagagaagtattgcctttgtagctttctcaagaaatagtatttgataagcgagaacgccaaaaagttcatgtcaagatacccttacgcttaccatttcttttgcattaagttttttttcaactcttattttagattcagggggtacatgtgcaggtttgttacatgggtatattgcatgatttcctgaagtttggggtacggttgaacccgtcaacctgagcatagcatgcaacaggtagtttttcaaacccccctccctcctggccccttttgtagtccccagggcctatttttttttcttctttatgtccatgcatgaccaatgtttagctcccacttatgggcaagaacatgctcataagtatatgttcttgctcataaatatttggtatttgattttctgtttgtgttaattcgcttaggatagtgacctccagttgcatccaagttgctgcaaaggacttgatttcattcttttttatggctgtatagtattccatggtttatatgtaccacattttctctatccaatccaccattgatcaatgaacacctaggttgattccacatcttgatattgtgaatagtgtggcagtaaacaagacacgtgcaagtatctttttggtagaataattcgttttcccctgggtatatcccagtaatgggattgctgggttgaatactagttctatctttagttctttgagaaatcttcaaactgctttccacagcagctaaactaatttacattcccaccagcagtgtataaatgttccctcttctctgctggcttaccattctgatttgtcctatagacaaacccatctgcttctaaaggttaatggagaatcagaaaaattaaaatttcaattggcaaaacaaatgaaagtttctgtatgatacatagatatccaaatatgtgatcgttttatatgtaaaatatgaactccaacaagtgattgcttttgtttcttagatgggtagcctatgaaaatcctgacttcacaggagaacagtatatactggataaaggattttataccagttttgaggactggggaggcaaaaattgtaagatctcttctgttcaacctatatgtttggtaaggagttatatttttgtatgagaatatttaactgaattctggatttccttaatgtgtgttcctggttcatgtaatagtaattgctatggaaaatattctgagtttatttttagcagtaatt

SEQ ID NO: 36770 - DNA, 2300 bp, Homo sapien
ttggtgtctctggagattttgaaactcttgtcaacactgaagcactctagtgcaataaagtttatcaaaataagaataaacaaagatctgcataattcttaactagtttgaacctcaggttgatcatctataaaatgagtatttcacctgtctacatattgacaaatctgttgtaccaaatgtaaggtgagggagctgtactatatgttactgtttggtttctgaatattgcatttattttcttatatccaagggtactacttgcattttatatgatctttgtggtctccatccagcctgtagttgcagtgcttagtttgtgttccctaagtgccccctttaatgaaggcaaaggcattgtttgcttctgagcatctttccaacttctcagattctgtctgatcctaagtccattgttttaagtgggttggccaagctacctacctggagatcattcagaagtgacagccacttttgctccccatacagttaccaaagcccctgatgaaaatgtccagattcgttctccattatccagaaaagttgttttttaaaaatcagattacagcactttcttgtccctacaacttttttttttttgagacgaagtcttgccctgtcgcctaggctggagtgcagtggcacaatctcggctcagtgcaacgtccgcctcccgggttgacgcgattctcctgcctcagcctcccaaatagctgggactacaggcgcccaccaccacacccagctaatttttttgtattttttagtagagacggggtttcaccatgttagccaggatggtctcgatctcctgacctcgtgatccacccaccagggcctcccaaagtgctgggattacaggcgtgagccacggcacctggctctttacccctacatcataaactttaatgacagcattggcctaaatccctgattaaagtaaaattgagtcattttgtagtgatgatttaaaatagagtatgtaatatactcataaaaatttaaaaaaattaatggagtatgtagtatggttacattatcaccagttcgctacaaaacacaattgtgctgactttcctgatagggaataaaaaagtgcccattaatttaaagcagaattaccccagatgacatgaacacaccatctgcacctgtcaatagcaacacactagttcactgagttcccacacagaggttaggtcattcttatgttatttttaaatgactatcagtggttctccgggtgtgggcctcagaccagcagcattggcaacacctgggaacttgttagaaaaggaattatcaggccccaccccagacctacagactcagtctctgaggatgtggccccacagtctattttaacccgccctccaggtgattctgatgcaaataaagtttgaggacaaccacgctaaatttattctcccccaagcaccatcagttcactccctattagcttcattgaacacatgttgcattgaaatcctgtaggctgtgttaattcctttgagatcttagatcttttcaatgaaaggtcacgtgtatacatgagaatcatcaactctaccgaactaagtgcaatcacggcctttcagcttgtgatttttagcctaacactattataataaaataaatgtttgaagtcagcctatggccagattctggttcagcagttacagctgtgagattgtggccaaactggccaacccctttgagcttccggggttttgttgttgttgttgttgttgttttgtctgtaaaactggggagaaaagagggagaggggataatgtaggcctcatagggcggctgtgaagatgacgggacatggtgtactgaaagtggctagcacagcagctggcacacagtaggggctctcttactgttactactaataatacattcatcattttcaaaagttatgaatagatttttccttaactaaaagacatacacattacaataaagaaaataaaggaagtgacccttacctttaatgtctaaaactaaatttggcttcaacttgctgtaaatcctgccatcggacttcaagctccagaactggctgtcagcattctggtccagggccaggcctagcttggagccagatgttaccaggctgcccacaatcgtcaggcagcagtcttctgctatctgctcagtggaaaagaccagatatcttaaatatgtatccagctgtaagtctcatagcaattatttctctggttacattgggctttaaaattatcttagttcctagcttcatttaccccacatgaggcagttcagctcttagc

SEQ ID NO: 36771 - DNA, 2300 bp, Homo sapien
gtatgtgaagcactgaaacaggttgacaaagcatgggatcaatcttgaaagaacttacaatcaaaggagatgaaaaaacatgctgatcattgagtaaaacttaccactaaaagacatatcttataaaaaactgaattctcttcaagcctaatataaaaagaataaaggaaaacggcatgcccaactggtagtagcaattactacttcaaaacaaagaatacaaacgtagacttcatgagacaatcacagtaaagtcatttcaatgcttttttttttttttttttttttttttttgagatggagtctcactctatcggcaggctggagtgcaagggcgcgttcttggctcactgcaacctccgccttccggattcaagcgattctcctgcctcagcctcccaccaacacagtgaaactcccgtttctataaaaatacaaaaattagctgggtgtggcggcgcatgtctgtagtcccagctacttgggaggctgaagcaggagaatcgcttgaacccggaaggcggaggttgcagtgagccaggaaagcgcccttgcactccagcctgccgatagagtgagactctgtctcaaaaacaaacaaaaaaccccataaattctaaactgactaggaaacaactatacttccgaagcctgtgacggatctcagaataccacaaagttccctggacagaaatttagctacaaacataggcagggcgcaatggctcgtctgtaatcccagcacttagggggcggaggcagaggatcgcctgaggtcaggagttcgagaccagcctgaccaacatagtgaaaccccatctctactaaaaatacaaaaaattagcccggtgtggtggcatgcgcctgtaatcccagctactcgggaggctgaggcaggagaaattgcttgaacccaggatgcggaggttgcagtgagctgagatcaggccaccgcactctagcctgggtgacagagtgagactcagtctcaaaaaaaaaaaagttagctacagacacagttctcaagtctgaacttacatatttaaggacgcatgaaaacaatcaagcttatattttgtcaatacaaatggccagaaggattccctggccattgcaatttcaaaaattttggaaatatttgcagaggtattgttaaaaacctaaatgattcatttatgtaaaccaaagaagcgtagtcaattttttaaaacggcataccttatgaaagtgatttttttaaaaaaggtaacaatgtcttttgaaaacttacttctcatattaacgtctataggatttacactggcagcgtgaactttgacaatgacttcatttggatagtgtatgataggcatcatcatgttctgagtgaatcgaagcacttcattcttcccatatttatctatcacccaagcaggcatgacagtgctcctaggagaggtagtactaatccttctaactgaaggcttttggacaactttgcttctccagaagcaaaccgcagtgcatgcatttcttctaagtacacaagtcttcagaaattccattgtaaacactggttgaactgcgtgctcaaattcaaatacacttggactggatcaaactctcacccctgaattcagtcaaattctgccaaaccacgggctagtttcaaaattaagcatgcaaaacggagcattcgaaaatgaagctaatctaatggagaaactgaaagaagaatacggaactgttattccgctcttcgcatatgaaatgctcgaattaacgttccagtcagtattctgtccattctcctccctcactttcaccccctccactttaaaaaaaaaagggggggcggggcattaaaaagcaggtgcgcaaaccccctagatccctgccctgtcctgggagccctcggcgggacaagcagacaccgctcgcgatccaacgccagagaatcgaacgcttgccgactgccgccgcgaccctggcccggaatctccttgcctgcccgctctccttagccgccgggatggctttgcggcgccaaccaatcgcctacaaagatcatttcctcgggctgcaattcaaccaatccaagtactcggtgttgaagggctcagtgacaattaaagatggctgcgcccatgtaacatcactagcgaccggtgacctctttttcccccttgcctggctcctgtggtggcaggctgggcacgaggaccatgctgggccggagcctccgagaagtgagtggaattggcccgctgaggcccccgggagggcggaaagtttaacggacttcgttgacaaagagtccc

SEQ ID NO: 36772 - DNA, 2300 bp, Homo sapien
tctgtccagcaactggccatccaaccttggactgatgccacctttgtgactgatccttgtggccaaggataactgattcaaaataatttaagtaatccttctcattctgtctttaaaaacatcccttgcctcaaccttcttgaataggcacatagtttacaatattacacatattcccattgcattgctactccaaaataaatattttctttagagtctctttctgttacttagattgacagtggaaaaggcagaaaaaggaaataacatatttttataggttgtatttaattttaaaacaagttttgggtgttgtctgtttatttatttttattttatttatttattttttgagacggagtcttgctctgccgcccaggctggagtgcagtggcgtgatcttggctcactgcaagctccgcctcccgggttcacgccattctcctgcctcagcctcccgagtagctgggactacaggcgcccgccactacgcccggctaattttttgtatatttagtagaaatggggtttcaccgtgttagccaggatggtctcgatctcctgacctcgtgatccacccgcctcggcctcccaaagtgctgggattacaggcgtgagccaccgcgccgggcatatttattttttaaagaacaaatttgattcgacgcaatttaaaatgataacataataatgtattttgggggaagaactattatttaaagcctgtggatttcaatttctcattatatattacagctatctataattataattccacgctgccagctgggaaacaaacaaaacgacaacttctagggtggaataaaaaggaagatggaaggcagtttaggtcatcagcgcctacttcttaccagaaatcacctggagcctccattaaaccatactcccgaacttaccacacagctctaattaagtctagagtggggcatagttttagtttcaacaggtgctttatgtgactctgatagcaatgggcctgcagacagttctaaggttgagtgacgtgaaccaggaagcaaaaagacccgaattaaagctataacagcagaaataacgtaagagggcagattccagccatatctgcaagatagaatgaagagggcttagtgatttattggatatgaaagatgaggaagaatctaaaggcaaatgagataatagttgtgccattaaaaagagtctattaagaattcagaaataccagagcttttttaagacgggggttgagaggtaagtcctgttacaatgattacttcaacaccgattaaagtgaatttgagggtgcttatgtgacatttagaagaactgcccagaaagcattcacaaatacagtctagaattcaaacacgacgtccaggacatggagacacgggttaggaaatcactggtatcttagtggtaggtaaatcctagagaacgaattctttgaaaaaagccaaaaattactcatttgaattttgcaaactacagtttcgccgggcttcttagcgacaactgcagctaagtgtcggggacagaagagagactgaagtggccccgcaagccccctttggcaaagcccactccgagaccatccggatcccgacctacaccagagcaaatgtctaatggtgagaagccgcttcaccaccctacagatccgcggtgcagagatttccctgctaaggtcctaactcctgaatgggtacggcgagtacacccgaagaatcgaaaggtacttatcccccactcagttctagaggaagcagcgaggtgggccaagatgcgtggtaaggcccagggactctttgtcaacgaagtccgttaaactttccgccctcccgggggcctcagcgggccaattccactcacttctcggaggctccggcccagcatggtcctcgtgcccagcctgccaccacaggagccaggcaagggggaaaaagaggtcaccggtcgctagtgatgttacatgggcgcagccatctttaattgtcactgagcccttcaacaccgagtacttggattggttgaattgcagcccgaggaaatgatctttgtaggcgattggttggcgccgcaaagccatcccggcggctaaggagagcgggcaggcaaggagattccgggccagggtcgcggcggcagtcggcaagcgttcgattctctggcgttggatcgcgagcggtgtctgcttgtcccgccgagggctcccaggacagggcagggatctagggggtttgcgcacctgctttttaatgccccgcccccccttttttttttaaagtggagggggtgaa

SEQ ID NO: 36773 - DNA, 2300 bp, Homo sapien
ggatgaaatgtaaattactacagccactatggagaatagtatggaggtgccttaaaaacctaaaaatagaactactggttgggcacagtggctcacacctgtaatcctagcactttgggaggctgagggaggaggattgcttgaagccaagaattcaagaccaacctggccaacatagtgagaccccatctctaaaaaaaaaataattaaaaataaataaataaaaatagaactaccatacgatccagcaatcccactgctacgtatatatgcacctaaaagaaagaaaatcaacatagcaaagacatatctgctctctcatgtttattgcagcactattcacaatagccaagatttgaaagcaagctaagtatctaccaacagatgaatggatagagaaaatgtcctacatgtacacaatggagtactattcagccataaaaagaacgagagcttgtcaattgcaacaacatggatggaactggagggcattatgttaagtgaaataagccaggcacagaaagacaaacttcccatgttctcacctatttgtgggagctaaaaatgaaaacaattgacctcgtggaggtagagtagaatgatggttactagaggcctgaaagggtagtagtaggggtgggaagtggggatgggtaatgggtacaaaatatagttagacagaatgaataagatacagtatttgatagcacagcaggtgattacagtcaacaatagtttattgtacgtttaaaaataactaaaagagtataactggaacgtttgtaacacaaagaaatgataaatgcttgaggtgatggatacaccatttactctgatgtgattattatgcattgtatgcctgtatcaaaatatctcatgtgccccataaatacatacacctactatgtacccattaaaatttttttttaaaaacaatcataagactgcaaaaaacacaaccttgcacaaaggccattgcaaccttccacacacacgagtacttctgtaagaatgtctgtccagcaactggccatccaaccttggactgatgccacctttgtgactgatccttgtggccaaggataactgattcaaaataatttaagtaatccttctcattctgtctttaaaaacatcccttgcctcaaccttcttgaataggcacatagtttacaatattacacatattcccattgcattgctactccaaaataaatattttctttagagtctctttctgttacttagattgacagtggaaaaggcagaaaaaggaaataacatatttttataggttgtatttaattttaaaacaagttttgggtgttgtctgtttatttatttttattttatttatttattttttgagacggagtcttgctctgccgcccaggctggagtgcagtggcgtgatcttggctcactgcaagctccgcctcccgggttcacgccattctcctgcctcagcctcccgagtagctgggactacaggcgcccgccactacgcccggctaattttttgtatatttagtagaaatggggtttcaccgtgttagccaggatggtctcgatctcctgacctcgtgatccacccgcctcggcctcccaaagtgctgggattacaggcgtgagccaccgcgccgggcatatttattttttaaagaacaaatttgattcgacgcaatttaaaatgataacataataatgtattttgggggaagaactattatttaaagcctgtggatttcaatttctcattatatattacagctatctataattataattccacgctgccagctgggaaacaaacaaaacgacaacttctagggtggaataaaaaggaagatggaaggcagtttaggtcatcagcgcctacttcttaccagaaatcacctggagcctccattaaaccatactcccgaacttaccacacagctctaattaagtctagagtggggcatagttttagtttcaacaggtgctttatgtgactctgatagcaatgggcctgcagacagttctaaggttgagtgacgtgaaccaggaagcaaaaagacccgaattaaagctataacagcagaaataacgtaagagggcagattccagccatatctgcaagatagaatgaagagggcttagtgatttattggatatgaaagatgaggaagaatctaaaggcaaatgagataatagttgtgccattaaaaagagtctattaagaattcagaaataccagagcttttttaagacgggggttgagaggtaagtcctgttacaatgattacttcaacaccgat

SEQ ID NO: 36774 - DNA, 2300 bp, Homo sapien
agtgatgtccaactttagtgacatctcctcttcttcctcaatacaatcaatccattgacataataatgttgaatatcttgcagatgaggaaagaaaaatggagtcaaatgagcacaccgaggccaaccagatctgagctttctaatcttaaattgcctgggggtgtggatgttatgtgtctactgacatggacagattgtgtatggttgcctttataaaatgaagcccatagaaatgtttcagtaaatacagtcctccaagtgaactaaatgtcaaaggaaaatcttttccttgccatcctccttttctcttttaaacggaaagatcctaaagaagctgtattagtgccctcaagagaaacagaagcaataggatatatagatctatatattggatcctatatctaggaataggatatatagatgtatatatcctatatatagatctgtcctattgatctatagatctatatagatatatatcttatatcaatatataggatatatagagaggtacacacataggcctgatgtatatacataggtctgatgtctgaggccagaagatagatgccccagctcaagaagggagcacattcacccttactctgccttttgacgctacttgggttctccatggattagatggtgctcacccacattggtgagggcaggtgttctttatgcagctaccctcatgacacacccagaaataatgttttaccagctgtctgggcaagcccttggcccagtcaaattgacacataaaggtagccatcatagaaactcatttcaatgttgttttgttttattacaggaagactgaagaaacctaatcctaggtgctgccactgggacaaacaagaagcaccagacacagtgctgttttagggtggggcagaattatgctgagggaaaagttattatcactctttaaggccaaggaaaccacaatttttaaagaagcttctagaaattctacccagtagaaaataaagataaacttctgtaaggaatttcattcttttcagaattcgcaatctgaaatgtagaagcccattccttcatggttctcatagatatttagtgtgactgaggggtcagtggactcatagcactcaggccaggcttctcctgagtccctttctttggcacagagggagtgattcacagatcctctacccccaaaggcattgtttcctcatctcaacaagaatccagcacccgtcattttatcagcacacgtcactagcttctcaagtgagactactctgaagtgatctgtgtttgaagaatgcctttccctttcccttacgtaactaagaggatgaaaaaggacactcactccctatatgaaagctgtgtattgtaagcagtcatcttgcctggctgagaactctaggatctttttctctgctctcctttaggctgacactcatagccagaccttctgtttattagccccctgaatctatttgaaaatatttttgctttcattataatataagtcacattcttcttgcatctgccgctgcattttccaaaagggttatgtcaagggaaattcaacactcacttttctcattatttgcttaccagcttgctcactcatcaaaataccagagttatttgatacttcagaagattatttccccctttagatgatgtgtcaagggaaggggagctggccccagtatcaggtgacagaattttcttcgcatttctactgttgactcaataaatgcccttgggcaagtcatggagcctcttcatactttggtctctagggataaaatctgccaaccgcagcatgtgtatttgaacctcagtgtcctctggaataaaaataggaggggaccaggtgtccatgtgaccccaagctgatgggaagaggatgaccataggacttcaaaatgtccttgagctgtaaattctgtaatagggtcaggcccaccagtggccttcaggcatttgtccagtggtgtatggataagttctagcacttgagttttttcagcacaaaggaggcactatgtcaacctcccacccatgggtattctgtttgctctgtgtccccgcttctctgcatttccctgccatattactcaccactggtcgtaattacttgcttgatcacttgtctcctggtctgtaagctgtttgagggaggggagcacatctgccctatgcaacactgtaccctcagtgtggtacacaggagcacatgcctgacatatggaagttatgtgagaaacatttgtgaagtggacaaattaataatgctgcctggactctatagaa

SEQ ID NO: 36775 - DNA, 2300 bp, Homo sapien
tatatgttgaagtcctaattcccaatatgataatatttgcagttggggcctttgggaggcatttaggtttagattaggtcatgagaggtgggggccgtatgatgggattcatgtccttataagaagaagagaccagagccccctctctctgccatgtaagggccctgcaagaaggcagttatctgcacaccaggaagagggccctcaccagacaatgaatctactggcacccccttaggcttctcagcttccagaatggtgagaaataaatgtttgttgtttaagccgctcagtcagtggtattttgctatggcagtccaaacagactaagataatatgcattacactgaactaagtggtgagtagaataccaagtttataaaactcagtcccaccctaaggatacttgtgtgtgtgtgtgtgtgtgtgtgtgtgtgtgtgtgtgtgtgtgtgttagaggcagggtcttgctatgttgcccaggcttgtctcaaattcctgggctcaaatgatccacccgcctcaatctcccaaagtgctgagattacaggcatgagccactgctcccagcccctaaggatacttataatctagtaggcagatgattcatggtctcttaaaaatatattcaagattacaagacaataagtaacaagagccatttgaaggatatacacacaagcaactttcccaacctataaaaccctttttatttttattattattattttttgagagagagtctcgctctgtcccccaggctggagtgcaatggcatgatctcagctcactgcaacctctgcctcccaggttcaagcaattctccagcctcagcctcctgagtagctgggattacaggtacccaccaccacatctggctaatttttgtatttttaatagggacggggtttcaccatgttggtcaggctggtctcgaactcctgacttcaggtgatccacccacctgagcctcccaaagtactgggattacaggtgtgaaacactgcacctggctcaaaaccctttttataacaaataatttcaaatggtctcttagtttttctgaactggaattcatgaataatatagttaacttacatatgaacgacataactcactcaaaatcagtgtaataaattccttaactctgatataaagaagaaataaaataaaagcaatttataacaaaaaaagtctgaggtcgggagttcgagaccagcctgaccaacatggagaaaccccatctctactaaaaatacaaaattagccaggcatggtggcacatccctgtaatcccagctactcaggaggttgaggcaggagaatcgcttgaacccaggaggcagaggttgcagtgagccgagatcgcaccgttgcgttccagtctgggcaacaagagcaagactctgtctcaaaaaaaaaaaaaaaaagtgtttcaacatataaatgttcaggcacatttacaccaaaaaccacaatgaagtagtcagatacaaaactgctatgactgggatagctacaaatgcaaactaatagagatatattgtcccggagattgcactgggagcagcgtgactgtggataatgtgtgtttccaaagcagtgactaaaggtaaggttctgaacgaagcaaagaacgcttttccctgaattttcacaaaagttgagttcctagaaatctggtgtgtattaaaactgtgcaaacaatactttgggtataaaaagggggctgggtgtggtggctcatgcctgtaatcccagcactttgggaggccgagatgggtggatcacttaaggtcaggagtttaagaccagcctggtgaccaacatggtgaaactccatctctactaaaaatataaaaattagctgggtatggtggcgggtgcctgtgatcccagctactagggaggttgaggcaggcaaattgtttgaactggggaggcggaggttgcagtgagccaagatcatgccactgcactccagcctgggtgacagagcagactccgtctcaaaaacaaacaaacaaacaaaaaactctgtgtgcaaacaggaattaggttccaggctcaaataattaaaaatagattttttcacccaccagactgcctggcagctctttagaaagttgtgtgacgtatgaaccagttcttccctatatgagagtgtaccgtacatcgcaggctgtccagcatcgaccccactgatggatgctagtagtcctccccgccagcactcaacattgtgacagtcaaaaacatcctctctacattttcaatgcccctgttggggtagcaggact

SEQ ID NO: 36776 - DNA, 2300 bp, Homo sapien
atggcatagaagcaaggaaatggattttaacagtaggatttaaagtgtctatgactattgaagtgtgttgtggatgagatttggtgcatatgaataaatacaaagagatgctgttcagggccttatgtaagcaagaatggaacagagggagagggagagctcagcagccttgctgaggcaatggaggcatgtgcaccagagccagggccaagtgtggcaaaatctactaaaggttcttcagaggctagcccacaataggatggcccctgaagtccagtaaatcttggtgttccactcaccccctcccctgatgcgaggtgcagctccctctttccccaggggcccttcctcttgactgcctcccccaggatagggggatggctatgccctgctggttcctgaccttctcctgctccgttggagaccattatgcttaagcattgattatctgtgtccagtcagtgttttgcagcattcctggtgcaaatggcctgcctgtgtgctgaagtggaaggaaagggctcttaggggcacattctgtggtccaggaggacacagagctgaccttatctctagctattggccatctgtgttccctggagcaacagaacaccaggtgcagagccccaacatggggatggagcttggaaacctggctggaaacagaaatggagctaccctgttaggtgggggacttgggcaggagagtgaaaaggctcctgtttctagtgggcggagagtctgggggtaggggtctgggttctctcagatggcctgtagaagaagggaagatgctgcagagaggaaaaagcccccataagggaccagatgctgcacccccaggtcctatttgatttagggaatgaaggagggaggagaaaagaaagaagaagagggggaaggaagctgcagactacttgttctgggctagacgccatgctgggctccaagaagaggtacaaaacactgcatggcacccagcacgtacaagtcccttggtcagtacagctgttatcattacgagtgacgttactgcttaattctaacaacaccaccataaggcaggtattattatactatctctattttgtggatgacaaaattgaggttcagaaaagagaagcaattggtgtagggggttgaaaattgaaacacagcgtatctgactccaacgcctgtgtgtccaagccctgtgatagggaaagatgtaggtgttccacagtacctggcaaggcaacaactggcgatggtaaagggccagtatggagtggggttgggtgagggtaggggagttagggagggaaagaagccctctcccttgaaaagttccccagggctgggctgccgtgcaaagccactcgccaggaagtatgggaccaacggaggccagaggcaagactctcctggctgccccacaggcttagagctgggaggcaggtgctgcgtgccagcaggaagagcagccactagaagagagagaagtagccctggcacctgggggagccatacctgggatggacaaaggtaggcatggctgctgagcctgcactgagtagatggtcctggatgctccggcaggtgtggtgcggcttggtttccagcaatcttgctggtgggtgttcagccactgactgtatgtgtatatctttgtcattgttgttatcagtattatggtgatgactttctctgacttttatgcatttaggctaaaggaacctggaaaaacacatgaatcaaaataaaagttgattcacctttccagggcagagttacaagcgtcaaaactctcaggcgagatctgccagtgacgttctgaccgcatgcctctctgcaaggaaagtggtatgtgttgttttttccagcagtggaaatacaaatgattaactctggaaaccatggctgtttcactgataactaatttgtttgctgataaatgattacccaggagccagaatagagacccaaaagtcaaactgcaaaaattattaagttccctctgtatgcagaatattgtgcaacatggttatgggtactacagtggatgtgagtgtgtagaccttgtacaatagagcttataggctaatgagaagacaggaagaaacaacaggaacacatatagctggaatgcagatgggatctgtgctacttacgctagccatgggatgattagaacaagataagagacatgaggaagacttcttcaaggaggtgctcaagccatgttttggaaaagagaactcaaggtctggcagggagaaaggagcaaggtaaccaggggaagtcttggaggagagcaagat

SEQ ID NO: 36777 - DNA, 2300 bp, Homo sapien
tggatgacctgaggtcaggagtttgagaccagcctgaccaacatggtaaaaccccatctctactaaaaatacaaaaattagctaggtgtggtggtgcacgcctctaatcccaggtgagacagaaagggagaaattgagtgtatctctaagatatctgacctaagtaacaggaagggtggaagactcattaactgaaataaggaatgctgtgggaggaacgcattgagacccggatctgggttttggtcctatcaagtttgagatttccgttagatttccaagtgaagatgttaagtaggcagttgtagtcttgaatgcaagagaatgatctcggctcgcaatacaaatttgaggatcgtccatatatagataatatttaaagccacgaaattgttggagatcgactggggaactaggatagataaaaaggaaaaagattagaggtctaagtatggggcacttactctttggcattctaaggatgtaatgaaaaaacagctggctgggagtggtggctcatgcctgtaatcccagcactttgagatgccaaggcaggtggatcacttgaggtcaggagtttgagacaagcctggccaatattggtgaaaccctgtctctattaaaactacaaaaattagccgggcatggtggtgcgtacctgtagtcccaactactaaggaggctgaggcaggagaatcgcttgaacccgagagtgaaggttgcagtgagcagagatcatgccattgcacaccagcctgggggccagagcaggcctcattctcaaaaacaaaaaaacaaaacaaaacaaaagaaaaaacagggaagaagattaagtggcaagtgaggtaggtgaaaccaatggggtatcctataactcaagtaagttgaggaatgagaccagacctttggatttacattgcagaggtcatctgtgactttgactagaagttttgttagaatgttgcagggtgacatcttgtttggtgtatgagtcagagttctccacagacagacctaatgagagagggatggatggatggatggatggatggatggacgaatggatggatagttggttgggagggaaaggggaattggctcacgtgtaaattgcgttggtcttgaaaagatgtttccttaaactgcgagtctgacgtatttgcacatttttctggaaacaacgcctatatctcttggagatgttcaaagagggcgggctcggtggcttacacctgtaatcccagcactttaagaggctgaggctggaagatcgcttctcttgagtcccagcctgggcaatatggcgaaaccccatctctacaaacaaaacaaaacaaaacaaaaattagcaggccgtggtggcacacacctggagtcccaggtactggggaggctgaggtggggagaacagcttgagcctgggtagcagaggttgcagtgagccgagatcgcaccattgcactccgggcaacagagtgagaccctgtcaaaaaaaaaaatgttcaaaggggttagtggtcccagagaaaggatcacttcattaataattaagatgattagccggtcatggtggctcacgcctgtagtcccagctacttaggagactgaggaacgacaatcgcttgaacccgggaggcggaggtcgcagtgagctgagattacgccgctgcactccagcctgggcaagagtgagactcggtttcaaaaaaaaaaaaaaaagaaaaaagaattaagatggccgggcgcggtggctcacgcctgtaatcccagcactttgggaggccgaggagagcggatcacgagggcgggagatcgagaccatcctggctaaaacggtgaaaccctgtctctgctaaaaacacaaaaaaattagccgggcgtggtggtgggcgcctgtagtcccagctactcaggaggctgaggcaggagaatggcgtgaacccgggagaatggtgtgccccgagcctacttcccgcgcagtcctccaagacgcggcctccagcaggggtcgctgcttcgctgccgccctggcctcgcgccccgcccgacccgctctcactgcgccggcgccggcggaaggggcggggcgcagataggggtagcctggaggcctgcagtccgcgcggccgcggggagggacgagagggcctgacgtacaggtgagtgcgcctctgctggcgcgccgcgccgggccccctgcccgcgccccctgtcacttcgcctctccgccccgcccacgctcccgccgggtctccccgtgagtgtcccgtgtcctgccagcctcgggacgccccgcgagc

SEQ ID NO: 36778 - DNA, 2300 bp, Homo sapien
catttctcttgaaggtacttcaggtagtttctagtcattattttagagtactctggattatatagcattttatttatttattttatttttgagacagagtctcactctatcgcccaggctggagtgcagtggtgcaatctcagctcactgcaacctttacctcccaggttctagcaattttcctgccttagcctcctgagtagctgggattataggcgtatgccaccacacccggctaatttttgtatttttagtagagatggggtttcatcatgttggccaggctggtcttgaactcctgacctcaggagatccacccgcctcagcctcccaaagtgctgggattacaggcatgagccaccatgcccaccctagcattttaaaattattccaaattatagttatgttgaaacagagtctttacattcagtctgctttatttcccttttaagacttagattggagtcccaagagtggtggattaatagagttgagactgggtcgtatgctcatccatgccagggaaataaggcccaaaatgttaaatataaattggaagtagctagctccatgtttttgagtgagccataatcagaggtatcaatcctaaggtacaatctaggcacaaaggaaagtcatttgcagactcacggtacaaggatgttaaccatatggaaacccttccctcattaccaaatcatggtctctaaaaccttcttgatatacttgcaggggtgggggtgagtgtgagtctgccaccatcataagatggtttctgctacatttgaagtaactgtaggagttgattgccctctgacatgtcacaagcacttgttgcagttccctagtttgtggatctctagaccccttccttgtctgctagttaatgcctctgttaaacattgggaaggagatgtaaaaggagttaaaatgcaggtctgtccaatttgctcacccttacctctgatttgctggggctggaggttgaaataaagtttagagattcactctggattttatgaagtcatgatctggtgtccttccttggcaaagtcaatgttgtaaggatgtaatgtatgtcagtcaacagtctttctctccaaattttcctttaaaaacaaaaccagggcaggcgtggtggctcacgcctgtaatcccagcactttgggaggccaaggcaggcggatcacctgaggttgggagttcaagaccagcctgaccaccgtgtagaaaccccatctctactaaaaatacaaaattagctggacgtggtggtgcatgcctgtaattacagctactggggaggctgaggcaggaaaatagcttgaacccaggaggcggaggttgcagtgagccgagatcacgccattgcactccagcctgggcaacaagagcaaaactccatctcaaaaaaaataataataaataaaaaaacaaacataattgagaactattgttagtattttttttaggagcaatcagtacccaaagctaatttgtgggagggagaagagtagaaccagtgctttcacatatactcatatcacattggaccttcctgacaatcctatgagctaagcacattagttgcagctagaagattcactgtgctgtggtatatggcccttagtacatgcagattgatatgaccctgtttttgtttttttgttttttggttttttttaattttgggatgtggtttctctcttgttgcctgggctggagtgcagtggcgtgatctcagctcactgcaacctctgcctcctgggttcaagtgattctcctgcctcagcctcccgagtagctgggattacaggcgcctgccaccacacccggctaatttttgtatttttagtagagatggggttttgccatgttggccaggctggtcttgtactcctgacctcaggtgatccacccacctcagcctcccaaagtgctgagattacaggcgtgaaccactgcgccaggcccaataggactttttaggggcgaatacgtatagtactgtacataaagcgttcatagtgcatatggtttatgttgtaataatgtcatgacactgcacttgtgagataaaactgatttattatctgtttcagattataagcgccatggctatggctagtgttaaattgcttgccggtgttttaagaaagccagatgcctggattggactctggggtgttctccgagggacaccttcatcatacaaactctgtacttcctggaatcgatacttgtatttttctagtaccaagttacgtgcaccaaattataaaacacttttttataatatt

SEQ ID NO: 36779 - DNA, 2300 bp, Homo sapien
agagacagtgtttcgccatgttccccaggctggcggaacttctgagctcaggagatccacccatcttggcctcccaaagtgctgggattacaggcgtgagccaccacgcccagccgttcattaatttaaatgaaaaagaacacatggaaggttcagaatgatgaaagttttctgtttatttgggctcttggtttctattccccctggatctgcctattctcagcctcatatagctcacttgctgtacgaagcctcgcttctgaggttgtctcttttccctacgttggctgaggctgcagagaaaaacacctcatgcactgttttgtgctggcattagttacctgaaaactttcaaataaccctgatctgcctggatgagataaactgagagcaaacactgactgccaagccctggctactcagagaggatagacagcagccacagcacccaggagcttattagagatgcaggcccagggttcacactctgcattccagcaagaccccaggtgattcagtgtgtacactagagcttaagaagcgctgggctaggccagtcccagccacctgtactcttcccaagtgtggagagaagcaccccaggatgccgtttgttcttgtccattcccagttgcccgaggcacatgcctgtcagtgggagcaaaggctccctgctcccccgacacccaccagcgctcactgactagctcatctgctttcctaaaactcaaatatacatttacataagtatctgggtcgaattcaacatttgtcaaaaacaggcttattaggttatggctgaaactcaaagaaggatacatatttaaggtatacaatttgatacgttttgacacgtgtctaccagtgaacccacagccacagtcatgatgataaacatctgtcacccactgacgttctccatttcattctctgtgtcccatcgaattctccctgccatccctaggcaatgactatctgcattctgtcactataggcaagcttgcgttttctagaattgtacatacacaaatggaatcatacactacgacctcttttttgttatttattttgagatttatcatgagtactttgtgtactgtatcaataatatcttattgctgagtaatattccattgtatgaatataacatagtttatatacttgtggatttttcagaaacggggggttgtttctactgtctcacagttgcacaggccagaaagttctgggccggctttttctggtctaagatgtgatttcaggcagtggtggagttggcatcagacagccgctctccacagcccagttctcaggtgccccgaccatgcatcccagatgagccttcccgaaaagggacgcctgctctcccaaaggctgcaggctaaaaggacacactgctgcctttgggagctaccataggtaggaatctctgtcccttcctgagagcagacgaaggcacgggtccatggggtgacctgcccgtggccggcagctgcacaagcccgttgccttcctatgctcttcctcctgtttcttgcagagttcttgcccagtattgccagcatcagtgtcagccctctgacggaaaggaagtccactgctggtgccctgtgagagcgcaaagcctccctgggcccagcctgagtcttttctcagggaatggggagagcagcaggtttggggtggtggggatgcaggtttgtatcagtggtgcatccttggatgacagagtgattcagggtgaggaatcagtttcttacatgctcccaaggttgacctcggcctctgtgtgctacacagacccttgtttagtgtcataaaccacagcacccacctaacactctgggaaatgatttttgttttgcaggctctcctagcaggcatgcggaaccgtgagaacagctcgccctgccaaggcaatggtgagcaggccggcaggggcaggagcctgggcaatgtgtggcctggagaggaggagccctgcaacgatgccaccaccccttcctacaagaagcctctgtatggcatctcgcacaagatcatggagaagaagaatcctccctcgggggacctgctaaacgtgtacgagctctttgagaaggcaaacgccagcaacagcccctcgtcactgcggctcctgaatgagccacagaagcgggactgtggcagcaccggggcaggcactgacaacgaccccaacatctacttcctgatccagaagatgttctacatgctgaacaccctcacgtccaacatgtcccagctgcacagcaaggtggacctgctctcccttgaggtga

SEQ ID NO: 36780 - DNA, 2300 bp, Homo sapien
aacataggaagttaaatatacaagatattaagacttgtaagaagcggatggggttgccttgaggaattcttatttgaaatggctacattgaacattatcataaataccactattttatcctctcaaattaagatgctttatgcaaactactctaaattgtacagtagttccaaagagaccatttactgttttctgcttgttttacatcctggaacaagttcaaagcttttgatctcacttgatttaacaaaaaaaaaaagtctcagccttgaaaaataatacaggtttgatgaatatgatttcagtattacagttctgtaaaaattttcagtgtttatggtacatttgacccagggaccccacagtaaatatatccacagtgcattttaagtgtaacagaatgaacatatttgaaagattatccattcttttgcttttgcttttttttctgtaataagtatgaaaattaacattgtaattgctcccagaatgggagtactgaaaaagtatccacctgacagaaataaacatgcagaaaataaattgagttaagatttcattagttatctgaaatgtaagtttatgttcaaaatggctattactcgattttcatgtatattagttaaatgctatgcttataagattttttttggcttgaattatgactgaaaaaatttggatcacagctttaatatccaggtgggcaatgccatttgctgagatcttggtgcatagtcccattttttctgtcaagcacagaaaaattctgccttgccactgagccttctgaaacattctgaggtaacaatagagatatatttaaatttttttatttttatttttcttcttgctttttaggttgtggaacttttagcaagtgctcttatggacttggtacaaggagtatatcatgaaaattctacttcaaaggtaaaggatttcagagtcataaaatgttatgttataaaccgtcgtggtacaactagaataacgaaaatgtcattcttgttttgtgtttaaattgtacatggctttttttttttttttttttttttttttgattagtgttttggctacaaattcatggccatacgcttactacatagcagatttagccaattaaaacaacctcttatcctctggctggattcacagtctgttcaatctgcagcagctcagtagacactgggatgcttctggctagcaggtagcagtgtcacaggcaggcaggctggaggagcagctcgtgctgaggcagctgagcccatcctttccccagaggaagggtccttccgtgtcacagaggagtggaccttgagcctaagaagatgactgttggggaggtgggatgggggtatcttttatatacaagatgcataatttactgcattattagattctttattataagaagtgggatgattgcacagttggattattttgattaattttataggtctagaattaagatttttttgactcatttagcaggacatctcaagaaaggttaggtttcatttccttaaaatgcagttatttcatttcggtaggatgttagatgtgaagtaattgcttcattgaccatcaccatcatttaacatggtagatactattataaggggctcctatcttagtgtttcattattctaacttctttagcttctgtattagcaagatttcactcacttcaaattagaaaaggtatgcacatatgcacatcttaagctttttgacattttcatttgaaaaaaggaagataaattttattagaagtgaaacatagggcatgagtaacttggataagaaatttaaaatttaaaagtataacccagggactctgggtggttcagagactggttagaatatgaagaattgcactttggacatctgccaacgtttggttcaagtaaccacagttcctagtaggcacatctggcctcacctaagcagcatattggtatgcagagacctcacaggatggatgaccacagtggacctttcaaagacatgcaagttcactactatggatggaggttaatatctgattgtaaaatgggtgactactggtctagttccacttgtaaaaagttacgttgtatagatagtatgatgaagatgacaacagctaagcaaataaccctgtagtaagtgatttgcctgtgtttcttcatttaatcctcacagaaatcctgagagataggtactactgctatccccattttacagatgtgaacactggggttgagaaaaggttaagtaattttcccaaggtcacacaacttgttagctctcagggattt

SEQ ID NO: 36781 - DNA, 2300 bp, Homo sapien
attgaggaaattgcgtgaaaagttacccttaaggtaccatgaggctgaagaaacagcctcaggtgcacaatatatcacattagtctctatctatctttgtattttcatgacttctttcaccttggataacccagaagctctggccttggaactttttggaatggtaaagtatctcactctccatatttattttcatctcctggaatggtaaagtatctcactctccatatttattttcatctcctaacagacctgaattttgttgccaagagtttatctctttcacaggaattattttcaaacttcagcttacttactttaagggcatagactgtgtttgatacttataatcacaattcatgttaaataaaatgtgcccctgaaaagttacacctaaactgaatttttgtaaataaaaaatttaaatcacaaggaaaacttgccaaagggagagtatgaagctaaatcttttgtagagaaaatcatcttgttttgcaaagtgaacaactactctttaagtcccaatctttatttgtagctcaagaggctggtacagtattatgcatgatgctcatttaaaaaatactgacaggctgggcatggtagctggtagctcacacctgtaatcccagcactttgggaagccgaagtgggcggatcactcgaggtcaggagtttgagaccagcctggtcaacatggtgaaacccagtctctactaaaaatacaaaagttagccgggcgtggtggcaggcgcctgtagtcccagccacttgggaggctgaggcacaagaattgcttgaaactgggaggcggaggttgcagtgagctgaaatcgcgccgctgtactccagcttgggtgacagagcaagacccatctcaaaaaataaataaaaaataaaaataaaataccatgaatttggaaggattttgaaagttttagagagttttataagctatttttaagagtgtaaaaaatggataatatatcctttattaagaacggttaacacctgttttaggtgataagaaaggaggtaagatcttaggcacatttgaaaaaaaaataggtagcattacttaaaagataatcatattgactgtttcctctcagcaataaggagaaaagagtggatgggagcctattatttagacggtgtaatctttcggttagaatacggattctgaaaccagattgtctgggctcacatccctgtctagtgtggtcttagggaacttacgcgactcgactgcaccttagtttcctcatacaaaacacggagaatactaatattatctacttaatgaggttgttctgaggattaaataaagtaatacatgaactagtacgtgaaaagcactccggtcagcgatagtcttcaatcctggagttgagctccaggctaggcataaagaggaagataagaggcagggagtaggcaacgtttcattcttcctctccgcacccgcgggaaggaggcaccgctgtttctcccaaggctcagcgaggaggccggtaattcgaagttggatccgaggactttccttgggacccctttccgccgcaccacgctgccttatgtctggttgggccctgaggacacgagggctcagccccacgccccgactaggcgttccaccactgagacgtggccccagctccaggaggcatgcagcccgagaggccgccttcacgcccggccacggccactgccactgccaggggctggtggcgatagcgacaaaaagcttccgggaggaactggtgcctccgcccgacgcccttccttgcgggcaagccgggggctgaccgttgttcgtgacaccaatacttatgcatgccactcagtgctgggcgccggggactctaatgaatccagactcggcccagataccgtgtgcagagggaccactcgccgcccacaactgatccctgtcactgacgacctttgctggcccagagcggcggggtgggaggagctgaacctcccaacccgggttcacctccaaagcaccgcccctgcgggggcgttctcgggtacgccgtaaagtagagagtatacttaacaacccgcctctgtctttacggcaggccgcattccatgcctccaatatggcgtcctccacataggcagtggctgtggtttctaccccgggtggccgggggcagtgctgagctgggactgttgtttgcccagcctgggctgcagaaagcagcagttaaagttcgtttctggtcactgctccaggaagccaccttactctgagggtcaagaattgccgcttccttttagttactgta

SEQ ID NO: 36782 - DNA, 2300 bp, Homo sapien
catcagtcttcctctcttgactcttgggcgtcccaggaattttaacttttcctcggcgtaagtgtttctcgcgcggaccccttgcaggcgcaaagcctggctcgctctggcctcctggcttgcccaggatctaggcagccacggggagcagggtgcagcttcccctcgcctccccgggacggggaagagaagaaatcaggagggaggaggtactcagccctcctgggtgcactcccagatgtttttaagttggcgtttattaaaaacaaaatgatgctaaaatgcaaaataggcaacgtggaggtactcagctctcctgcgtacacgcccatgtatctctaatgtgacatttaagaaacaaaacaatgctaaaatgcaaattaggcgatgtaatacccagaatgagcctcgtttgacaggccaaactgagatttaatggaaagcttactcatatccccacacggaattcattcttttaggaacttaaaaaaattgtgtaattttaagttccaccactgtcataacgaacactccacagtaacatgcagtggaacaatggacacccccatatcgcattgtgtcaggtaattatgaagtgtcgaggcgcgggaaggagaagccgggaacgtcaatgtgtcctctgcaacgtgtgggagcgctcagagccgcgcgtatcacagaaacatcatccagtcgtcacccccaatgcctcaacccagggacagggacagactcaatcagacctcggccccaggcgtggcaggagagggccaaagaggggacttgtgagcgcagagggagcgagcaccgctccatggagggcaggcgctagctgggaagtcgggaggagaaagtgcaaccaggcggggaggggaggatcccaccggggcgtggcgagggcgttcggggtccgggtgagcgggaccctacgcgggaccgtgcgctcccagaagctcccactcagcccaaccttttgggcgaaacccaggacacccagataagggtgcaggcggggtcacgcgtaaagctgttactttgaagcagggcataagtgagagagagataaagagagaaggaccaaggggaaaaagaaatgaaggggctgaaggccgagatgtcctacttctaagtagttctttgagaggcaaaagcttcattgccattgcagtccgaggcagcgccgcgtggaggaccggccgggcggggcgcggggacctctccaaggggtctccagcctccgcgcactctgcggtggcccccggagggggaaactattctggcagctcagtggggggaagctcgtccgggctgtggtttcctttccccgagaccccagcgttgcacccccgaggcggcaggctcagtcaaccctccccgggggacggcggccctctagccaggcgacctcaggtctcgcgacctcccgccgcccaaccttctcctttcacccccattcatttttcctcagcggctcctaggacgggctcaaaaaccaactccacacgcaacccagcccacctcgcggagctgagaagcagggctgggttccgagcgggcgccggcgcccctggcgtgtggcggggaggtggcggccgcggggggcgccgcgagccgcccgtgcccgccgcggatgaacaggcggctgcgagcagcccccggagccgcgcagcatccgcgtatccagtgacggtggaagccacgcccgctcgagagccggggggctgtcctcgccccccccacctttcccctccctccgaccccctcccggccgcgctccctcccctcctcccgcgccggcccccggcccgcccccggctcggctcgcgggaggcgctgggcgccggggctggcgcgctctcccgggctcacacacagccgcgcacgcacgcccggggccgctctccgcgccggcccttgctccccgcgcccatgcggacggaccgagcgacggaagatggctgacgactccacggggccccgaggatgcggcccggcggcggcggcggcgggagcggcagcggcagcgagggcggcaggggcagcggcagcagcggcggcgttggctgcggcggcggcggcggcggcagcaggagccggagcgacggcggcggcatccccgagactctccgcactatccttacccgtgacagccactgacgtcctccgccgctagaagagaccccgcttctcggcgcctgccctccccctcgcggctcggtccggccccgccagcaccgctacctccgccagcctcgccaccatcagcaccacctccaccgccgccgccgccgccaccacca

SEQ ID NO: 36783 - DNA, 2300 bp, Homo sapien
aagtgcgtgttcgcccatgatcacataccagcatgccaccactgtttacaatcaaggaaagctgagagttaaatgagatgagtaatcaaatgcccagcatatgttgtttttgcattgtttatgtgaccaatcattattaaaatttatcatcttttaattatatcagtttatgatagtttttttaaaaaaccaacacgcaccaacaacagaacaacagacagcctcttcaacaaaaacaggctctcatttagaacaatattggaaccagtgctttattgggggagagactcaaattcaatagactcaccattgcactgtttcacaattctttctttgctgctatatatggcttgagtgctgagaaaatggcccccccccaaaaaaaaggaaaaaaagaaaaaagattgtgtgtgtaaaactctgtcaaaaaaaagtaaggcactgaaagaactattgaaaattttgacatctgtttatctgtttatagctatggcaagatcactcatattaattcttgtttaaaatgccatatgaaggaaagacatttgtgcaaacaagagtcatatttgaattgtagatcatgtcttcaccatctgtgagagctgatggtgttgcaaaattaatgtgttaatgaaatcacaataatttctccaaagtaatgggttctgaagctgagaatgagtattttttgaactttgatgtctagtgatttccaattgggaaaagctctcagcctttaattagttctgcagcccaactttaaaataaatttggtgatgtctttcttttgccaagagtagatttgaaggggggaaaaagccataacaacttttggaaaatgttctctggtgtttgaaaagttgttaaataagactgcctgccaagaaatgtcaccaaaaattctgactactgagagagagtgggcaaacagctcaaaaaataattctagcttgctgcaacatcacaggttgggaatagctaaacctcacacagacttcatgattaattccaagtttctccttggaagccagacataatgatgttcagcgctttgtgttattggttaacacagtacactctttccaactgcattatcaaacatagtcaacagtgtaaagtgacttcgcatgaggagaattgtaaggggtaatatttcaagcccattgaactttctggagaacctttccctccaaaactctttaggtttgcatttacaatgagcctctctgacaagtgaaaatgtgtgggcaggtacattggacaggtatatatattcccttttctcagaaccatctttaagtcatgcttaaaggggacaacacaatttaagaaaaaagaataggaggttgtgataattggtattctgaagagctcatatttataaagccaacccatcattttacaaacatttcagaattttaccttttagaaggaaacagttctgcctgtttgagaagtgctggtaaagtttaaaagaacctttatgtgaaacacgaaacgtcatctacccaggtaaattgcttgtcttacctgttgtggttttttattactgtgttgtaggtatgtgactggtgtaagcacataagacacacaaaagaatacctggattttggggacggggaaagaaggcttcagttctgcagtgcaaaatgtctcaatcaatacaaaatggacattttctacaaagagacccaggccaatcttccagctgggctgtgcagcacattacaccctcccatggaaaataaagcagaaggcaccggggtgcagctgctcactccagactcttggaatatcccgctaacagatgctcggaggaaggccccctccccggtggctacagctggccaaagccagggccctggcccgtcggcgtccaccaccgtctctccatctgacactgccaactgctctgtcactaaaatccccacgccagtgcccaagtccatccccatcagcgagactccaaatatccctcctgtctccgtccagccacctgctagcatcgggcctccccttggcgtcccgcctcggagccctcccatggtgatgaccaaccgcggcccggtgccgctgcccatcttcatggagcagcagatcatgcagcagatccgcccgcccttcatccgcgggcctccgcaccatgcctccaaccccaacagccccctgtccaaccccatgcttcccggcatcgggcccccgcccggtggccccagaaacctgggccccacttccagccccatgcaccggcccatgctatcgccccacatccaccccccgagcacccccaccatgcccgg

SEQ ID NO: 36784 - DNA, 2300 bp, Homo sapien
tttcctttttctttcacggcgtaaaataattcaagttttccagacagtgcaaggtgaggcagtcatcttcagaagtcagcttccagagctgaggcaaacaaggctcacatggataggtccccaggtcagagttagaggcagatggtgctgagggggttgtccctgcagagaccgcagggacaaaggtccttctttcatcctttgaaccctccagaactctccttgggcataagcattcagttccccactctctcgttatgcaaataggacccactttaagagaaaccagcataacagggatgttaaaaatcacaggcttttgtaattttttggcaaattatgaacacagaggagcctctcgaaaaggtccatgttaaattcttcaaaaggcaaagattcacaagttttataaaaagaccacgtctctgtggctgttaattttaagaggagagtctagtttgtgatgttggcgggatattggtaaggcagaagataatcttgggatctgttgttttgggtttcgcttctgtctttttaaaaaagtcagaacttggcttgcttcagtttgtcaatgtggtagcagagtttcagtgcaggtcccagcttcaggcccaggtacttcatgaccatgtcactcttcagcaacagcagagcgttgccatcaatctcctggtgggataggatcagaagaaagataaacccagaagatggtcagagtcatcgaacagtggctaaggttaaggtgtggtcaaggggtgtgctcagggcatatggattgatttaggcagcatattctcttggtcctggggcaaggtcttttaaaatattaaagcaaacaaatactgtgttctcctctccccatcatctccctggagtcatttgatacacggggtgtttcatattcctgccctcccctcatagaaggaatcaaacacaacctcatgtgtgttcccaatatcccacttaggaagtttatctcctcatccaaacttggctaaaggggcaaaaaccgtcatccattagaacctggaactagagggtctttccattccaaacctccacctattgccctaatttctcatttcttagtaggcccacctacctttagctgataacaaagcaactcattccacctatggaagatttcaggtgtgtttagccctgtctattccactagatggaatacactaaagaatgcccctgcttcatctcagggttcagcacaaagaactactaagaggatgagccagtcctttgaggtttggtcccggtgttgctgccattggtcattgaaaatggtcaccctccagaatgcatgtggagttcatgaacctagcaaggctgggcttccatggtcacctttagtgccattttcaggtcactggagacaaagggtagaaatttcaggtgctcaagcagggagaaaagacatagttacaggattcatataatggtgccagggtcaccagctctctcattcatctgcccagccagccagtattgatggagcacccactctgtgtcactctccatgtctttggcaaaatggcagtgggcaaggcttacttgtgggccactcccaggagcctcattttctactgtcttttatttccctcacctcctggactcccactgtctcctcccaccctggaagacagccagactccccctgcccaaatctgtccaagcataacccactctgtggttcttggtcttaagtccccattgttaggtgaggtcaacatatgcctaataaaaggcaagtgctgagttagatgagaatcctcctaagattggagagcatgatttctatgacagaatcaccaaataaaataagaaacaggaaacaaaaataatggtcactgtggaaggcggaataatgctccttcccctccatgcacgacgtctggattctagtccccaaacctgtgaatgtcaagttacacggtgaaggggaattaaggttgcagatgggattaagcttgctaatcagctgactttaaagtagggagattatcccggattatggggccaggtgggtggggggagtggcggctgtgtaatcacaaagctccttaaacgtggaagaggacatcagcagtgagaaccagggatggcagcccgagcagccgaacaggcctcagcttgatgttacaggctttaaagatgatggcagggggacaggagccaaggactgatggtggatctagaagccagaaaagacaaccaagcggattctccctagaacctccagaaggaaaggcagccttgctggctgagcccactgagacccatgccag

SEQ ID NO: 36785 - DNA, 2300 bp, Homo sapien
ttgtaaggctcaggttctctctcatgtcctgtagataccgaggaagttatttactccataactattaaccaatgaatgaatgttccaattaagttgttttaatcgcccaaggtatcttcaatatgaactagagtaatattgagtcacgttgacccctttgataaaattttggtagaaagtaactgtattcaaacaaacaaacaaaagaagtgaacactcttcttgtctaaatcacaatttattttgtggattaaagatgccagcacctgagacttgaggagtagaatgatgctggtggtaaaccccttgcaggctttctactgtttgggggtgtggaggagataaaaagcctgaaaaaaagaggccaaatggactccttcttcctagaaggctgaccccaggaatcctctgaaagacacccctacctctaccctatgcccactcctcaaataacaaaatctactggaaatctcctgtgttccatgaggcgaacagtccctcatgtggcgcccccactcctcgattctccgtgagccattagagctggccagatggccgggggtctcccagcctctctatcaaatagttgtgtctgtgtccactgcagaagatgttctgtttctgatgagcctgtccaaagaggctcctgcctctgacagaagagtaggtccgggagatgggccaggcatctaagtagatccaaggggttggaaaccaagttctctgattatacctcagaacagtggaagcacaaggactggtggaaacaaagggacagggtatgtgagatgcagccattcgaggcctccaggacctgcacaggttgtattagagaccccttctggttattcccctggaccacaaccctgagcccctgtggcggaccctaaggtactgctatctgcaggctactcacaccattatctgttgtccatgcttgagaactagggttagaatggcaaaccatgccaagaggagctgaagcagcttaggaaaccagtaggcttctaagatgaacttcatgaactctctcctaatagtggtgctttctgtgtttcattcataagcaacaaaccctttgctgaaaaaaactacaacaaacaaacataaactccctggcagagaagtgggcagatactctgtaccagatctatcctagctactgctgagttaataatgacaacttccaatctggacatgcagaatcaagaggaatgaaacggcttcctttcttctgtccacaatagttatcttttgctgtgtcataaattacccccaacacttaggggcttaaaataacatttagggtctcacagcttctgtgggtcaggggaccaggtgcagccacaggccttctggttctgaatctctcacaaggctgcatctcaaacctcaactagggcaggacccacttttccagctttttcacatggttgtcagcaggactgagtttccaatgagctgttggtttgttgccagatgggtccctttgcagagcatctcacagcacagcaacttgctccaccagagtgagcaatgctaggagtgctgtgaacctctctcaaagtcgagatgtccatttagaaaggaaacttacaaggcgtcctctattccaggaacttcagcattttcctgattaaggaccacttttaatttccccaaggttctatgaaagaccaaaaaattgtgggggctgtggaggaaacagcgtgaccacaggatgtcccacccacttcgcctcccccagctctcgggaattctcataagcttggcgtggaggtttggcaaagctgcgagatcatatggagggtggtatggaacctgctctcctcccgagagcacagaaaggccattcattatcccaaacagatgactttggtcaaaaatgcctttggtcaaaatttccaaaggaggaaatcaacccctaggcttagaacaaagtcttaggcaaaccagaaacatctgagaggatgtaagaagttcaggtgtcaggcattaaaattatggtcggttgctgtgcatctcattaggggagaaaaaatagaaatgtacttaaatggaccagaggggagtcataaggttgattctcagggctgagtgatctgaactgcagagacaaccttagagagaaaatccatactggccagagaccaagttaatggaaaatttaattgaagcaaatgaaatgctcagcctcataggtagtatggccctgtgccctttgaaccagaaaggctgggccaggaggccacagagggccctaagggaaaactcccttatctgcaagaacaaggggcggg

SEQ ID NO: 36786 - DNA, 2300 bp, Homo sapien
tagttatatcacctgtcattattttatgtactactaagatagaaaaaaaaatgctccctatggaattctgacacactgtagggtgcaccctgatttcagagatgttaatatatgaaaaatatgcttcttagaatcaatgagaccgagtatttttcttaaactcacaagaacagaaaaaaaattcgtatccagaacaccttgtctgtctaacaatgcattgttttctgtttaacagtgcattcaaaaaataaatttatactttaaaattctatttactacatatggtatttccaagaacaatcaagattattgatagaatactgctcatattcagaaaattaacaaagtgaccttaaatctataaaggatacccaatatttcctatcatgtttttaagaacttccactattttatattttctgtcctgagcagagcaatcttgtccttgtagacaaggcccaggccagggtgtagggactgtgcccatcgtcttccccaacttcttctacaagcttttgggcaaaagcctctcatttccactgtaaggtaccactaatccttaaaaatgaattttatcacccctgaatcaaagtctaaagttctgcctcactcatcacattcctgaacattccaggaagtctgacccctgaactcatgataccactatgttctttgagtcaagtttgatcaactacctcttgcttcaaggtttaggcaattctacctgagaagcttattctttttttttttttttttttttttgagacagtcttgctctgtcacccaggcttgtatgtagtggtgcgatctcagctcactgcaacctctgcctccctggttcaagcaattctcctgcctcagcctcccgagtagctgggattacaggcatgggcagccaagcctggctaatttttgtattcttagtagagatggggtttcgctatgttgtccaggctagtctcgaactcctaggctcaagtgatccagcagcctcagcttcccaaagtgctgggattacaggcatgagtcagtgtgcctggtgtgcccggccttattattcatatttttagtgccatgctaagattattgtagtgtgtgtggtatctgtacaaaggattgtacatgctgaacaattacccatagtcctgccatctttgccttggtggcattttagcatgtctgcttccactttttgaccatacaaattttttgcatagttgaggtcattttaatgtgcgatgctttttttattcaacatcatgttgttcaaaaagtgtcattaaaggcttttaactagttgattgttttattctgcagatattaagtattctcctattgcttattatttgggttgcacgcattttaattttgcaattctaaatcatgtgaaaatgaacaaatcatgttaaaatgaacatacctgtatgtaaatctctgtccacattttgatacaaggacatcatcaactttcatacaattgatttgatcaatttaaatttcttaaatttctttcaagagaaaaagaggtcatgacaatttataactcaagcaaagagataggagtgaacatgagagagtggctttgtttatttaatattattgttacaacagttcaaagttgaactaactgaggaaactgagacacagacaaagtcattttgttgctggtgacattatcagctgtgtttggagctgggaaactattgttttctttgcctagccagtatcttccctacttcacttgccccatggaaattcaacatccttgaaattacaccagttaactcccccagaggcccaacagcatcgtaaatgcatctagtggtacctagctccttcatatttggtcttcccctccaataagtggtaggtatcgccaaaatcaccagacaggatcatgtttgccttgcaaaccaaacaaacccttctgtttttgttttgctttgtgtctggactaattcttagcacctcttctgcctgtgagcgatttgtcacctcattctgtaagactggcaccagcagaaatgcagtctcaaaggatcccggggagaaagcgaggccgaccctcacttcactccacgcctatgaagatggcagttcataacctttattctgcttcagctggctctttaccagcagtgaagatcccaaagaaaagagggcggaaacccgggtacaaggtacggctccatcatctccttctccaaagtggtattgggctggggcacgggtacttggtcagacctgcactgcaaaatgccactagaggttgggagcttggtagagacaggatgagaaat

SEQ ID NO: 36787 - DNA, 2300 bp, Homo sapien
atgtgtgaggccacgggtgtgagtataataaccgctgtcgctgggacagagatgctgtccaaacttaaatcatccatcttctttccttttctttccttttcttttcttctttttcttttctttcttttcttttcttttcttcttttctttttctttcttttttctttttttttgagatggaatttcactcttgtcacccaagctggagtgcaatggcgtgatctcagctcactgcaacctctccctcccaggttcaagcgattctcctgcctcagcctcccgagtagctgggattacaggcaagcgccaccaagcctggctaatttttgtatttttagtagagatggggtttcaccatgttggccagtctggtctcgaactcctaacctcaagtccaggagtcccaaaatgctgggattacaggcatgagccaccacacctagcccatccatcttattttcttttttttttttttttttttgagatggagtctcgctctgtcacccaggctggagtgcagtggcacggtatcggctcactgtgagctccgcctcccgggttcacgccattctccctcctcagcctcccaagtagctgggactacaggcgcccgccaccacgcccagctaattttttgtatttttagtagagacggggtttcaccattcacaggatggtctcgatctcctgacctcgtgatccacccgccttggcctcccaaagtgctgggattacaggcatgagccactgcacctggcccatccatcttattttcttttcttctcctcttcctccttctttagtgaaatcaacttatatgaaatgaaaatgcaaactaccaaacctgccttttcccatacaaaacaacaaaatttgatgattaaatgaactaaagtagtgaatttcttcttgctcaattaattacaaggctttgacttaaaacaattttttatattttcataataaatttcagaggagagatttcttatgtacttctaatgtgactctacacatatatttagagaaacctcaagttgtccattgcagtttttttcactctcagtaactggccaggttgtggcctaagccttcgttagccctggttgatatttagtcccggctaaatttgtttgctgctcatccctaggagtaagccacatgtttgtagaatggatgtttcatcttgtaggaaatacctgtgaatatgccaatatcccagagtggatgaaatgggcaatggggagccctgctccactttacaaaaagaaaggaaaagaaaagatcccttcgccgatatatattgatttgctgcagaaaatgcaatggggcatgggaatgaatagtcactcttgccctgtttctatcctgtgcaggtcccaccacgttgaggtgggtagagatgcttacacacacacacatacaggcctggagccaaagtcagggccggctttaatgaactgtacacatatgttgtgggcagccgctgatttaatatgtacaaccatggtgtgtgcacacacctggataggcacactgctctgggaatcacacagggtctcctgaacaatgatgctattgtaatatttctttttgttttatttgtccaaagtcaaacattcactctgtcagatcaccagtgtcttataagcctggtgttggcccacactgctgcaggattgggacaaagagacgatgttacagtctggtttctatggcaacagaggaggggtaatgaaaactgaaatgttggaaacacccattctaaccattgtgacataattcaggttattacaaggatgtaactaccaaagaagcagaagtgtcattaccttgcagctcatgtcgacaaaaagctacactgcacatttctcttaggctgctaagaggaaggaaacacaaaacacacacacacacacacacacacacacacacacacacacacacacacacacacagaggcctcgttttctgcatgtaaaatgtgtgtgttctttaaaagccagtggttggctggttttccggacatgatgtggttgaagctgtcatcgtaatggaaattcattgctgtagctatggtaaatcgagttttctgcctgtgctgaatgcattagtctaatgagatgtttgcagctggagcgcagggctgctggagactaactgtgagctactaacacgggtggaagatagcttttgcaatactcggtttgcatgtgctgaaagtcatctgtcttctgagtcaacactcccgacctggtaaacaacctgctcagggctctggtgaacaagctgtaggtaaggga

SEQ ID NO: 36788 - DNA, 2300 bp, Homo sapien
tctacgtctcttatctctccccctgtatttagctgacatatttattttgacatatttagttgatctgcctgcctcagcctcccaaagtgctgggattataggcgtgagccaccatgcccagctgggagttggtttattaagcctaacattatgatattaaaaatttgtctttgaaacgtctaatctgagctagggttttatggctgatttttgacatagtgatactgaggagaaactcttccattcaatctgtaaaattctgagatcatgtgaaatatttgtggcataactttaatattagttttgggccacagtgataaagatgctttaactgtaaaattaaaatgatctgtttcaggttttttattgttttgcagatcagcaattcatgctaaaaaagtgtcctgccctacttcaagaaatggttaatgtaatctgccaactaatagtaatggcccggaaccgtgaaggtgaggaggaaatatagttaattatgttatactttttcttgcaagcatatgcagattgtacttcatattttaggatttatgggtactcagacttctgtcggccagttcagtgagcttcttcaattttactcatgtcttttcatatttctttcctatattttctattatttaaagtctatatcacagctcactgggttttttttgttcttttttttttttgagatggagtcttgctttgtcgcccaggctggagtgcagtgacaaaatcttggctctctgcaacctctgcctcctgggttcaagcgattctcctgcctcagcctcctgagcagctgggattacaggcgcgtaccaccacacctggctaatttttgtatttttggtagagacagggttttaccatgttggccaggatggtctccatctcctgacctcgtgatccacctgcctcagcctcccaaagccctggtcactgtgtttttgattttaattcttgttttttttttttttggagacagagtctcactctgtcgcctaggctggagtgcagtggcgcgatcttggctcactgcaacctccgcctcccagggtcaagtgattctcctgcctcagcctcctgagtagctggcattacaggcgcatgccaccacgcccggctaatttttgtatttttagtagagacggggtttcatcaggttggtcaggctggtctcaaactcctgaccttgtgatccacctgcctcagcctcccaaagtgctgtgattacaggcatgataatttaattattttattgttcaattgtttgcaaagatttaaaatttctctttctttgaataatttttgagttaggtcattttttctaacagtgaatttgaaatctttaactgatataaaagtgattcatatgtcatgtaatttttattaattaattatagacagcatctaccagggctggagtccagtagggtaatcatagctcactgcagcctcaaactcctgggctcaagcagtccttctaccttagctctccgagtagctggaactacaggtgcataccacagcacggagctaactttacattttgtgtagaggtgggatctcactttgtcgcccagactggtctggtttccaactcctggctttaagcaatcctcccacttcagcttcccaaagccctgggattacagtcatgagccacatgcctacaggcacctagccatttttttttttttggtatggaaggaaaagaatgagggaatttctggtcagtaatggaaaggaatgcccttaaaaaaggatagtggttatggtttgttgttacgggtgatgttggttcttgtcatggtgtcatatgttggtgatactgataatgtctgataatttactattatttgaggtgaggcaaataatttttcttttaaatcaatggttgttgctggaaaatgttcattagatcgagtttgtatatttttagtgtcttctctggtaacttttaaaggaaaatcttactatgatcctcaaatttgaggtgttatggatttagtgtgaattttgtttttgtgatgaattgtatactcctgaacatgtaaaaagtccagccctgtttctttttttcctgttctttctaagaaagggagtttcgtgctccaactttggcatccctagaaaactgcatgaagctttctcagatggccgttcagggacttcagcaatttaagtctccccttctgcagctccctcatattgaagaggacaatcttagacgggtttctaatcataagaaggtaattctttgctactttaaagtcagttttcagcagtttgtcctg

SEQ ID NO: 36789 - DNA, 2300 bp, Homo sapien
ccagcctaaaggcatatttttaagagagatctgtaatattggttaatgcaaagttaaaactgggaggataatttgtgttagttgaatgataaaaatcttatgaccttgtattcattgacacttaagcaatgtaaaatctaggttgggggtcttagaaagaactaatatcagccaggaacggtggcttacacctgtaatcctagcactttgggaagctaaggtgggaggatcgcttgaggtcaggagtttgggcaacatagtgacacccaggctgtatcaaaaaaaaaaaaaaaaaattacctgggtgtgatagcaacacacctatagtcctagctacttgggaggccaaagtgagaggatagtttgagccaagaaggttgagatgagtgagccatgatccgcaccattgcactctagcctgggcagcagagtgagaccctgtctcttaaaactaaagtgaaactagtatcattaatgtcattgtcatggaaatttaggttaaccttgagtgtgccccttaggtgattttttgattaaacctgattaatgggttctaaatagaaaactagtcttttggccagccgcagtggctcgtgcctataatatcagtactttgggaggctgaggtaggaggattgcttgaggccaagagtttgagaccagcctgggcaacatagggaaaccctcatctgtacaaaaaactaacacaattagctgaacgtggtgacacacccctgtggttccagccacttgggaagtcaaggctgcagcgagctgtgattgcaccactgcactccagcctgggcgacagagcaagactgtctcaaaaaaaaaatcttttgtgtttatcagtagaatgttagaactgaaattaatgatagagatcatctagccttttataaaaatatataattttttaaacctgggagcatatattcaagttgccctgaatatatatgtatgtattccctatttattaatttttttttttttaaagaaaatgaggcctggataatttgtgtcttgtctggggttccaagcttcttacttagtagccaagctcaatctagtgctctttctattttctcccccatggcacttacttttactttgagtctttgctcagtagatggcttgatccagacattcatataatacaaactaaggagggtgtgtatcatctagttttctgttttgtagaagaaaagtttacatatcatgtgatttttttcttattgcattgatcatagtcattaagagagattttaagattagaagggcaataaaaaacagtgaaaaaattattaatagaaatcgagactaagaaaccattaaggtcaacttgatagacaagcagctgaaaccaggtattcctcagattattccttagaaagttaacctttgatttgaggattctttgagccagatttaatttattgtgattattttttgatatttatttatttttatcttcattttttgagagacgaagtctcactctgtcagctaggctggagtgcagtggcgtagtctcagctcactgcagcctctacctcctgagttcaagtgattctcctgcttcaccttcccaagtagctgggactacaggtgtgcatcaccacacgagctaatttttgtattttttagtagagttggggtttcactatatgttggccaagctggtcttgaactcctgacctcaggtgatccgcccaccttggcttccaaagtgctgggattacaggctgtgcctggcctattttttgatatttaaatgtcagtattattttatgtaaatttgtcatctgttttcactttcaaattatcagtgcttagtttactatgtggcacatagtaggtgctcaataaaatacatatattggacaatataagtgtttttatttaatatatgggatgaaatttatgggaaaaatatataggatgaaaaatggattttgtctttctcaaaatactgagtagttcatattttaagttcaaaataggattgattatttctttacagaattgtgcttatttttgctaacagaaagcttgttttttttttttgtttttccccagggagccacagtagcagaaattaaaaaacaatatcgtttgctgtcacttaaatatcatccagataaaggaggtgatgaggttatgttcatgaggatagcaaaagcttatgctgcgtaagtatcaggatccattacaaatttttaagaatggtacagataagccaggtgcagtggttcatgcctgtaatcccagtactttgggaggctgaggcaggaggatcg

SEQ ID NO: 36790 - DNA, 2300 bp, Homo sapien
aataacatattcaacaaacaaaaggaacttcatgatcctgctcacttcagctgcaacaagtctgtgactaattttctgtagcaaggcaaattgttcactctgggtatatcagcgttgggagatcacaatgctatgttgatttcatagttcaaccttcccttcatttcttggttttattttttcacctataatatagttttgaactttgtgcagaaaaaaagtgaggagggaaatgcatagaaatgaatttcagaaatttcctttcaaagtgagtagataggaaatttgaagggaagagagaatacatatgaacacaatctattatgaaggaaagcattactgattaagatactagttttgaagacatgaaatgaaagacaatgagcaaccagatttttcctccaacaatggaaggaatattataatgcatttagttaacagagtataaagtattaaaatgagtccttgaaatatagtgtaatatttggtatttgcatattacactttctcctttgaaaagcattttcacaattagtcctttcaatctctgcaaccaggtgggctatccttttaacccagagaggggcaatggactctgggatagaccccagccacagctgccgctggaccgtggggtcgttcaaagatctgggcagaagtccagtttccagctcagcggacaccagcctctagggtcccacagccaggggaaggagaggctcccgagagcgactgctcccgccaccgtccatccctgaaatgcagtttcctgttcacaacccgcagggagaatgccagtcactgtcaggaaattttaaggtcctgggcgatggagggtcaagggcacactggctttgtggcatcaaaatgatatgggtttgaatcctcagacattcttttactgtgagggaccttgggcagtctctctgggcctcaattttctcatttgtagagcagacatactttgctttattccatggggtttactgatgactaaatgacacaaaacaataaaggtctcagcctaccgcctgaagctggtggttataattagcagctctggaatgggtagggaaccatctgtaacggcttggggaaatcttcatctgcaagatgggcacagcgtagattcaaatctgtcgcccagtggagagcgatccggtctcactgcaacctccgcctcccgggttcaagcgattctcctgcctcagcctcctgagtagctgggattacaggcgcgtgccaccacagccggctagtttttgtatttttagtagagacgcggtttcaccatgttggttaggctggtctggaactcctgacctcatgatccacccggtctcccaaagtactgggattacaggcatgagccactgcgcccggccagatagtaaacattgctttgaaaacacaactgcaacccacacctcccgcaacccacacctccccatcccccaattttttttttttttgagatggaggcgcgcgccaccacgtccggctaatttttgtatttttagtagagagtgggtttcaccatgttggtcaggctggtctcgaactcctgatctcatgatccgtccgcctcggcctctcaaagtgctgggattacaggcgtgagccactgtgcccggcctcccaccccctattctaaatgacacttgtttccaaaatatgggggctggaggagcagatccagaacccaaggaaacgtgatcaaccagggcaattaatccagagggcaggacaggctgagcctcagctcttctctgaatatctgggacccctgcgcagccaggtgaaccgcccgcgaccgctgctccggcgggaagccttctctgggatcctgtacgccgacgcccggaatccggcgtggtgcgctgggaaactgagcggtggaggaaggcggagcggttaggggcgggaccctaggggaggggttgggggagggctttgacgttagggcggggctaagggcgagacctcgccgagttccaccgttgcgctcgccacgtctcccttagcgagctcgctggggacacgcagggggagggaaaactgagcggggcgggaactatctcctctcgcgagagctggcgacggcggcggcagcggcagaggtggcggcggcgtgtccgtgagagtggcgtgggggcggggaggagaggcggcggcggcagtgtccaagctacgccactcgggccggggcgttgggagcgggagtgcagagcgtggtcgtggcggcggcggtgagaagagcgaggcggaggagggggtgccatggccgggcagcagttcca

SEQ ID NO: 36791 - DNA, 2300 bp, Homo sapien
gagtgccacaggggggtcactttcaatgacagagctgggaagatatttcctttatatatgatgagttcaccttaatttttttacaatttaataatctatgtctatattttacttttcttattattggtggtttcattgacccagggcacctatgtaaatctgagggatgctatttacattgtagatttgaatatttatcatgaaaaatgtctggtaggccacgtgaagtggctcacgcctgtaatcccagcactttgggaggctgaggtgggcggatcacctgaggtcacgagtttgagaccagcccagccaacatggtgaaaccctgtctttactaaaaatacaaaattagtcgagcatgatggtgcatgcctgtaatcccagcaactcgggaggctgaggcaagagaataaattgaaccccgggggtacaggttgcagtgagctgagattgagccattatactccagcttgggcaacaagagcaaaactctgtctcaaaaaaataaaaagtctggtagatggcaataatgtttcttgttctttttttctttttcttttctttttttttttctgagacagggtcttgctctgttgtccaggctggagtgcagtggcatgatctctgcttacagcaacctccgcctcctgggttcaagtgattctcagcttcccaagtagctggggttacgggtatgcgccaccatgcccggctaatttttaatttttttttggtagagacgaggttttgccatgttggccaggctggtctcgaactcctgacctcaggtgatccacccaccttggcctcccaaagtgctgggattacaggtgtgagctactgtgcctagccaacgtttcttgttttaataaaatcagatgtttatgacagttttccaatagatacaaaaagatgtcttaaggaggggacacttctttctttctttttaaattgaaaaggggtctcattaagtttcccaggccggtcttgaactccggagctcaagtgattctcctgcctcagcatctccaagtcctgggattataggcatgagccactgtgcctggcccgagggacacttttttctaatttgcccatagacagtcctacatcggccaccatgactttctactgcactgacaggaaatagaaatggaaagtagagaactgaaaagaataatggctaattagtccttacatggtaactcttaaacaacatatgtctgaagaatttttggcaagtgctgaattctactgagttcataactgaattttctggtgattgctgttgattaaagtgtgacctggcccgtcgtggtcaccggcgcgggctatggctgcgacttccctcatgtccgtgttggctgcctggctgctgcagcctgcacatagctgctcccttccacctcgcggcagttcaaaatgaagctgttgtcatttctggaaggaaactagcccagcagatcaagcagaaagtgcggcaggaggtggaagagtgggtggcctcaggcaacaaacctgagcatgatcctggttggcgagaatcctgcaagtccaaaactctttaagaacacgacaaaaccttccagtgtggatatcctgggaggtcactctccccaggcgctgtccacgtggcatgggggagcacaggactctgctcataatatacaggagagtcacaaaggcaaagaaaatgaggaacagaataatcaagaatgacattaagaagcttcaaaaaaggccaggatcggtggcgcacacccataatcccagcactttgggaggccgaggtaggtggatcacttgagatcaggagttcgagaccagcctggccaacatggcaaaactccatctctgctgaaaatataaaaattagctgggtttggtggcatgcacctgtagtcccagctactcaggaggctgaggcaggagaattgcttgaacccgagagacggaggttgcagtgagccgagattgtgccactgcactccagcctgggtgacagagtgaaaccctgtctcaaaaaaaaaaaaaaaaaaaaaaaaaagaacatgaagcttcaaaaggcaggtctcttgaaaccttctcccccaaaagtacctgctgctatagttccagcaaaaaagatgacttcttgcaggcaagaaggctccagcccagaaggttcctgcccagaaagccacaggctagaggcagtgcctcctctgaaagctcagaagtttcaaaagcaacgtgcccagaaagcatgttgtccaaaagcatctggcaagaaagcgttaagaggctattataaaagtagt

SEQ ID NO: 36792 - DNA, 2300 bp, Homo sapien
cgtttggattattaatcatttcctttctgtcctcactgttgccatcatcctttcattatacctgatctatggaagtagtgtaatgagtctccctgcctcctcaccctacatatcacggcctaaagatgtattcctcaaactgcttttcatgacaccctcctcataaatcttaaagaatttctcactggctaactctcatgaccctcacggcctctcataaccttgttctaacttagccctttaatagccctactttcatagactactgaatactctccgaataccacataatcattatcactttcaccccatgatcatttaattcttctattttcgaatcctcttctcttcctcaatatagggcttagttcatatcctgcttccttcatgaactctttcctaatttctcaaaactacattgatatcttcctgaaccgaactgttccacacattgaacactcatacaggctctactgtattgatttttaaaatagccagtcacccacttatgaagattcaacttaaccaactaatgacacttatccaactaaacctacttagagcacttcaggttggcagcatggtagctaggtgaaatagcatatatcagtcactgtgtgccagacagtgtgctgagtgattaatgtatgctatttcatttaatacagtaactgtaggacccctgattttgaaactgaaccttagcgaggttgggtcagctgcccaaggtcactagctagtgacccaggcttgtattaatacaatattattacttctacttaagaagtgataataggccaggcatggtggctcatgcctgtaatcccagcactttgggaggccgaggcaggtggatcgtctgaggtcaggagttcgagaccagtcaggccaacatggtgaaaccccgtctgtactaaaaataaaaattagccaagcatggtggcatgtgcctgtagtcccagctgctcgggcggctaaggcaggaggatcgcttgaacccaggaggcagatgttgcagtgagctgagattgcgtcactgcactccagcctgggcgatagagtgagactccatctcaaaaaaaaaaaaaaaaaagtgataatagaaaattttcttctatggctggtattgctcagaaggtaattctaaaaaagagttttaaaatgttctgttcatggccaggtgcagtggctcatgcctataatcccagcactttgggaggccgaggtggatggatcatttgagttcaggagttcaagatcagcctggccaacatagtgaaaccccgtctctactacaaacacaaaaattagctgggtgtggtggcatgtgcctgtagtcccagctacctgggaggctgtggcatgagaatcgcttggattttatattttaaagcagaaattcttccttttctccctcttttctccttttttccatttcttctcccacatgactgaccatttgtttcccaggagttaccactcttttattattcatcacactgtataactccttgtctgtgtaactgcgagaggttctcaaagccccagaattgatggcattcttttatactttttatatcctcagaacttcaggatttttatagtgcctagtaaatagtaggagttaaataactttgaaagaattaagggtcagcaggacttagttccttgcttggggcacgaaggaaaggaaatagataaggatcaaatgatttgggaacttggatttattatttgcatagcatgagtttctttcattattaaaatgatctacaaaagcatatttttccatctgggtacaaactatttagataacaaagattttcttcctttgcaagtgaacctagtaccaataaatgttagctgctaattactttattatcattgtttttattaatgttaacatctgatcatatcaaacaaaatgttaaaaagcttataataaatgttatttttgtaaggtttttgcctcaagttgtttgcaaagtctgaaaatactcagattgtatttttctgtcttctttttgttacagaatacttcagagagtcagagttgtgccagaagtctcttaatggcagatagaatgcaaatagttgtgattctctcagaattttttaataccacatggcaggaggcaaattgtgcaagtaagtaattctttcattttcatgttgcagttatggttcagtagtacagatgtcagattttattttagtgaattttgggatctttgaagctggataatactttttattgctaagtttaaataaactgtcatggacaccatggtttattaatg

SEQ ID NO: 36793 - DNA, 2300 bp, Homo sapien
ccatgttggccaggctggtgtcgaactcctgacttcaggtgatccgcccgcctcggcctcccaaagtgctgggattacaggcatgagtcaccgtgcccggccccttaacatgctttttgaagccatccttttaccactacaaacaatattgtaatgaataagtgtctatgacaaggttgtgaacttgctgcatcaaagagcttgtgcatttgcaaggttgttggttctgcacattgatttccatagaagttaacaatttacacatccacctgcaacacaggatggtgcttgaaagaatttaaaagaaagataattctaatacatagaaagacctaagagttacatgatgacttttgcaaaacttaagacaacttattttctcttttggaaatacgtttattgttacacaaatcaaatttcctactattcagtttcttagtaacaaaaatgaaacaaaatttagctatcccaagcaaatttaggaacataaaacaataaccaaacagacggggtaaaaagtaactataagaacccccaggctgggcacagcagcctgtgcctgtagtccaattgtttggcaggccgaggcaggaggatcccttgaacctaggagttcgaggccatcctgggcagtctagcgagactatgtctcaaaaccaaaccaaacaaaatacacaacaacaacaaaaaagtttttgaagaaccctcagaaacataaattaggaccctaagctaagtagactttagtgcaacagctctgcaatttacaaggcaaaaattacaaccctgaaaagcaggatgacacaaagcccggaaataattttctaccaacctggttggtcagatacttgtcagaaaactgttttccaggttatgagcttaaattctttttacagactggcaacggtatcaggacgctttttagagtgtcccctgctattgcctcgggcatgtcagaaactggataggagtttcaagttgagcagtttgtccaggatttcctgggctttagcactgaacgcgctgcgtccctggtaccccttcagttccaagcaaacctgcttgttggccactgtaggaccagacttacgtcaagtacagttgccactacacagatgtggctacttacatttaagttaaatactttttacttttgagatggagtctcactttgtcgtgcaggctggggtacagtggcgcgatctcggctcactgcagcctcgacctcctggctcaagccatcctccccgctcaacctaggactacaggcttgcgccaccacgcccagcggctaatttttgtatttttagtagatacggggtttcgccatgttggcgaggctggtctccaactcctggcttcaagcgatctgcctgcctcggcctcccaaagtgctgggattacaggcgtgagccaccgcgccggccctaaattaaattaaaaattcagttcctcagccggctcaacaccacacatgtggccagtggctgccttaataacgcagatgtagaatatttccctcatctcacagagttctgacaacgctgaggcagacagttgagagtttttttaaaaacaaaaacaaaaagcttggaaaccgctagtctccaccacctataataaccaacgggcattattactctctccaaatgggatgaggaaaaaactacgctaaggaacaccatgcagaaaatctgccgaggcacaggccagcggggtttctctgcgaacgcagccgacggccatttccacagcggaggccgtcgtcggtccagcgaggtaagaaacttgtaggacgcccggaactcccagagggttgggcgttcaagggtcaggacccccgagatgcaattgtccaaagcggtgggtgctcgtggtcaccggctggcgagcctcggctacggataccccaatgcaccactccgccccgccccgcgcctaacgccggctggagagcgcgcggccgcagggtaggcgccctcccgcacgcgcgaaggcctgcggcccggaggcagccggcagccaatggggcggggcgccgcgcgcagggggcggggccgtgacgcgccctcctcgtgacccggctctcggcctgcgctcgcggaaaccggaagcggcggctgtccgcggtgccggctgggggcggagaggcggcggtgggctccctggggtgtgtgagcccggtgatggagccgggcccgacagccgcgcagcggaggtgttcgttgccgccgtggctgccgctggggctgctgctgtggtcggggctggccctgggcgcgctccccttcggcagcagt

SEQ ID NO: 36794 - DNA, 2300 bp, Homo sapien
aaccccgcccccgccccaactcaaggatggctgacctttcagcccccatcatctttgtcctcaggcgattctagcttctgaggcttcacgcaggtgttcctcccccaactcccccagctcctttccttccagcttctgcccatctctagccttctcagcccagctccgttcaacaaatagttattgactgtcagttacgtacagcgggtgttttgccttttctatgaaacttccccagctactcttcctcagtatgctcctccccactcagactcctctacctcgcttgtccatcactttctgtttggaaacctatgcattattcaagcccctgctcacataacacttctgtaaagccatgccagggtggaaagaccccgagggaggaaagtgagcctgatggaggaactgaacgaagtcccgtgtggctggagcagaatgaggctcgggagaggcgcaaaggtcaggtctcaaacagccttgtgggccacacagggattttgaatttcaccctggaagcaatgggaagctattgaacaggtttgagcagtgaggtcccccttgtcttgactgaacttttggagaatagaaactacatgcttttcatctttgtgttcctctactcctaccaatgtctggcacgcgatgcccaagaaacatttgctgaaccaatgaacccataactcattaagcacatactacccagcccttccttagctcttcatggtggctaaccaggttgtaagtaaccaagatggcagaaaccaagttatggtgtctctgaattctcaacagtacctgattgatactgaattcatgctaggaatacagtacagtcatcctttggtatccatgggggattgattccaggacaccacctcataccaaaatttgaggatgggccgggtgcagtggctcatgactataatcccagcactttgggaggccaaggcaggcagatcacttgaggtcaggagttcgagaccagcctggctgacatggtgaaaccccatctctgctaaaaatacaaaaattagccaggcatggtggtgtgcgcctatagttccagctgctcgggaggctgaggcaggagaatcgcttgaatccaggagacagaggttgcagtgaactgtgattgcaccactgcactccagtctgggagacagggcgagacttcatctgaaaaaaataataataataagttgaagatgctcaagtccctgatataaaatggcatagtatttgcatataacctatgtacatcttcctgtatactttaaatcatctctagatttaatacctaatgcaatgcctgcacatcagttccaaggaattcaatgtagtacttagtgccatagattcaagcgtgtttgcttttttaaaaccttgtggaaaaagtttccaaatattctggatctgcaattggtagaatatacagaggcagaacccacaaatacggaggactgactgtcctctcctgtccattgattaaaggtgtgcaaggggaagaattcaaagtcaggaggccagattctgatgacacttcttgtccttgccagtaactgatggcctcaccttgggaacacactgcctaactactctgaagccttggcttcttcattaataaaatggggacaatgccccttaattcatggattgtgagaactaaatagcattcgtatgtgaatgacttgattttgaaggaatacattaatgaatgaaaatcagtgcatgtcctggagccaaggtaagaccagtgatgacagcgccactttaaaatgacaaaagacagttctggagcaagtgggatccttggagaactgctctgtctctcatagcaggcttcccctcttttgcagttggcccaggacccagctggtcccacatcttcccccagggcgtgccaccccggctgacacccttcacacttggctgcctacactcctgctctaagaagcctgtttcaaagaagcccacattcccttgttgcacgtagaaggctgcagttggagacgggacaactaggttctgggaagccatggcagaaatcacgcagactctgattcccgccgagaaccagcctaaagaaccactcatggcaagacgggggcccaccggcctgctggctcctcaccaaactctactccgcattgactgtgggctcttgttctagaggcacccgcatcctcaggatgaaatgtgagtacaagagcagagactgccggtgctggtgtttgcaggtatgtgtgtgtgtgtgtgtgtgcacgtgcgtgtccacagcaattagcctctgatacaca

SEQ ID NO: 36795 - DNA, 2300 bp, Homo sapien
ttcttgacaccatgcttgatcggggactggtgacaggaaaaagagggaagatacccattttgattttgagacaatttgatgagccttgggagtattttccagaagttttggtgcctacaaatgagccagcctggcaggagcgttcgagagtaggggaagaggtggtttggagcccaggaaagccatcgtccagcccccgcacaggcaaagcaattagtagttctccttctcgaaacagacccctaaatgcttcccctgcagacaggcctgggtctagtcatcaccccccacactgccctcatcttcgccccagataaattagttccacccttgaagttctttgtcctgaaccaaagaaccccataatcgcgtccgcgttatgggggtggtggtggtaggtggctgaagcaagtggatttctggcgtgaaccagaacctgaggattccaaacggagcctggcatcttattgtgtttctcaaatcctgcccgaaattcctcccctctctgggcgccgagttcgagaaagcgctacgccgccggtcgggctagctccacaagcggctgtacaagttggctgtcaaaaaacgctgatttctcctcctgtcacctaataaacccctacgcgcttatggcctcgtcccacaatcccccaatctcgtcccaattcgaaaaaccgaggaggagggaataaactgagagataaagatccccccatcttgctctttccccgggaccccagccttggtcgcggcgccccactaaggaggacacaggctctggtgtgtgtggtgtgcgagaccccgagctcgaggccgagccaaggctgggcagaaagttgcaatcacgtgctgtcggagcccactggagcgcacagcccgctccccctgggacgcccaggcggaggacctgctgcgccctcccagggctcgggggactccagcattcacttgcacgcacaggcgaactctgattgaaagcccgggatgacaccgagtctggagaaagagggaccggggggtgggctggcggaattgcagagcgccggccacagctcccctccccgcgaacgtcgagcggagggcgggaggtgtaacctctgacctctggccgggtccacgccctgaggagggactggcaagctcttgttcgacaagttcaagctgccgagagagcttaaatagaattaatctcttagagatcggggatcatcgctccctcggcatgcgctctcccagcgccgcgcacagagcaaggcgcgagagagctcaggaatcgcgggaaggcaagcggaatggggagggggtaggggatgagggcctctcttcactattcctccgcccggagagcgggagcccgcaacgcccgccgaggacgagcggcgggagggaacgctctgccctccagccgccccggtgcagataatggaggcgacaagagattcgctcagcgtcggatgggccagctctgcttggggaagctggcggcatcctcccctcggctggtgcccaaacccactgcgcgaaggccgaaggaacgcggaacctccagaagaccccatcctcagccctgactttccgtagatatgtgcaaaatgagtaaattactcacctcgggccagatccaagttttacccaacagaaggggcaccggaccaagaatgaaccaactcacatggccatgtccggcgcgcacaatcacacgccagcacacagccacccaatttcttccgcgaatctatctggcactctggagagagggggaaaagcgttttgagaaagccccgtcacccctccccttccttcttgccgtgaaatatacgaattcatttttattacgagccgcaccgtcctcaccatcacgcacgcacagagccacactcccatattcacactttctaactcgtaagctccgacagcgcctgcattttctttgggagccgcttggaggttcattaatatcattagcatttaaccccctccctcttcccatcccctccccgcacatggctgacgtcagaccccgccaggagttgggggaaaagctaagtgggccagggacgccctattcccctccccgcggctgcctgtcagagcgcttctggagatattacaggggacccagcccgcagcgacaggcacaaagtcacggggtaatgaacttcggggacccttcgccgctgcgtgcgcggctctccccggaaacccggacctggccgcctcttccctcggaagatttcccagcaatctagttttcccactctgcgcttgggttccggcagcgcggagcccgtctgcctctg

SEQ ID NO: 36796 - DNA, 2300 bp, Homo sapien
ctctgggcgccgagttcgagaaagcgctacgccgccggtcgggctagctccacaagcggctgtacaagttggctgtcaaaaaacgctgatttctcctcctgtcacctaataaacccctacgcgcttatggcctcgtcccacaatcccccaatctcgtcccaattcgaaaaaccgaggaggagggaataaactgagagataaagatccccccatcttgctctttccccgggaccccagccttggtcgcggcgccccactaaggaggacacaggctctggtgtgtgtggtgtgcgagaccccgagctcgaggccgagccaaggctgggcagaaagttgcaatcacgtgctgtcggagcccactggagcgcacagcccgctccccctgggacgcccaggcggaggacctgctgcgccctcccagggctcgggggactccagcattcacttgcacgcacaggcgaactctgattgaaagcccgggatgacaccgagtctggagaaagagggaccggggggtgggctggcggaattgcagagcgccggccacagctcccctccccgcgaacgtcgagcggagggcgggaggtgtaacctctgacctctggccgggtccacgccctgaggagggactggcaagctcttgttcgacaagttcaagctgccgagagagcttaaatagaattaatctcttagagatcggggatcatcgctccctcggcatgcgctctcccagcgccgcgcacagagcaaggcgcgagagagctcaggaatcgcgggaaggcaagcggaatggggagggggtaggggatgagggcctctcttcactattcctccgcccggagagcgggagcccgcaacgcccgccgaggacgagcggcgggagggaacgctctgccctccagccgccccggtgcagataatggaggcgacaagagattcgctcagcgtcggatgggccagctctgcttggggaagctggcggcatcctcccctcggctggtgcccaaacccactgcgcgaaggccgaaggaacgcggaacctccagaagaccccatcctcagccctgactttccgtagatatgtgcaaaatgagtaaattactcacctcgggccagatccaagttttacccaacagaaggggcaccggaccaagaatgaaccaactcacatggccatgtccggcgcgcacaatcacacgccagcacacagccacccaatttcttccgcgaatctatctggcactctggagagagggggaaaagcgttttgagaaagccccgtcacccctccccttccttcttgccgtgaaatatacgaattcatttttattacgagccgcaccgtcctcaccatcacgcacgcacagagccacactcccatattcacactttctaactcgtaagctccgacagcgcctgcattttctttgggagccgcttggaggttcattaatatcattagcatttaaccccctccctcttcccatcccctccccgcacatggctgacgtcagaccccgccaggagttgggggaaaagctaagtgggccagggacgccctattcccctccccgcggctgcctgtcagagcgcttctggagatattacaggggacccagcccgcagcgacaggcacaaagtcacggggtaatgaacttcggggacccttcgccgctgcgtgcgcggctctccccggaaacccggacctggccgcctcttccctcggaagatttcccagcaatctagttttcccactctgcgcttgggttccggcagcgcggagcccgtctgcctctgagactgcggtagtgttttccttctttccttgggagaccagcggtcggcagagattgcccacactctgcatgcctatgtagagggagagatcgaagactgagtgacaggaatggggaaaaagagggatttcgctccgtaggaaggccattttcgtgtctccatctctgtctttcaacatccctctcttgctgttcttccttcttcctcagtcttcctgtccatctctccatctgtctgtccatgtgtgtgtccatatcaagcagcattcccagcagctgcggttttgcaagagccgggaagaaacttaaggatgcttaaatttccactgttggacgaattctgagcgcccagggagcagcgcagcgcgcgactgacacccacctgtcccgcccaggagccttgcaggctggagggcagctggagagcggcggcgcccggcggcgaggcgggcgctgccggccgggactcgggcagcgcccaccaaccgctccgccccgggacag

SEQ ID NO: 36797 - DNA, 2300 bp, Homo sapien
catttaaccccctccctcttcccatcccctccccgcacatggctgacgtcagaccccgccaggagttgggggaaaagctaagtgggccagggacgccctattcccctccccgcggctgcctgtcagagcgcttctggagatattacaggggacccagcccgcagcgacaggcacaaagtcacggggtaatgaacttcggggacccttcgccgctgcgtgcgcggctctccccggaaacccggacctggccgcctcttccctcggaagatttcccagcaatctagttttcccactctgcgcttgggttccggcagcgcggagcccgtctgcctctgagactgcggtagtgttttccttctttccttgggagaccagcggtcggcagagattgcccacactctgcatgcctatgtagagggagagatcgaagactgagtgacaggaatggggaaaaagagggatttcgctccgtaggaaggccattttcgtgtctccatctctgtctttcaacatccctctcttgctgttcttccttcttcctcagtcttcctgtccatctctccatctgtctgtccatgtgtgtgtccatatcaagcagcattcccagcagctgcggttttgcaagagccgggaagaaacttaaggatgcttaaatttccactgttggacgaattctgagcgcccagggagcagcgcagcgcgcgactgacacccacctgtcccgcccaggagccttgcaggctggagggcagctggagagcggcggcgcccggcggcgaggcgggcgctgccggccgggactcgggcagcgcccaccaaccgctccgccccgggacagccagcatgagcaagccagccggatcaacaagtgggtacctctcgggccgccgtggggcctaggcgcgcagcctggggcgagcgagcggggaggctgggggaggtcctgcctggagcgctgcgaatctgagcccctgagagggattccagcgggcgtgtgcgttcggcccagacctgtagaccgtgagttggagcatttcgtggagaggggagagccgtttcgttgcctctggattgcttgatcccccctgtctggtgcggtgagaaggttacgacccgcgcagcccaccagtcggatgagttgtctccatttagccgccaggtgctggatgggggggccatgggggcgggaactgggccgcagctccaggcggtagcacaataacacactcgctcaaaactccgagctccagcgcgcaaaagcaactctgtgcaaagcggattttgaatggaatgctttgcaccccgtttctagctatttcaaataatcctgcaaactgggaagcagaaacaatttaaaagtcacattttccttaatcctaaatccgcgtaggtcataactggggaatttaaagtatggcgaaccactctagcaaagagaggaccaaatccctaatcccaaggacttttcgagccggagcccagcagaggcaggagtgcgcggcctgctccctccgtgcgcttctctccttcctcgaacttccttagctgccggctctccgaacgccaggccgcagctgacctctcaccaccccgagactcacgagcgcagggctaagtgtgtgtgcgagggcatttgcttgcaccctgcctgcggaacccaagaatgtgcaggcccgagccagcgttgagcaggcgcggtcacggtgctcagatctcccgggggcatttcagttcccgccatccagtggcccacggctgcgggctccagggtctgaggctggggactaccgttgccgccgcagtccccatatcccgaagttgccttgctgcttgtgttgttttcgcagatagcatttttggcgctctgtgcgttccttccctccccctccccctttcactcgccctcattgtcctgagtctttgaaagttgggagaatcggagatacttctgaggactggtaatgaagtctcacttaagtgggatgcaattcccgccctcctacccccctccaagaaggaggttgtgttttcattttgttttgctttgggtgctgacctttaaaaaattagagcaaaatgaacgtgaacaaaaagaaaaggagaaatgtttcgagctggggcagagggagcagagaaggagccctcaccgcggccggaatgcagagcggaccctggcccaggactgggtttccctttaggctcgggcctaccctggccctcgctgttggaatctccaggaggtaaagcgacctcgatttttgttgcccgcattcccgggcgtgagtgtccttcccaggagg

SEQ ID NO: 36798 - DNA, 2300 bp, Homo sapien
accctttcatttctagtacttagaatgaaaacatctagtaggtcttcaacaaatatttgttgaattaataaatgaatgttgttttctggaaaataatatacattgtatttaagtaatgcctttttttttttttttttttttgagatggagttttgctcttgttgcccaggctggagtgcaatggcacgatctcggctcaccacaatctccgcctcccaggttcaagcaattctcctgcctcagcctcccgagtagctgggattacaggcatgcgccatcacgctcggctaattttgtatttttagtacagacggggtttctccatgttggtcaggctggtctcaaactcccaacctgaggtgatccgcccgcctcggcctcccagagtactgggattacaggcgcaagccaccgcacccggccaagtaatttctttttattccagtgtttcttagtgttattaagaatggttgctgttggccgggcacggtggctcacttctgtactcccagcactttgggaggctgaggcgagcggatcagctgaggttaggagttcgagaccagcccggccaataaggcaaaaccccgtttctactgaaaatacacaaaaattagctgggtgtcatggcgcacgcctgtaatcccagctactcgggaggctgaggcaggagaatcgcttgaatccgaaaggtggagattgcagtaagacaagatgcgccactgcactccagcctgaacgacacagcgagactccgtctcaaaaaaaaaaaaaaaaaaaaaaaaaaaaaaaaagcaagaaagaaaagaaatttgcagttcaagggacagatcagtccaagcacggtggttcatacctgtcatctcagcacatatgggaggccacggcgggaggatcactttgatgctgggagttggagaccagcctgggaatcacagtgagatcccgtctccacaaataattactaataatttaaaatctaaagaaaaggggggcggggaagatcaggttatttaaagtaattatagtgttaaacttgacatattaaaaaatgcagaaatagttgtgagggataactctctgggcagagatagaaatgtatcgtatctcaacatttaaaatctgcatttcccattggaccataagagatgaactaggacctaattaattgggttttctccccgtttctttctttcttttttttgagacaaagtctcactctattacccaggctggagtgcaatggcagatctcagctcactgcaacctctgcctcccgggttcaagcgattctcctgcctcagcctccagagtagctgggattacaggcgcgcaccaccacgcccagctaattttgcatttttaagtagagatggggtttcaccatgtgggcaaggctagtatcgaactcctgacctcgtgatccgcccgcctcggcctcccaaagtgctgggattacaggcataagccaccgtgcccggccttcctccccgtttcttaaaaaggctcatgtgagttgcatttccagtcctgtagaggtacgtttaatacttttcaaaaaaaaaaaaaacttatcaggacttcgtgagaaacgaaagtggacacccaaagcagcttgcagccggtctactgttactttgttttagcggaccgacctgtctccaaaatcgatttgaccataatgctaggatttaactagggctttagtttttatttcactcccccactttactggtttcaacctatcaatccagacgcgtgtctggtgcaacgctcgggtttatggcaaaatcatctcaggcatttgcttaaccttctccagaaaggcattttcaggggttcacagtgagacggtgcacaggttggcacagagttagtaggggcagttttgtttcgatttgcgggcaaatctctaagatctctccgtttaactttcgcccgcaattcccaaagccgctaaagccgtttccggcgctctaccccgccgcaggccgaggctggcgcagagagacaggaagcgccagctctgggcgtctgggtcctcgcctcctcggccgcagccccgcggcggcgcgctcgcggtgcattgtgggcgctgtagtccggccggaacctgtttgcgaccccgagtcccatgacaccgcttctcctcacaccccagtccgcagtgcccctccccagcctcggccgggcctcccgggagccgggcgtggcgttccagctagtgagccgtttctcccctgggctcggaggcggaagcttgaggggcgcggggaggagcttcgcgtgcggggtgaacg

SEQ ID NO: 36799 - DNA, 2300 bp, Homo sapien
aattggaacgatacagagattagcatgatctctgcgcaaggatgacacacaaattcgtgaagtagtccatgtttttaaaaattaaaaaaaaaaaagctttaaagcttgggatggtggttggcacctgtagtcccagctactggggaggctgaagcaggaggatcatgtaagttcaggtgttcaaggctactatgcacaatgatggagtctgtgaatagccacagcacttgggcctgggcaacatagtgaggccacttctcttaaaaaaaaaaaaaacaaaaaacaaaaaaacaaaagttgagtttttagaaggcctttttgatttaccagccaaactgctctctcattgattccacaacactgaattatcttttagcatgatctctgcgcaaggatgacacacaaattcgtgaagtagtccatgtttttaaaaattaaaaaaaaaaaagctttaaagcttgggatggtggttggcacctgtagtcccagctactggggaggctgaagcaggaggatcatgtaagttcaggtgttcaaggctactatgcacaatgatggagtctgtgaatagccacagcacttgggcctgggcaacatagtgaggccacttctcttaaaaaaaaaaaaacaaaaaacaaaaaaacaaaagttgagtttttagaaggcctttttgatttaccagccaaactgctctctcattgattccacaacactgaattatctttatttttaaaaaaatttattctaaaagtctttgtattttgttccctcccccttcccccttcccctccccttcactcccccttcccctccccttcactcccccttcccctcccctcctcttctcttttctttttttgagacagagtctcgctcagctgcccaggctggagtgcagtggcacgatctcgactcactgcagccaccctctcccggattcaagcgattctccctgcctccgcctcccaagtagctgggattataggcacctgccatcatgccggctaatttttgtattttagtagagacagggtttcaccatgttggctaggctggtcttgaactcctgacctcaggtgatacgcctgcctcagcctcctaaagtgctaggattacaggcgtgagccaccgcgccgggccttctctttttttttttttttttgttttttttttgtttttttgagacagggactcactctgtctcccaggcaggagtgcagtggcacaatcccagctcactacagcctccacctcctggacgcaacccccacctcggcctccctagtaactaggactacagggcacaggccaccatgcccagttttgtattttttgcagagacaggatctcgctatgttgcccagactggtctcaaactcccgggctcaagcgattctcctgcctgggcctcccaggcatgagccacctagcccggcctgtattatcttttctggaattcatctcgcttactggattgccagcctcttctggacagcaatttgtactcctaattcgcttattatagtatgtcaaagcatttattgtttaatcaaattagggcagatcaatgagaagttacccttcggatacactgtcccatgacttctccgtccaccgacagtccttcttaggcccttggctttcccatgccacttatacaatctttcaaaacatttgagtgcgtaccatttatattattcaaatacgaaaagggaaagcggtaggcgcacatttcaggtactcgtcaaagatgagttggacgctggagataaaataaaaaatgggcctaccatttagggaggtgtgacgaagtgacaccactcttccgttaaaacccgagggcccattgggtcacctccattttattcaggtttcggaatctcggtcatgtgagctaacttaaaaggctcaagagtggttacctgcctacccgtcataatcacttcccaattccttgaaaacttcgggttcctcggccggccgccagcgccgggcggagaatcgccctccctcccactgcccagactggagctgcctgttccgttccaccccgccccaccccactgcatgctgggagtcgtagtcccggctggcagcgtccggaaggacgggagggcacgggagtgcagcccgcccatgtggctactggaggtcacgttccctaactgatcccttggttctctcgggtggagccttcagcgtgcacggcggggtttgactttgccaccgtctctcttctgggttccaataaagttttcctcttcctctcctcgtacggagttcaagatggcggcctcctg

SEQ ID NO: 36800 - DNA, 2300 bp, Homo sapien
acggcggcgttccgcggcgggaaaccgtcgtctccgccgcggctcgggcagcgcgcgaaactctcaatcaggttccccggcccgggccgccggctatgccagcggcgcgcagtggggacagcctagctgtctcgcgagcagcgcccggagaggccgcgccgcgggccccgccgcgtccctccgccagcgcgggcggccccacgcgcccgccactcggcagcgcagccagcgccacattccatttaaaaataacacccacgtgcgctggtaaacaagcgcgcgcggctaccagggccgcgcgccccggcccagtgtgtgtggcgcgcgcccgccctcctcccgcacgtgtcggccggcgccattcagtccccgccccctcggcgggtcgcgccccgcccccgagcccccagccccgccgctccgggccctagcgccccctaccccgccaggcgcgcccagtcgagtgcgctgcaactttcctcccccgacgcctcctcttcgctggcagacccaccgccccaagtcggctgccttcctcccgtccgctgtcctctcgcgtccccccttgaaccctcccaccgccagcgcgcgaaggattggtttctagtgcgccctctccctttttccctctcctctctctccttccttagaattttactcgattgtttattatttgctggggggcgggggcgggggggcggagaggggcgtctggggcctggagactggtggccgcggccagtcagcgcgcggcgtgccttgacgagtaagcggcgcagcgaatggcgacgcggcggagagctccggggtcacgcgcgtgtggatacgatgacatcatctgtttgtacgcgtcgaactagcttggtgcaggggcggggccgcgcgtcacttgagtgacgggcgctgcgcaaagcccggagcccggaggcggctgggcgggctggctcttgcgtacgctgggctggacctttttgtgtatggggtcgttgaggagcccgcttctacactctgagctatctccggtgacttacaaggattttttaaaaaatatatttatgaactagtgtgtagacttttggtgtgcatgtcgcgtgtggtgcattcgtagagtacaaataaacgatttggggcacggatcgtagaataaggacttgtgcagatgtttttcgtttaacctaaaggatacgtctttttttaaaagtcaaaaatgcccacgtagcggttttgtcgtcatttacaaattagattaaaattatttccccttctcagttgttcggaatctgctcttgaatgtaggacgggggtaaatttgcatttcttccggagttagttacacctctcccccgtttgccatgaaacccatgaaaagtgaaacacgactgtggtccaccgtccgaggtgagagactcagtgcaaaccttttggtgcctgatcgaatctgtgagcatcagcttatcgaagttgtgcaggcaccaacatcttcgccgttcagtatttccacaccgcgataaccctgcccatcttgcggccagcatcttatctcgggtgttacctggtgtcgcgttctaacagggaaccggacaccggggctggcccagagcccggcgggcggacgcgcaggccagggaccccctggtaccaggcgccctgcccggagtcagggaggccacgccgctgcgctccttggagcgtcgggggctgtgcgctcctgccgctcccccttctccctcctctccccacttcttcctcctctcctcccttctccccccttctccctcctctcccgggccagcgccgcgctttgttgtcgttgagactctcgggagggaggaggagcccagcggggacagcagcgggagcccgccgagtcccggcccacggcgcgcgcccggacacccacgcccgcagccccgcggagccgggccgcgcaggcgcgcgcgagctcacacacgcgcactcacacacgcacgcccgccgcgcgcccggcccgccgcccagcccgccgcccagccctccccctgggcggggacccgcccgccgtcagcctaggttgaggcgccctgcgtgtgtctataactttgtgctgctgccgcggccgccctgctcgtggaagggaggaggaggaatgtggaaggtggcggcgcgcgagctgacaggcggttcctcgggcgggctgcggcgacggcccgagcgcttctccttcgccgaggttgcgcgccccctcctcgccgtgccccgggcccgcgcgggatcgtgcgtcgtcccgccgcgtccctgaagggaaggaagcgaggtaggcg

SEQ ID NO: 36801 - DNA, 2300 bp, Homo sapien
aaaaatatatttatgaactagtgtgtagacttttggtgtgcatgtcgcgtgtggtgcattcgtagagtacaaataaacgatttggggcacggatcgtagaataaggacttgtgcagatgtttttcgtttaacctaaaggatacgtctttttttaaaagtcaaaaatgcccacgtagcggttttgtcgtcatttacaaattagattaaaattatttccccttctcagttgttcggaatctgctcttgaatgtaggacgggggtaaatttgcatttcttccggagttagttacacctctcccccgtttgccatgaaacccatgaaaagtgaaacacgactgtggtccaccgtccgaggtgagagactcagtgcaaaccttttggtgcctgatcgaatctgtgagcatcagcttatcgaagttgtgcaggcaccaacatcttcgccgttcagtatttccacaccgcgataaccctgcccatcttgcggccagcatcttatctcgggtgttacctggtgtcgcgttctaacagggaaccggacaccggggctggcccagagcccggcgggcggacgcgcaggccagggaccccctggtaccaggcgccctgcccggagtcagggaggccacgccgctgcgctccttggagcgtcgggggctgtgcgctcctgccgctcccccttctccctcctctccccacttcttcctcctctcctcccttctccccccttctccctcctctcccgggccagcgccgcgctttgttgtcgttgagactctcgggagggaggaggagcccagcggggacagcagcgggagcccgccgagtcccggcccacggcgcgcgcccggacacccacgcccgcagccccgcggagccgggccgcgcaggcgcgcgcgagctcacacacgcgcactcacacacgcacgcccgccgcgcgcccggcccgccgcccagcccgccgcccagccctccccctgggcggggacccgcccgccgtcagcctaggttgaggcgccctgcgtgtgtctataactttgtgctgctgccgcggccgccctgctcgtggaagggaggaggaggaatgtggaaggtggcggcgcgcgagctgacaggcggttcctcgggcgggctgcggcgacggcccgagcgcttctccttcgccgaggttgcgcgccccctcctcgccgtgccccgggcccgcgcgggatcgtgcgtcgtcccgccgcgtccctgaagggaaggaagcgaggtaggcgccggagccgtgcagcgggcggccgccttcccggtgactccggatctgcttccgagctgggccgggcgcttccctttcccctccctgagccgcggtgtgcgcgccccccttctcgcccgctagtgtttttaaaggactcgggaagggggaaactgtcaagatggcagcagcgggagcaaggaggtgatgaacgtgctggtccgggttttctagcagcccgggagacttggcgcttcccgacctgttggaagatttatgttccgactcgctccctcccccggatcccgactgggaagggggcggaggggacgacgtccgcgagaatgcaaaccacacaaaaccccgaagtggccgtccccgccgggctcgaacctctgcgaacacccgctgggctgctgctcccccttctttctgtctttcctttattttttggaagtgacaagggcccatctgcgcccagacccccgttcgccctctggcccgcgggcgaagaggggagagggagctgcccgcgcagtccccgggctcgggccattcgaccgggtggggggtgacggggggtcgcggaggcggccaggctaggaaaggggagaagagccgaagacagcacagacttgagcggcggcgccgcgggaggcactagagcgggcccgagcgaaacataaacaaacgcacgcacacccgagctcgggctctgaccgcggctcggctgcgccagctccggccgctgcccgctttaaaggcgcggccgcccctcccccgggcgcccctcccccttctccccgccccgccgcctagcccgggagggacctgcggctgggcggcggggggagggggctgccccgcgcgaggccgtcgattcgctcgcggctccatcgcggcctggccggggggcggtgtctgctgcgccaggttcgctggccgcacgtcttcaggtcctcctgttcctgggaggcgggcgcggcaggactgggaggtggcggcagcgggcgaggactcgccgaggacggggctccggcccgggataaccaactctccttctct

SEQ ID NO: 36802 - DNA, 2300 bp, Homo sapien
ttttcttctacatgtatgttataagccccagaatatattgttatttttgccttagatagtcattatcttttaaagagattgaagataagaaaatattgtctatatttactcatatattgatcattccccgctcttcattcctttaagttcagatgcccatctggtatcattttctctctgcttgatgaaactactttttaaaatatctctttgaatgtaccactgctggcattgattctcatttttgtttgcctgaaagagtctttattttatcttcgtttttgaaagacacttttaataggtataaatttctagattggtagctttttccctctcttagtaaggatgttcctccattgtctcacatagtctctgaaaagtgatttgctcattctatatttctcttaatgtcttttttcttctgccgcttttaagtattttttttttgtatcactggtttttattattgtgatgtgccctctttaattacatctgttctttttggagtttgttgagtttttcttggatctgagtgtttatagttttttataaaaaaaatttaaaatccagccattatttcttcagattttttttccatcctctccctctttcctcttcttttatgatctcaattacacatatgttagacaatttagtattgtccccatagatcactggatactctcaatttcattttcagtctttccctgtgcttcatttgggttagttggttagttgctgttgttgtgtcttataatttactgatctttctgcaatgtttaatttgctgttaatcccatccagtgtatttttaaatttatttttctttactagaagtaccactgggtttatttcttttgtatcttccaatttcctgccttttttccctctaccttcttactacatagagtatatttataatttttttttttcctttgagaatgagtctcactctgtcacccaggctggagtgcaatggcgcaatcttggctcattgcaacctctgtctccccagttcaagcgattctcccacctcagcctcttgagtagctgggactacaggtatgtgccatcacgcccaactaaggttttttttttttttttttttttttttgagatagagtctcattctgtcgcccaggcttgagtgcagtggcgcagtctcggctcactgcaagctccgcctcgtgggttcacaccattctcctacctcagcctcccgagtagctgggactacaggcacccaccaccacgcctggctaatttttttattttttagagacggggtttcaccatgttagccaagatggtctcgatctcctgaccttgtgatccacccgcctctgcctcccaaaagtgctgggattacaggcgtgagccaccacacccggccaatgtttgtattttttagtagaaatggggtttcgctgtgttggccaggctggtctcaactcctggcctcaagcaatcctcccaactctgcttctcaaagtgctgggattacaggtgtgagccactgcgcccagccatatttataactttttaacagctttgttgagacctaattcacattgccatataatttaccaatttaaagtttgcaaattgatggtttttagtatattcacagagttgtgcaactatctgttgtgcaaccacaatctaattttagaatactttcgtcaccccacaaagaaaccttgtatccattagcggtcatttcccatgtaccccactccttttcagcctatattgatatgaaatgtcagtctatagggactcttctggacatttcatatcaatggaatcatataataggtagtactttgtgagtgccttctttcacttagtatgttttccaggttcatccatgttggtagcatttatcagtacttaatttctttttattgctaaataataatccattatatggatatactacattttatttattcatcagttgctgggcatttgaattgtttccagtttttagctattatgaataatgctgctgtgaacatttgttaccagtttttatgtggacatattattttaatgtctttgggtatatgcctaggagggaattgctgggtcatgtggtaactctctttaaccttttgaggaactgccaagttgttttttaaagaagctgcactgttataatagctagttcagtgcccttgtctgctagtcccatcatcttgtctcatttctgggtctgttaattgattgattattttcatttttatgggtcatattttcctgttcctttgctatgcctggtaatttttacttggata

SEQ ID NO: 36803 - DNA, 2300 bp, Homo sapien
tgccctccaagagcacaaacagctgtggaagagcttgaaaagaagattactaaaagaaaaaataataataattaatatgaaaataaaatccaccctagaaaacccaacagaaccgtgtgtggagtatagtggtagtcatctttttcatgctatttaagagaactttcttcctatctaggatttctttttcagttgagggcaggataaattgtgtacccagccctttctccccttgggaaagcctcatatgtctcattttgtttggatagaaaattgattcattattctgatgaccagatgatgattttattctttttatgagggaccagaacctgtcgcttgcttgctgcttgaaaacttaaatgttagtttccaaaggccatctctgtgggtagagggttatcgtcagcagtttaacgggaaatcttgtttctaactggaaatttaattattcagccaagttcccaacaatgtttactttagagcatcgtctttttttttttttttaagtcccttaatggtttaaacttttaagctttaggcaagagtagagtggagctagatttacatatcaggttgtttgtgcaatcttttacatgaaagtttatgttttcttctcaatctgaaaattggttttggccattatagctggtattatatatgacgtaataactctctctgatctcagatacatttttatgctgtcatactttctgcacctgcttttgaacaacatcttagtcccaaagtagataaaatctagcagaagggagtaggcagctaaaaactagattctagcaatatctaaggaaattacaaggatcagttagtgttccattccttccttctttggctatatcaattcctagttttgtgaaagtccacatgccttctttctgtccatgcctgtgcatgctgggtggagaagcatcacagagcagaatgaggtgactgtccccaaggcagggtaaggtcaaggatctttcccctcacctcatgattttcaaaagaaaagcagatctggacctcagttacctaaaataaaataaaattaccctagctcttattctgcacataaaatcacagctttaatctctcatcccagttctcacctttatcttctcaatgatggaaacttggacttaaaggaagttactgtgctatgttaccagatctaaggagactgggaatcattagattggaatcagatcctcagtcaatggaaatataaggaggaaagaccattggttcttggccctaattgcacattagaataatctggggagctgtaaaaatgtacctatatccaggccttaccccatctattgaatcaaaacctctgagactgggatgtgagtgtttaaagtctccccaggtgattctaataggcggggtgaagaactactactgaagggaaattgagggcctcttccagagaattgcctttgaaagatcctgtcattatacaccgaaggcgcccacccgggcctgctcctgaagctagctgtttgcagtgctctcctgtggcacgcagacctctgggtctccctgtgaattggggttccattgggctgttcaaaaaacctttgtcatctgtggttcagcagacgcgtatgttagaattcaggcatttggcaacctcattctgaattgtcagtacccacaagtcaagcagtgagacccacttgaaatgctggtcctgtacacaaagtgggtgagcactgtattgaaagacagtcctttccagtgctttcccctgaaattccttgtaaggaccaggagacgcctgcagtcggcctggtgggaagtagtgggcctggctttggagttaaccataactcattttgctgctccagacagtcctcctcccaccccaccccaccccacctcaaaaaaaaaaagagagaggagggggttgtctttaaagaaaaaaaaaaagcaggggcttttaagagttaaattacacaactcgctttttatttttaaagtgagcagatttcttgttgtcgttgctgagaaagataaattgataccacatgttgcttccagacaaaaacctctctgtgttccaggggaagcacatgcagctggtgtctgggtgagtggacagtctccacaaggtaaacatggtttggaagggctgaagcggacgtagggtacaaaatttaagaaattaccagttacttctgactggcacggcacctctgaaatacttttttaaagtttgaaatcctttcctggaaggggccgccctggaaccttttggcttaaagtatatgatgctcggaaaacagtaagtt

SEQ ID NO: 36804 - DNA, 2300 bp, Homo sapien
cttaagatggcccgcttagtaattacttactctttttatggtggggaataggggagtcaagattacccacacccagcactgcagacttattaaggcctttatagaaagtggccatttcatctccactggtgttggggtattcgtggaaaagggtggtaagcaattcagttagtccacatagccagtagggaagaaccagaaaagtataactcatctacttaggatgagcggctctccttgttttagcatggaaagtcccatgtcctaggaaatccctcagtccggaagtctagaacagaatcttatctgcaccttgaacatctaactaaaaaggacccaccaaaacacccctaatatggctttctttatctcccaaagtgaatgatcccattccctttgggcttttcaacttcagagcattttgtaataaggacaacatgagaaataaggtaagtaatctttgtgctttgtccttaggatttcagacctttgaaactggtgtagcagagcagctttgctgtgctagccctgggctctgaggtgggtgagggagatggaaggccttgacaggtggccctcaggtgcccactattgctgttgcagtgcccttaatgatctctggttttcttttctcctcctttagaccctcaaactgacacaagacctacagagaaaaccctttgccaaatctgctctcagcaagtggacagtgataccgtttacagcttaacacctttgtgaatcccacgccattttcctaacccagcagagactgttaatggccccttaccctgggtgaagcacttacccttggaacagaactctaaaaagtatgcaaaatcttccttgtacagggtggtgagccgcctgccagtggaggacagcacccctcagcaccacccaccctcattcagagcacaccgtgagcccccgtcggccattctgtggtgttttaatattgcgatggtttatgggacgttttaagtgttgttcttgtgtttgttttcctttgactttctgagtttttcacatgcattaacttgcggtatttttctgttaaaatgttaaccgtccttcccctagcaaatttaaaaacagaaagaaaatgttgtaccagttaccattccgggttcgagcatcacaagcttttgagcgcatggaactccataaactaacaaattacataaactaaagggggattttctttcttcttttgtttggtagaaaattatccttttctaaaaactgaacaatggcacaattgtttgctatgtgcacccgtccaggacagaaccgtgcataggcaaaaggagtggagcacagcgtccggcccagtgtgtttccggttctgagtcagggtgatctgtggacgggaccccagcaccaagtctacgggtgccagatcagtagggcctgtgatttcctgtcagtgtcctcagctaatgtgaacagtgttggtctgctggttagaaactagaatattgatattttcaggaaagaaatcagctcagctctccactcattgccaaatgtcactaaagggtttagttttaaggagaaagaaaaggaaaaaaaaaaaaaacaaaaaagtcctgttttgctttgcagaacaaatgaacttacaggtgagcattaagcttgcagtgagaaatgtgcgaagagtaaaaacccaagtcaatgctgaggcagttctaacttcactgttttcctaaatacacatccttgattattttcagccttgctatataatctgatctgctagaagtgtatgagtgagaggcaatagcatacaaactgattttttaaatataagcttaggttgtaattgtacaagtgactcaatggaagtacaaaatagggcagttttaacttttttttctgcttctatggatttcattttgttgtgttttcaaaaagttatggtgctgtataggtgctttctgtttaacctggaaagtgtgattatattcgttaccttctttggtagacggaatagttgggaccacctttggtacataagaaattggtataacgatgctctgattagcacagtatatgcatacttctccaaagtgatatatgaagactcttttctttgcataaaaagcattaggcatataaatgtataaatatattttatcatgtacagtacaaaaatggaaccttatgcatgggccttaggaatacaggctagtatttcagcacagacttccctgcttgagttcttgctgatgcttgcaccgtgacagtgggcaccaacacagacgtgccacccaaccccctgcacacaccaccggcca

SEQ ID NO: 36805 - DNA, 2300 bp, Homo sapien
aacactgttcaggagcaaactttcccccaccagccatgggggaaagcatcaaatgctgagctcttattagacccaatcagatggaattttcagcaggttctttcttcacactttttaggagggtaaaaagtaacaggaagcaaaggagatgacgagaaagaagaaaacatccaaacctaacattggtctggggagagattccttgtggaacatcagcaggcgcttgcatctgggccagacaatgtaggggcccccaaggccactctgcagacatcactgagcccctgtagcaaagaccagggtccagaatgaagatgcacagctcagtcctcaagcagctcccttcaggcaggggagctcagcacctgaggaatgtcccagaagcaagatgttccctctgtgtcctagagacttgggtgcagacagaaactcacatatgatcaggtcatatgatcaggtcttgccttccagtttgagcctaggttggataagtagaggagtgtcaagaagagcagtggggatttgcatgcatggggaaggccagggctggaggcgagatggactttccctgtctcctaaaaaactgaaaaataaacataagagaaaggaaggaggaagagagaaagggaaaaagagagggaccaaaaaaaatagcatccatttgaaatagatggttttaatgattgtattgcaatgtcatgcacgacattgtgaatgtaattaataccactaaaaatagttaaaatggcaagttgtatgttatgtaaccattttaaatgatgtaatatgccaaaaatcacagtgtgcattttaaatgaaggaattatatggtatctgaatttatatctcaatagagctgtttttagaaggtggtatccacaagcaagcatgtgtgtgtgcacgtgtgttggagtacattcacatgcacatgtgtgtgtggcaagagtgtcagtttcctagctaatctactttgggtggaaactgtcagtgatgactaggcaaaggtggagaagagaaatgtaacctacctgtccattgttcactggtgccctcgagaaagagagaaagaagtatgacaaatgctaaaataatatgatattataagcttcacatatttttataagggggagtattctccaccacaaattccacgcctggtttcccgttctcaatacactttgtttacagagtcagtctcatgaaagctgtggcatgaattatcaagctgaagctcctattttccccttgaaatatgcgcttgtgcttaggaatgcagcatctctcttccaattataccttggcgccagagtcccttttcctggaagtacacctccaatgtcaagagggtgtggtgcagtggagatgatgctgtgtctgggtcaaagacctgcctccctgcctaggagaccttgagcagtcattgcctggacgtctttgaccataaaatgcagatgatgatgatgcctcccttgccttctccctggagtagcgtgcgaagcaaaatccaaacaggataacatgtgaaagcgttcagtaaactgtgaatcactgccttagtggaaactattctggatgcacgtaatagaaacccaatcaagtaagcaaaaaggaagacactgagttgaaaggagactgggatacctctcggaaactatggcaggaggtgaggctggatccagaacccgggtctggagagcggggaatgcaggcagctcactcccgtggcttctcgctgcttttccatctgttttcatctctgtctctctctctccagagtggcttccattgttctggcttgcagggccaagcagggataccccatggctcctgtgactacatagccttcattcaagccatgagcccagacgtctacgccaggtcctaattcagttggttcaactgggctgggtgtggacacgtgttgtccagtgagtcatgaatatggataggggtcacacagaataaacttgaccattctttgtccatcctgtgggtgtgagctgggcaggtaccaggagaagtgccttctacaaacatttggcaacatctagtggtgtgattacaatagtcagcgaaagaggaagattcaattttgaggacctcctttcctagtgtccccatctttgctgccttctgtgagtttgatcatgtggactccatggaggttggccactgctgggcaatgcagccaaacaaagtgagcaaaagtaggctggagggctccgtgggtgactggggctaggctgcctctggtgccccaagaaccctgaagccaccttgcagctcttctgaaatggtga

SEQ ID NO: 36806 - DNA, 2300 bp, Homo sapien
tgacctcatgacccgcccgcctcagcctcccaaagtgctgggattacaggtgtgagccacgtgcctggcggagctgattctaaaatagcatttactatgtgcaggacaccattctaatgtatacctaaaatcttcccatgttatgcacgaagaacgtaaggcaaagaaaggttgaataacttgcccaaagtctcagatagtaagtggcagagttgggatttgatcccaggcagtccggctctattcttgaccactccaatataccaatacactaacgtagcccattctttgacttgtttacatcaggtccagatgagagatctctaataaaactccttggtcagaggaatattggcttaatatcttacccctggaggagcatttcccaaaatatgatagcaacaggtgttgaacaaactaaccaaaacaaaaataaatgctatgaccaaataaatttgcagttacattaaaccaagttaaacaggttttatattacggaacttctcagagcctttaatatgctaatagacattataaattctctaaagagtctaaaacatttccccaacttctgggaccatagaagcctttttgatgcaatgatgtcatgacatatcatgtgccctgtggaaaactcaattgagtaaaaaaggcaaattgtgtattattacaaaaagagttttgacctcaagaatgtcctaagatggattcgagagccaggcatagtggcgcacacttgtaatcccaacactttgggaggctgaggcagaaggatcccttgagcccaggagttcaagaccagcctggccaacataggaagacccccccccgccccccgccatctctatattttttaaaaggctttttaaaaaaatgaaaaaacaaataagattaattcaagcacccccagggttccctggtccacactttaacaacagctgtctagaaaatactatttaaaatataagacttgaagctcatcttcaaggaaggctaaataccatatcatactgccccatgcataggatgaaggagaaaagcgaatgaaagaatgtggatgtgtgtttttaaaacagtcccctttcatttcacactctatgtccatataaataaaaaataaaaataataaaaatcagtcccctgtcctactagttctttcttttttccttttttattctctttcctcctttttttttttcatttaaaaaatctcttgttgctccataaagatttaaggtagtttaatcttccagtgagtcaatgttcctgttgacagagacatatttaagtaaagggtcattattttagggggactcctaacccttcactctatcctaaaaattccctattatcatcctacaggtcaacctaaattttctgtccttagcattttgtttattggggtaaggccatgtctttctagaaagaggccttgggttaagatatagtttcattatacggctaggtgtgaacacacatggctactgccacatgggaatgtgtctctcagattagggcactcatccaggaagagacccctaaggacagggacccaggatgggaaagtactgcagtgggcacttgcatgcagccctagaaagtgaggtgccctgctaagaagtcactctttcctttttagggaaatgtccaaagatacgtcttatttctttaacaggtttgcttctttttttttcttttgagacagagtcttgctctgtcacccaggctggagtgcagtggcgcgatttctgatcactgcaacctccacctcctaggttcaagcgattctcctgccttagcctcccaagtagctgggactataggcgtgcgccaccacgcctggctaatttttttgtattaaagtagaaatggggtttcaccatgttgggcagtctggtcttaaactcctgacctcaagcaatccaccagcctttgcctcccaaagtgctgggattaaggcatgaggcactacacctgacctctttaacagttttatctacggcctgcccttatctgaggtcattttgtgtttatattagactgcaggtctttgaacctgatttcaaacctcatgtcaaagctaatgcagcatctgcagtactgcacccaaatatgacaacccagaccaggtggggaaaatgaagtctagttcaggctggtggcccaaggtcccccttgttacactggccagcaacaaggtaacactggccttggctcgcaaggcacataaaccacacaagatgctgcagtcaacaccgctgaggtgagagagagaattacagactggaggggatgctaag

SEQ ID NO: 36807 - DNA, 2300 bp, Homo sapien
atgtcattcttttcaattgtgctaatttgcccggcagatatttcctggccagctgagttgggtagcatcgggttccagtagcttgcttatggtctattttagaccaagatcctagggtgcaagaccacagctagtaattggctgtaccagaggtttttaggttgatgtttccactgagatggtaattatgtaatcatcagttccaagtgaggtgaggcagagtctccatagggcaggttacaaagaaacctaaaaccccctcagcctctcacccaggctgaggctaaaaataaggggtcagagagtggaaagggaagatgtgtggggaaacttctttggagaaaggagtgtggggtgctatgcccttcatctcaagccagcgagaggggcttccccaggggcctgggactgccagagactgtagttaggtggcctggagaactggagcctgactcactcctgggtaagctaaagctccctcctatggcagcctagaaggggctgcacccagacaagcctgagctctcagaatcactagggtaacagatgtgtagggtttcccttgggacctatctaaaggggcactgaaaggtggaataaaccctgggtttttaggatttccagaagcccccaggagggaggtccccatcagtgggagactacaaaggaccaggaaagacctacatgagctgctttaaccataagccagcacagcaagcttgaagctgctcaactccaggaagaaatgctccatctccttccttctcctcctcctcctcactgccagtttgatccaagctgggccttaaacaacctctagtgaatagaggggcgggtgggggtcggggacaagcctaagcctagtgcaccccttcagggaaggccagctagagaccttaagcctggggctggaatgggggaggaagactttttgaagtttgatgcatttgtttatatcttgcacccaacattatagttttgaaatgaagctgtggttgagatttagttacaacaagactgtcagttatctaagaatgagcagaaaaatccagggctgtttcgggtcctaaaattatccaatcaacgaataggtatttattttctgttatgtttgaaatcctcttgagtattttgaagaatatttacattcctttagttcaggttagtataatttcccacctggcacgatgccttacacatagtatgtgctcaaaaatattttcaatttaattattctttacaagatgcttagcaccaagggaagtggcattttcccagtgttgatgacaaatagcacttcagctggaaaatctccatatttataaaacgtggtgcaaacctgaatggagagtgcttatgatctcacttttatttaacactgtacagtgttgctaaatggtctaacaggagaaaagggaatttaaactagaaacacataaatggagtgctttttgccgttcaactgtgatgatgcacgaacaaaaaacgattggccacgggagacctagactggaatctccttctcctgctcactacacctcaggcccccagttcctctcctgtggatggggacgccaggctgcctacctcagactcagaaggtacgattacgtgcatacactctgcgaactgaagggctgtacaaatgcaagggcttaataacagccaacagtttaatattcgttgattgccacgtgcatagcgctttacatctattttctcatgcagtcttcataacagcccaagacctacctaggtactattattaatatttcctgccacttgacatcggaggaaacagaagctcagcaagtggctccaggttatacagagccctaacctgagccagtaaatccttcttacccacaagcattaagcttccgtcctgcctgctgttatttaacagaggtgctgggatccggcaggggagcaacaaatgtggttcggcaaattgctaaacgaaaagcggacacccgcccacgacgcctgctctgatctgacctcccggcctacagccctctccaggctcctcccacccgctccggccgtcgccacgcctcggagcttctacgcatgcgttggcgggacccgcgcaggcccagtggccgagcggcgtcgtggggttaccccgcccgcgccagcgctgcatccctggccgctacccggggagagccggaggatgaattgaacctcgcagccgctgctatctccagtgctcatcacaggtgctttgggtcaggtcggaagcctccttccctgagccctcgccaagctcattccccggcccgcctctcccgccc

SEQ ID NO: 36808 - DNA, 2300 bp, Homo sapien
ttggcaaaaaccatctataataatttgtagtttaacaaatatcaatttaaaaatcctccccccaaagccccacttctaattcttctaagtcagttcacatgtattattaaatatttccatgattgatttagtgaatattaatatatgatcataacattgtgcagattttacattattgtacaagtttctcacaatataattgttaaagtgagatttggtggaaaaaagaagaaggatagagaaaattgtgttagaatttttggtaaaaatttgtagacaaaaatatttttagccctgtatctacattgtttctatcagtatagtatttggtcagtctaaattcctatatgcccccaggtaattcacagaatttttagagtttgacctgagtaaatgttcctgcttcatcactctctgaaagagtatagtttttaatgcaaactcaaagatagccagagagaaccttaggtcaggagtgagagtctattattactccccacagaactttctctaatctttattagatttgccagattacttttggacattgttagacttattagtgccatgtgaggccaaaggggtggcaaacctgatttaggctctggaagaagcctgtttattatacagaaacctcttctcacttagtggcataatttcttactgcaataggtcttttagaaacagaccaacaaacctgtcatggctgcttaagttagatgttacgggactgaatttgtattatgcatccaaaaataatatacaatatgtagatataaaaaattgtgtatatattttaaataattatgattgaatattctaaagtaaaagccaatcatttcaaaagtattggaaataaaatgtactaggcctctcatcatttttgatagttatattaatgaatgtaattgtagagactgtgcttaaattcaaaatcctgtatcaaaaattcctaaaatagtattgcttatcaagtaatttttttactgttttaactcaacacctggcatttccatatgaaaagtatgacatattgtttatagttttcatcagaaactcttggggtggggcctgtgtagaaggaaacaaatgttcttattgtctgttgttatgtaacaatgtttagaatcataatatagtaaatctttatttgtctaaggaatcacctgttgattctacttatagaaatggaatctttttagtttcctggggcatgtgtcacaaagcagttttctgttgtgcagaagttattctaaaattgggtagctgaaataggtgaaaaattcatagatctctgtctctttagagatatgacattttatggactttgagtttttttttaagaaacacctaatgctatatactcattagaattacattttaaaaatctgtcctattttaaagttcagatttgtctccatggaacacaccaacatttgagaaggatctgcattctcatggcccttgtaatgactttaactctttcaggaaggggtgttgggaaaggatcagttggtattgatatttggtatttatttacttaggtcattacctcaaattataggtgagttgaatcaattcattcagttatatcatggacaaatgtggggctgaactattctctgaggtttgttgcaaaatcaagtgtcctttagaaatacaacatttctgtctaaaatgtaaccttatagtatcactagtgtggagggcagtggggaagaaaaggaaactgtaaacattttaacagaaccctcagtgttttttgtaggctgaagaccatgagatgattcgctcttcctattctgtcttctttcatgattagtctttctctctgggtttagctttcatcctggttttctttcctgcacatctttgtcctcagttgtatatttttgaggaaattttcctctctacatttttgagagctgttctcagatcctaaccttctaactgcttggtggatttttaaaagcttaatatagaggaatgatttagtatatggatgggcttaagcattcgtttttataaagtcctggacaaaaataatgatggtttttgtaccatgtatttgcagggtgtggtgtctatctgaagaatattttactttcaaaggaaagatgctgtctccaaatgataaaatgttaggaaaactggatccattttatcaaccttcagtgtccaagcagaagaccagtgcagaaatcataagtgaagcaagaaatgcattaagaacagttagaacccaaagaccatttacaccacaggaggctcaaagaaaactattcggacctgcatcctca

SEQ ID NO: 36809 - DNA, 2300 bp, Homo sapien
actttgtttcctttccctcttatttcaatataatttatcaagaattacctttcctaagaatacttaaaatttgggctctttaagaggagaataggtaaacaaaataaattagtgacagataatgtgagttgacagagatcttttttaaactttgagtcatcctgtcatgaaacctaatccttttcagctattttttatttggttactgactctatgtcaggaataactggggaaaatgcatgcatgcaccacaagaatcttcagtatcgtcatagaaacacttcccatcatgaaagtcttagagaaagggcttaatactgggcatttcagtataactgtttggatcaaaagaaaatgtaaagcacaagtgatatagattgtctcttaatatagaattatcctgagagtcattctccagcaagtatttcttgaatatctactatgtaccaggtactatgctaggcttgggatatatacaagtaaaccaaacagatttcctacctttatgaaggtttggtctgggaagggagcctgcattaaatcaatatcatgcgagtaacaattataaattatgattggtcctctgaaggaaagaggagagggttgtgttagaataattggagcttgtggggtaaatgacagtgtttacaaggatgtaagctgctacctgaaggatcaatgggtggaagccaggaagaatggaagatagaggtcttaaaagcattcctggcaaaataaatttataaggggggaaacattaattttgtatgtatacattgagatttgagattaagacttttttttctctttttgagacaaagtctctctctgttgtccaggctggaatacagtggcacaatcacagctcactgcagccttgaactcctcctgggctcaagtgattctcctgccttggtctcccaaaatgctgggattacaggcatgagccactagcccaacccagacttcttaatatattcattttataagaaaggtataaattgcatagatttgatctagcttttgtagcaagaatgcagcagggtatagaagtataaccagtttgactagtgcaaaaccacttggccagtcctttgtcagccccattactctatgtgtgacactgctctagtcatcccagcaagtgacagctgccagatccatttgcagaggtcaggtggccaactccagccatgtagacatctttcatgtttaattggtaaattgtagaaataaagctaattattaaagatgatagacacattgacaatatgtatgcccagtgtacacagttgatgcaaaatcacttatactttgtgtatcttatttatttaaagattaagcaagtagaagttatcttacgcagttctgctttaaattgacaagtagtttaaaacagcataaatggtaatgacattattgctaattttataaggtaaaagcattagaatgtgttcttaaaatcatttttttccttatattttaaaatctgcatgtctgtattcctaataggccaaagtagttttttattcattcatgtacattaaaattataggaatattttccctatattctactaagatataaattctggccaggtgcagtggctcacgcctgtaatcccagcactttggaaggccgaggtggacagatcacaaggtcaggagatcgagaccattcctggctaacacggtgaaaccccgtctctactaaaaaacacaaaaaattagccgggcatggtggcaggcacctgtagtcccagctactcgggaggccgaggcaggagaatggcgtgaacctgggaggtggaccttgcagtgagccgagatcgcgccactgcactgcagcctgggcaacagagcaagactctgtctcaaaaaaaaaaaaaaaaaaaaaagatataaattcttatgagacagacttaaaagataattcatatatattctatgtctgccacatgtaacattaattgtattttttcttcaggtaagtgattctttctttgaggttgaagccctcatggaaaagatgaggcagttacaggaatgtcgagatgaagaagaggcaagtcaggaagagatggcttcacgttttgaaatagaaaaaagagagagtatgtttgtcttctcttcaggtaagaacaaccattatatagtcaatataattattgcaaactcaactttttatttagagaatttaaataacttttaaagcatcaatctaaatatgtccttccttttagagagactattgcataggtattcctatttacaaataatttttaaagcaagcaactaaga

SEQ ID NO: 36810 - DNA, 2300 bp, Homo sapien
ctagacaactaaaactgtgattccttcagaaataaaatcatacctcaactcttctagaaccagagtcatcatttttcacatacttctacctaactagcttttgcagctcacaatcccatacatcaagtgcatttatgtgtccaactcattcatttacaaccagtttatcttgcagggtatgtcatattgctgcaaattgcatgatgtactgggtttgttttgtttttgtatttgcttacggctgagtgggcatttgattgtactgtttgtttttgtggctgtgctcagtggatgagagcttggaagcctctgtagccttttcttctatatcgacattaactcaatattgcttcttttgaccagtaaaaaatattttgggtgcattagctattttttaaaagcagtatagagaacatatatcatttatcttatttattaggagataaataaaaagtaaccattttgacatgccactttaaacatgatagttgaagagctaaaagagtaacttagttttcactgagacacggtagcgtcacttctaagactgaaacttattttcatttatgagtcctgttctgtggccataactactgctataaattccacttgtttccttgtcagaatgttccaactttttttgttttttaacctgagcacttaagctttgaaaacagcataaacatgcaaaaagagatctaatttaggaatttgtttcttttaaagagagagaatagagttatgtaaagaaatagtactgacacaggactggagggatctgggttctgggcccaacaatgtcagttgtttttctcctttgtaacctgtattttcccaagttcctcatccgatttcagagattgaaattctgtctttataacccagggagggcgcttatgaaggaatattagaaattgtaaagccttcgaatatacttgagaggaaaaaagacgattcagagataggctaccaaggtttattatctgtgtaggggagtgatatttatagcttttacgtagcttagcaaaatgaattttgcattgattataggccaaagtcctgcattctgctgccgattcagcgtcgtttgggcattatgggaaaggaagaagggaaatttcaatagtttatcgaatttagagaacttcattactcctggtgctgtcagaatcagtctcgaggttggctgctgtttggttctaggtaaatggccgagcaggggtgtagggggcagattcccctgtccctgaagcccgaagactcgtgctgcaccttcctgacagtgcacgctcacctcgcggccctccagagcccattccgtacctgagaattagctgttcgtggggaacctgggcccccaaggtgatttttcacctcgccgcgtcagaccgccagttcccagcctccgcgccggaggggcggtgctttgcggggacgcgagcccgcattggcttgcgtggccgccagggcggtgaaatgacgggcgcggggcggggccgcgcggcttgtttgtcggcgccgccccgcccccccgccgtccgtgctgactgaggcgctgcagccaggagccgcggccggctgcccagcgctcgccgcctccgcgcgtccgcagccgtccccgcgccgacatgcgcttggccgccgccgcgaacgaggcgtacacggcccctttggcggtctcggggctgctgggctgcaagcagtgcggcgggggccgcgaccaggacgaggtacctgggcgaggggctgagcgggccgctgggtacctgggcgggtgggcacccggccgagctgccctgtgcaacacggaggtcacgttgcctcctcacagtcgctcccggtcagcatccgaaaacgctccccagatagggcgggctcccggggagcagcgtcccggccctcctgcgcccctcgggggaaggggttgcctgcggtgggtgggagacctgcgcaccgtgagtcgtccctgggcagaaaatgctaagctgggagagactgcggccgcggtcatgtaaatgaaagtctccaatacgtaaataacattgtcgtctggacaagtctccacaagtcagaaatccagcagacctcgagtcttgagggtgaaacagcctgtggatatgccccctcgattgtcttgtcttgtgaaaacagattatttagccaccttcatcccctttgcctcctacttaaaagagagagaaagaaaaaaaacacatttgactcagggaagagatgatgttgcctggaataagtgtgtcctgcaagctctatgacgttatgcacagcgtttactcttgcgt

SEQ ID NO: 36811 - DNA, 2300 bp, Homo sapien
caaaaaaaaaaaaaaagaaaaaaaattttaaaaatacatttgttggaactcttggttactgtaaatttatttggaggcaacctttttatgttggagaatagagtgactaattcactctagtgctctatagcagagaacaagaaattagtactctttgaggaatttaggtcagtctttatagagaccataaaggaatcttgacatttaatggcttgaaggttctccataaaccactaaattagaatattaaattaaaattatttttcttttcacataaggcagcattaaataataatttgaaactatctgggggaaaaaggaatcctaattggagcttcctatacaatttcagtatatctgaaatatttcttcaataaatatttatcaagcactaagtatcagcctactatatgcatgcagttagcagttttcacttgcatttacttattttaagccacttttgatttaactgaatgcatgcttttcccttgcctctcattagaaaatggaaagataagcattcttcattttacaaatgtcataactaagattatgccctactagacaactaaaactgtgattccttcagaaataaaatcatacctcaactcttctagaaccagagtcatcatttttcacatacttctacctaactagcttttgcagctcacaatcccatacatcaagtgcatttatgtgtccaactcattcatttacaaccagtttatcttgcagggtatgtcatattgctgcaaattgcatgatgtactgggtttgttttgtttttgtatttgcttacggctgagtgggcatttgattgtactgtttgtttttgtggctgtgctcagtggatgagagcttggaagcctctgtagccttttcttctatatcgacattaactcaatattgcttcttttgaccagtaaaaaatattttgggtgcattagctattttttaaaagcagtatagagaacatatatcatttatcttatttattaggagataaataaaaagtaaccattttgacatgccactttaaacatgatagttgaagagctaaaagagtaacttagttttcactgagacacggtagcgtcacttctaagactgaaacttattttcatttatgagtcctgttctgtggccataactactgctataaattccacttgtttccttgtcagaatgttccaactttttttgttttttaacctgagcacttaagctttgaaaacagcataaacatgcaaaaagagatctaatttaggaatttgtttcttttaaagagagagaatagagttatgtaaagaaatagtactgacacaggactggagggatctgggttctgggcccaacaatgtcagttgtttttctcctttgtaacctgtattttcccaagttcctcatccgatttcagagattgaaattctgtctttataacccagggagggcgcttatgaaggaatattagaaattgtaaagccttcgaatatacttgagaggaaaaaagacgattcagagataggctaccaaggtttattatctgtgtaggggagtgatatttatagcttttacgtagcttagcaaaatgaattttgcattgattataggccaaagtcctgcattctgctgccgattcagcgtcgtttgggcattatgggaaaggaagaagggaaatttcaatagtttatcgaatttagagaacttcattactcctggtgctgtcagaatcagtctcgaggttggctgctgtttggttctaggtaaatggccgagcaggggtgtagggggcagattcccctgtccctgaagcccgaagactcgtgctgcaccttcctgacagtgcacgctcacctcgcggccctccagagcccattccgtacctgagaattagctgttcgtggggaacctgggcccccaaggtgatttttcacctcgccgcgtcagaccgccagttcccagcctccgcgccggaggggcggtgctttgcggggacgcgagcccgcattggcttgcgtggccgccagggcggtgaaatgacgggcgcggggcggggccgcgcggcttgtttgtcggcgccgccccgcccccccgccgtccgtgctgactgaggcgctgcagccaggagccgcggccggctgcccagcgctcgccgcctccgcgcgtccgcagccgtccccgcgccgacatgcgcttggccgccgccgcgaacgaggcgtacacggcccctttggcggtctcggggctgctgggctgcaagcagtgcggcgggggccgcgaccaggacgaggtacctgggc

SEQ ID NO: 36812 - DNA, 2300 bp, Homo sapien
aaaaaagtattctaagacaccttgtaataaaacaggataaattatgaacgaaatggaggaaaaactataatatttttaacctgctgcactcgtatcttaaatagctacacatgtgaaaaagaaacaattcaggcaaacacagagaaagctagttgagcaatttgccataaaagtgtttctatcaaataccccacctgggtccaccttttcaacatgaagatattagcttcttttaagataggtttttattattttatataattctcttcttgaaaaaagagaggttgcatttagagaacacatcctggtttgttttgtttttaaaaataagagaaaattgttccaccaattatcttgaacaggctgactaggaaacatttaatatcctttatcattttagaggcttttaaatgtgagcctttacactcagaacactgtgacaatgtgaaaaaaaaacactggctacattttccaacaacatgtaaaaagaaatataaggaaaaacaagtatttacttggaattaactgtagttttcatatattcttccaggagcaaagcagtttctgcctaaaactctagaaaaacactacttgtttacttacagaacactctaaagatgtaaactcataataaaagtttacataacaacctaatagaaacaaacacaacgtgaataacggcaagtaaaatttaactgtagtagagacatagttgtatttaaaatgctcttccttacctggatgctcttcagaataaactcacttttctctctcacatctttgaagggacacctcttagaaagcataagcagatgagcaagtagcttattcaacccatccgaagactcggtatttgaaagcccgtctgatggacgatgaggtgtttctttcaccgaacgaagatactcggttttcctcaaaatggtttgcctaatgttttccaatgctgtctccctagtagttgaatctctgctgcagagtccatcccatctcacttcattctctccttcagccatgacaatagtttttcctttgcggtcttcagttacctttcagcatgccccaaaaaaattgctttgtatttttaaaatgaaaaatgtaaaaataaaatcagagaaatcaaatcgtcatgaaaacacacatctgggtgacatttggaaccactggtgccttcagccgatctacaagctaggtcaccctctcaccctctccttgtacacgaaagggcagtcttctttctggaaaaacaaagtttgaaagttgcaaccttgcagcgctggctttggtgggcagagaatttcggggaagcgttctcctccgtctcgcggggtcagtggatatcctcacgttgtggagctgtcaaatccgtgctctgccccaaaaggctgttaacagctgaacgccctccagccattcggggcttttttgtctgtgcagccaccgggttctctccggcgttcccaccccgccccttctccgacaccagtccccgccctccgcagctcctcccagcgcctcagcagccggccggcgccggcagggaaggctcgccgaaccctggcccactggccgcagcggccggaggcttgggcgctgtcggagggcggcagtctcgggcagccgtagtctcggcgggcggcggtgaaaaaaagcgtcccccagccccgccaattcggcacccccgggaagacgctacttctccgatccctgagccctcgcccaccaccgccgagccagagggcacagggcggccctggcaatcctcgagcgccaggctgggccgcggagctggcggggcggcggggcccgaggcgcaaagcccgcccttcgcccagccccatcggtggggatcagcccagagggcgggagcagggagtggagacggggtcctcacccccagcccctcccctttctccgcccggcacaaaccgggagccgccccggccccagcgccttcttccccgcccaggcagacgcgacccgccgaggcaaagccttaggaaaaagccccgccctctggcaggctaccctccggaccccaagtgcgccgcgcgcggctgccagccactgccggctgctacgcatgcgtgactgcgaactgggccaagcgcccccggaggcgctaagcttgcgccctgaggcggtttccgttcccggacgtttggactctgtcctggagaaggggaaggaaaaagtaagacgtagaagtacactgagacttcgtcacacataaaacaagcacgacaaagaaagagggcgcgaagggactcctggaagaaattgagtctacatttaagatc

SEQ ID NO: 36813 - DNA, 2300 bp, Homo sapien
aataataactttttaaaagcaaactaattttaagcaaatgactgaatcttttgaaaaagtcgactaagttttggagacttttacggttttgctttctttttcctgctgtatccttaaagcctgcaagaattcctatctaggaatactggggattcttttacgagatggatttgacaacttgctttcaaagccctgcctaggatttcatttgactgagcaaataaagcccagaacatccctaagcaaaggcaaacaaaggtgcaaatgcgcggagatcccaaatccaccccgcgtgtgtccacaaaaaagggcggaatcagaggcagcagcgcgaagctccagtttccacagcatccttccttcttggccttacttaggccgctccctgcgacccttgggatcaggatcccaaatccttgcctcacccaccacaccccgcgcttgggcagctggactagtccttcccacgcaagtcactggaaaaagtccttggactaagggaggccaccctagatggctttgtctccaaaatcccagaggaaatggaggaaggaaaaaccctgtcaaggaaaggtgacaacccagcttacagtgcttaccaagcagacgctctcagtcagcccctgccaccgctaaccgttggttcgcgggcacccacaggcaacgtcgcggtggcccctgggggttgtagtttctgtcgcaaacaaaacgcgccggcagcatcgaaactacattccccacaagtcaacgcgaagacgtcctaccgacttaaatctggggtttggagtaatgaagaggccgtcactacttttagggtgatcttaaatgtagactcaatttcttccaggagtcccttcgcgccctctttctttgtcgtgcttgttttatgtgtgacgaagtctcagtgtacttctacgtcttactttttccttccccttctccaggacagagtccaaacgtccgggaacggaaaccgcctcagggcgcaagcttagcgcctccgggggcgcttggcccagttcgcagtcacgcatgcgtagcagccggcagtggctggcagccgcgcgcggcgcacttggggtccggagggtagcctgccagagggcggggctttttcctaaggctttgcctcggcgggtcgcgtctgcctgggcggggaagaaggcgctggggccggggcggctcccggtttgtgccgggcggagaaaggggaggggctgggggtgaggaccccgtctccactccctgctcccgccctctgggctgatccccaccgatggggctgggcgaagggcgggctttgcgcctcgggccccgccgccccgccagctccgcggcccagcctggcgctcgaggattgccagggccgccctgtgccctctggctcggcggtggtgggcgagggctcagggatcggagaagtagcgtcttcccgggggtgccgaattggcggggctgggggacgctttttttcaccgccgcccgccgagactacggctgcccgagactgccgccctccgacagcgcccaagcctccggccgctgcggccagtgggccagggttcggcgagccttccctgccggcgccggccggctgctgaggcgctgggaggagctgcggagggcggggactggtgtcggagaaggggcggggtgggaacgccggagagaacccggtggctgcacagacaaaaaagccccgaatggctggagggcgttcagctgttaacagccttttggggcagagcacggatttgacagctccacaacgtgaggatatccactgaccccgcgagacggaggagaacgcttccccgaaattctctgcccaccaaagccagcgctgcaaggttgcaactttcaaactttgtttttccagaaagaagactgccctttcgtgtacaaggagagggtgagagggtgacctagcttgtagatcggctgaaggcaccagtggttccaaatgtcacccagatgtgtgttttcatgacgatttgatttctctgattttatttttacatttttcattttaaaaatacaaagcaatttttttggggcatgctgaaaggtaactgaagaccgcaaaggaaaaactattgtcatggctgaaggagagaatgaagtgagatgggatggactctgcagcagagattcaactactagggagacagcattggaaaacattaggcaaaccattttgaggaaaaccgagtatcttcgttcggtgaaagaaacacctcatcgtccatcagacgggctttcaaataccgagtcttcggatgggttgaataagctacttg

SEQ ID NO: 36814 - DNA, 2300 bp, Homo sapien
tactcatgtaataatgtatttcttatattcagactatttaatgagtttggaggctgcttagtaaaaatttattagtagttatgaaataaaccaattttacttgatatactgttgactcacccccttcccttttcttttttctccatctcatcgtcttgtgtgagtcttttttcaacagtgtaattgcaaattcagtcagatagcagaagccatgtcctgtgttctttatatttcagggaggcatagtgtattagaaaatagtaaatacttgttctcacttttactcctttgttaccactttctcctgctttttccccacttctcttaacattccttttttttaatctcctttgagagttttttttttccttcacttgtctcccaaatctgttatacttaatctttttttgtttgtttgttttgttttgtttttttggagactgagtctcctctgtcacccaggctggagtgcagtggcgcagtctcggcttgctgcaacctccgcctcctgggttcaagcgattctcctgcctcagcctcccgagtagctgggattacaggcacgtgccaccacgcctggctaatttttttttttttttaatttttagtagagacgaggtttcaccatgttggccaggatggtctcaatctgctgacctcgtgatccgcccgcctcggcctcccaaagtgctgggattacagacatgagccactgcggccgaccaaacctgtgattcttaaccttttataaaattttgtctcaacacatctgaggaggactaacaatggttccctaatggacaaaggcagtgagtctcagctacctcttttgtcatgcacacaatgcacacactgaaaattgctgttctttatactgtccttgggtgatctaattgataaccaaatctctatctctagatctagcctaaatgctcacctaacctccagattcatatttcagtctgcttgctgggcagttctgtgtctgtaagcacctcatatttgacatgtctaaaacagaattcattatttccctaagacttgtagccccttttatattattccatatttccattaattcaccactatctacccatttgcccaaccaaaaattttgaggagtatttctgagtctttcctctctcctattacatatttgtagcagattcgtaagttcttttgattatatcttctcagcatctttcatatttatctcatctactccagtcctattttagacctatatttttcgtgtttgaattattttggtaacctcttaatttgtccatctgcctataatttcttcctccttttgtctgttcaccttaaagccgtctgaatgaacttgtcaaaatgcaaacctggtcatgttattcccttttatgtccttaattacctccctatggtctaatcaaataaattataaactccttgatgtgatatacaaaatcctttgtggcatggcccttatgcatttttagcctgttttttactgccaacatttattcactatactccaaacaaattcactaggatctatcatcgttctcaatgattatacattctgtcttcactaatggtatatttccagttttcgtgttcctgctaaacctcttattgtttgtttgctttggtgtctgtctctcctaaggtctggtaagccttggttagatagcttatatgtaagagtggagcactgaaaaactaactgaaggccgggcacagtggctcatgcctgtaatcccagcactttgggaggccgaggcaggtggatcacctgaggtcaggagttcgagaccagcctggccaacatggtgaaactctgtctctactaaaaatacaaaaaattagccaggcatggtggcgggcgcctgtaatcccagctactcgggaggctgaggcagcagaatcgcttgaacctgggaggcagaggttgcagtaagctgagatcgcaccactgcactccagcctgggcgacagagagagactccatctctaaacaaaaaccaaaaaaactaactggaaactccaaatctatccaatcaattcattttatcgcctttagtatctttattaacttaagctattcatatttcctagaaaatggatcctcacttcttcacttggatataataatatagactgccgacattctgggaactgatcagtcttccagcttccagtgtggtgccctccctcaattgtgctgagtgtcccccaatccagagatattctgtaatttcttcctcagaaagaaacaaaacaaaattctgatcttcccagatgaaggtagagtactc

SEQ ID NO: 36815 - DNA, 2300 bp, Homo sapien
agatgcatagacgagtttgtttcactgatgctaatataacacatctaatctgcacttttttttttttttttttttttttttttgagacaaggtctcactctgttgcccagactggagtgcggtagcacagtcactgcttaccataaccttgacttgccaggctcaagcaatcttctcatctcagcctcccaagcagctgagactacaggtgtgcatgcaccaccatgtccagctgatttttaagttttttgtagaggaggggtcccgttatgttgcccaggctggcctcaaactccagggttcaagcagtcctcccacctcagcctcccaaagtgcttgaattacaagtatgagccaccacgcctggccttttttgcgtgttatatttgctccttaaaagtgtttgattttcagaaaaaaaaaattaaatttaaattttaaaaattatgactttaaggttgaaaaaaataaataacaaaaagtatttgattttcttgttttttgcttgtaagcatctaaagtatgtgtgtttgtttatgtacatgtttcttaagatatttatattgtgttttgaattctcagaaattgtattattcttgttccattggcattacttgccaaattcagggttgctattttatttttatcctttctaggcccagcttcagagggaaaaagaacaagatcagatgaagctgtatgcaaaacttgaaaagcttgatgtcttagaaaaagagtgtttcagacttacaacaactcagaaaactgctgaggtaagctttctttgaagtgatgacaacaggaatgaatctttagtgttaagcataattggtattttatgtgaatgtagagtaaatcttagatttataaaacttcatttacaactttttataatccagatatgaattctcacctatagagtgaaaagttaatgcgttctgtcacagtatgaatgagctgtcttttgatgtgaaattgtaattttgacttctaatatggcaggatattttcatttgtcagatactttacctaaagggtattgaaaaattgtctttcaccacttgtagtcaaattaagcctataccagttcccctcttcatcctttttccctccaaatcttttccattttatagggttttctcacagtcgtacttcccctaggaagtcctccttgaactctccaacactcaggaagttctccctttgaaatagtactgtcctcctattctgaaccacaccacagatgtaagacataatacttacatatataaggttatatgtatatatggtgcctgtcaagttatttccttgctttgttgttttgttgttttatgaatattgctctttttttcttttcatacaatacaggttgggtgtccttaatccaaaaatccaaaatctgatatactccaaaatccaaaactttttgaacactaataataatgttcagaagaaatgttcactggagcatataggattttgaatttttggattagggataccgaaccagtaatgaaaatattccaaaatctaaaatatctctggttccaaacacttaagataagggatcctcaatctgtataagctcttaagtaacaaggaccacattgtatatttctattatgtcttttcactcttctcccaaaagtacactcttatcacatatatgcaaatagtagaattttttttttatgttttgaatgaaacgttgagacccaagactataattgtttgacctgctacacctttagtacccttaaaagtttcatcataatgattttgttgctggaagttaataaagcctgtgtgtgtgtatattctttgctttccctttgttcttcttgtatgtaatagaaggtaaagaagcaaagaaagaagtgggaagaaagccaagaaaaatcttaacatcttgtgccattcctttttcttattttctgccttaatttgccaaactcttaagaatcaagaccccctaggactctatttggaaaagaaacaaatgatatttggctctagtttttatgtaacaatcttagtttttactcttttgcaggacaagattaaacatttagaagaaaaacttaaggaagaagaacatcagcgtaagctatttcaagacaaagcttctgaggtaaatatagcactatataatctatcacagtaaaccatatatgttttattatatttttattttcattaactgaagcctatgttctagattctaatttctgcttcctaaattgtcttttcgttacaataatgaaattctcagtcagccagtatgatacatggatgtatta

SEQ ID NO: 36816 - DNA, 2300 bp, Homo sapien
cctatgtttatagcagcattatccataatagccaaaaggtggaagcaactcaagtgtctatcaacagatgaaacaaaatgtgatagttccatagtcattacgggatataattcagcctgaaaccggaaggaaattctgacacatgctgtaacatgtatgaatctcgatgggattatgctaagtaaaataggccagtcacaaaaggacattacatgagacacctagagtagtcaaattcatagagacagaaagtagaacggtggttgccaggggatcagaggatggaaaaatggggaattctcgttgggtgggtacagattttcagttttgcaagatgaaaataattctggagatgggtggtgatagttgcacaacaacatgaatgtacttaatgtcactaaattgtacatgaaaaaataagatggtaaattttatgttatgtgtattttacaataataagaatagatagatagatctatagataggaaagagagagagaggagagagagagagagagagagagatgatagatatctaggccagtgttttttaacctcctttccattatggcttccccaacaaataacctttttcaacttttttttttcccctactctccccctacaaagaaatattaacaccagagatatgccatagatttgcttatgtgcaatgtgtgtatctgtgcttcatatataaaaagaataagattttttttgtcctccaagaaccactttccacctgggcattatccccccatatagaatgtatgtattaggctgtggtgacatgagatcagaatctatgaaggcaaaacacaggatttttgatgggcatatgttaaaagcacaggcatatgttaaaagcatatgttaaaagtagagattacaaatcatagactcaaagaaacctatatgcgcaaatataaaaaccattcatacattcttttatttaacagatattttctaagcacctactatgtgttaggccctgtgctaggcaatgagaataaaatgatgaacaaaaatagacatgttccttacccttacagtactttgtaatccagtgggtgagataaatattggtcaaaaatcacacaaatgaatgtaaaacagggacatcaagttcctcaaaagagagactgagagctccttggtactatagggaggctggggcaggagggttttaaggaagtgacgattgagctgaggttggaaaatgaaaagtctttaattaggtaaaaaggagagggagacctttccacagagtggggacagcctgtgcaaaggacctgtggccagagggatcatggcacctataagaaaccaaaagacaggagtggttggggcacagacacgaggtggaaggtgatgcacaatggaacttagctctgagtttctcagccttggcacgattgatttttggggcctgataattctttgctgtgagaagctctcctgtccattacaggatatttaacagcatccctggcctctacccagatgccagcagtacctcccactaagtcatgacaaccagaagtatctccagacatggccaaatgtcctctggagggcaaaatcactctcagctgaaaaacactggactagagggataggcatgggccagattgtatggccctgttaaggagttttgctttattctgtggcccatgggaagcctcttagggatagaaaagggggaagggggaatgacacaatcagaattgcatttgtaaaagttccccagccagcagtgagtaaaatggagaggagggaaagcccaggccagaggagtcatggatagaccatttaagaggctaggccagtttagaagctcctagactagtcctcatgaaatataatagcttggactagggtagtgggtagtggagatgggaagaagtgaaacgggagagttccctgatttcccctcgtagaatgtgtgacagggatgtggctcgcctgtttcatggccctgccgctcaaaccccaaggaggagcatgcagacaggcaggtgcagaggccagggcaagtgctttgtgctctcagcgccacttagtgtctagcggtgggtgcctgcaacccgtgttacaaagccctttcagctttgctgtctgcagatggcttgagtgctaatcagctcaatggaccctctgccttatcacaagggcagacggccagtgcgacagccttctgtatcccgagctcttgcccagtgtcccggaagaatcggatcacacgcaggcttgaaggatgaatgcaaggttttattgagtggtggaggtggctctcagtga

SEQ ID NO: 36817 - DNA, 2300 bp, Homo sapien
gtagggttaagccagcattttgtctactgtaggaacaatgaaagatctcagtgagcacagcgtattgggaaatttgtaagaaggaatgtgtattgggtgggatgcagatgtggtgatagcttggtagtgaaactgcactggaaaacttggagagagcctctgaagtggagcagcgggtcagcacatgcggaggagatgtgaagtagtacggtgagttcaaagagtgtcccatcctgtacaaggtgagaaggagttaagctggtccatcaccagttgctcaccaggtgagcagaattgggaaacacctttgtatgccttgctggtagacttagatgttatcctgaaagattttaaagtttataggtcatatgatcagacttgcattttaataaaacaacttattctggcattgtggagagtagattggaacgatgccagaaggaactcaggagattagatagcctgttacaataattctagagaacagatagaggtgggctgcagatgtttgcaaataagtttaggaagtagaaggggtaggacttcatgactgagaggaggagaggtagagtgatagggagaaggggaggaattttcaccaaagtaagcaagaaagaggaagagcagtctattgatggttgggcctgtcatttgggattttagtttaagatacctagaatccatttaagtgggatctgttcagtattcaggaaactgcaagtcaggcaagagctcttggctaaaaatataaataggcataggcagtagtagaggcactggaggagcatatagaaagaagggatggggcttgaagaccagactctaggaaacagtaatgtctaagggctaggaagaagacgggaggaaatagggatgggggtagggtagtaaaaaagcccagagaagtatgtgcaagaaactaacagtatgtggttgtgggcgtagtttttcaaaggaagaagtagtcaaatgctgtaacaaggacaactcatcttgaaacacttacgcagtggtgtgtggagctggcttggaccagcttttgctagccagttattgtgtagtagctcttcccagcccatgttcagtgataccatgttggtaacttgaaactggttaccatggaaatagtcatgccatggaagtctgcaaatgatacaaaacttattttgagctgatgattatatggtgatgtggtcgtaaatatttaacactcattagaagacattgactaagtaggatgttgaaggttgctgaaaccagaggtgtttggagaaaagtaattttcagaaggttggttatgaaaagaaaatggggtgcagggagtgggggaacaatttattcagaactgttgttcatttcttgagaactgggttcactcttgatgtagttctctgcagctttctccaccctgggtcctcctgtgaattgccatgagtcttttgtgctatagctctctttggtgctgtaaagggggaaagcagcaagggcttatctgcagaaaatgcatcagttgactgacactagttgaagaacaaacctttaggcggtttcttttccgggcatgtgtaccgtctgccgaagagagcaagtgagaagtgaaggggtagttaaacaatgcaaagagaatctaatttatatagaagggtgtataatgaggttaattataatggccctccttcagtacaaataatagaatagccaaaatatgtcagatacagtggaaaatgttcatatgaagtggaagatgaactgtattaagcaattgtaatacaattttagctcttgttatatacatgcctagaaaaatggcaagaagtaacctgttactctgatgggactaattcagtattttttttggcattttctagattttcttaccactaatagcaacttttataacttatgattattattatttttttttaacctttcctaatgaatctttttttttcagtaaaagaaacagtaggtcaacagaggtatattccctaagtggtgcttttattttgaaaatattgtcaatgcaatacttttttcaaaatcgaaaataaaatattttgcctacttattaaaaagaaatagtttttaccttgttctgaggctgggtaatgagaaccaaattgcaaatttgcagaatttttttcctaacattgtcaaacaattggtaatagtgttttgagattgaacagaatttgatgtgtttaatttgtaaagtgtatttttttgtggttacacagaagcagtaaaaaccttgacagaaataatgagctttaacataaccacagcctctaatctaagaa

SEQ ID NO: 36818 - DNA, 2300 bp, Homo sapien
aggttccttcggcttcctcccgactcccctgcttccccccgtaggattcccgttggtatcgtccgagccccacctccctcctcttcgcccccgcacgccgaaaacaggggcctctcacgtgacccctgcgcgctcccgcgggggagcgtagtctcggaggcggcgccgcaggggattgaggggttgactgagcgttgcgagccttagctttctcccgaacgccagcgctgaggacacgatgtcgcggctctcccgctcactgctttgggccgccacctgcctgggcgtgctctgcgtgctgtccgcggacaagaacacgacccagcacccgaacgtgacgactttagcgcccatctccaacgtaacctcggcgccggtgacgtccctcccgctggtcaccactccggcaccaggtgggcgcgggccctgtgggcttcccgccctcccctgcccagccgagccgcactgcctcctcgccgtgcgggcggggcccgggttcgggccacggtcgggcgggcgggccgcgctcggggtgcggcggcgactccggcaacatggcggccagcctggagtccactcgtggccgggccgggtggggagcgcgctggggggaagcggacgcgcggttcccagtggctgcggggctggggcccccctcgaagtgttgcaagtcgaggtgccttttaaaagtgcatcgtaattcctagcctcacttggggtcggaaatggggacgtggcttccttccgcgggggcagcggtggggttgaggatggggccgggcgtcgcgcctctgaggttggcggtggggccgagctgcctctccctgccactggttgttcaccctcccggcgcctctctccggaggtagccttctccggaagtccgggaaagagaaacttaaagacggtaatgctcgttcgtgtctcagacttgagtctgagaaggtcgcttgagatttaattacattggttttgcagataggaatagaatgtagctgacgtttgagcacgtagttagtgaaaacttcacacttcaaagtatgcgaaaaggaagaaaagtacccatgtatgtaccgggtgttttgcgtacgtatcctaaggctaaactggaaggtaggtagtgaaacctaggaggtagatgcagagacggagatgagtaaactctcctgacattgtatgtttattcttttttcaattgtttttaaaattttcttaactatgtcctgtgctcagatagcgtatgtttagtaggtcgtggaacgggggtttgtgcccaggtctgtgggttttctaaaacccgatcaggagcgtgtcttttgttatgtgcagtcgcatagggctggttaaggcatacatacattttaaagcagaaattgccatataccgtgacaacacaaaagagagaaggaagataagtttgaggtaataagcgggagaaacactagaggtttaaaacctgcagtctcgtatgattggttattctagttaacattagttaaggagtaatgtttacgtagttaacattggcttcttgaccgaagaatgccgaagtgtaatgatttttatcacggcattcatattctacaaattctcctctagttttagtattttataaaagtttaataaagtatatagtaaacttaatgttttgtttttagtttaaggaagatgtaatggtaacatttcaaaacgagggaagtaaattgcagtataatactgggaattctaaccgcactattttaagatgatagagcagaatatgtttgtctcagtcttaatttgacagtttcctttcagaattgtagtgtgtgtgtaagagaaggttggaagtatcaaattaatttgtctttgtgtaattgaagtgcgtgcaaaggaggtatgtattttctggaaatcataagtggatgtagtgtggtctgaaaggtagcaagtttagttcattgtaaagaacatttcagacatttcactttgctacacccgtcaagcacaaaggtttttaaacagcatgttttatctatacaaacttcagaaaatttatttttactttatgaacccttccccaccccaccgtacatgtcccagtctttaataagtactaatgatgaagtattgaaagcagtgcctctgcagaactattttttaggcaggagcaaagcaaacgagaatgtttggaggcatctagtttctaggaaaatgaatggagcccaattcttttttttcttttattttgctgctttttctcactggaaaatagagcccaattttatagtccgttcttctccagaaattgaattatggtg

SEQ ID NO: 36819 - DNA, 2300 bp, Homo sapien
gaaaaaaaaaaagctgtctctctgaaatggtgaaaatgactttggaactcccttgatctacctctacagttgccatgcaaaataaaataaaccaatggttttctagtcttaaaacaagagcgtgaaatgtccctttatcaggactgaggaatatctgaggactagagttaaacatccaggtgacaaattgttaaacaatggtctgcacagaggagtgtgtttatcctagggtggaaagaagataacacaccaagctctgagaacagagcttctatttacatttttttttttttttttttttttgagacgagtctggctctgttccccaagctggagtgcagtggtgtgatctcggctcactgcaacctccgcctcccggatacaagcgatcctcctgcctcagccctgctagtagctgggattacaggcacgtgccaccatgcccggctaatttttgtatttttaggagagacggggtttacaccatgttggccaagctggtctcaaactccggacctcaggtgatccacccgccttggcctcccaaagtgctggcattacaggcgtgagccaccgcgtccggcccctatttacattcttaaccttaaaaaaaaattaaagttgccttgcgctttcatttggtctgggtgccagatagtcaagtgttaaatatagagagaggcctcctgagagaagagcagacacttctctgaagggcttatggtgggagctcacttccctgacagcattctcatgcttctgggctggatcagtcaaaactatcagctttttgtttacatccaagcaacactactccaactagcgtagtcattggaacaaatgttcatagtcctgagggtacagaaggacgacactgaaaagatcccaaggggaaataaaatctttctatttgagcaaaaaggtaaaagcactatgtagtcatcttttttggcacatcaaaaaagtcatcgtggcacatcaagacagacctcacgaaagcaattaatattcctatattattaggataactttgcataattaaaattacataagtgtacaacagctgaaaacacagcattaaatacaacttttaaagtctaatttttaccatgtgataaccgtatcaaattttgcgaatattttgtgagacttggcagtagatggcgctcacctttactaaaagtctgagcagcgccttaacactaacaggaacttaagaatccagctctgatgtcaggcaatcccgtgtccaggtcaggtcacttttttaagtctcagtttcctcactggtaatgtgggggtgggggcctccccaatgacctcgcaactcagaccgcttttgattctctgactacagtggtggagttgagacaggtcggctgctgcaaccgccgtctgaaatagcaatccggaaaagtcaggttgggaaagtgacagagtagacgccctgcggctctgatccgggcggcgcctcagctgcccacactatgtgggcggcaacgcacaaactccttaaccacgtggtgcctccattcccctagggagtcccatcacaggataacttctagcaaaatcaatcttcaagaaaaaaagaaggggtcctgccgaagatataaggaagctccctggggatcccgcagcacagcacaaacttagttcttgagagccgcacaaaaccaacttccgccccagtggagttgcgtccggaaggcgcggccccggaggtcacgtgggcccgcggaattacagcctggcggggcgctcaggtggaagcagtaggccacattatgtcgactgttccatgcaagtcagggtgggggccgtccctatcgcaggcatgagacaagtccagctgcgtcgtgtctggtaatctgagggcaagaagaacgatttgcagaagctcccagttttcttggctgtggcacagtcgctttgagggccaggttccttcggcttcctcccgactcccctgcttccccccgtaggattcccgttggtatcgtccgagccccacctccctcctcttcgcccccgcacgccgaaaacaggggcctctcacgtgacccctgcgcgctcccgcgggggagcgtagtctcggaggcggcgccgcaggggattgaggggttgactgagcgttgcgagccttagctttctcccgaacgccagcgctgaggacacgatgtcgcggctctcccgctcactgctttgggccgccacctgcctgggcgtgctctgcgtgctgtccgcggacaagaacacgacccagcacccgaacgtgacgactttagcgcccatctcca

SEQ ID NO: 36820 - DNA, 2300 bp, Homo sapien
accgaaacctccacctcccgggttcaagcgattctccagcctcagcttcccgagtagctgggattacaggcgcccgccaccatgcctggataatttttgtatttttagtagagatggggtttcaccatgttggccaggctggtcttgaactcccgatttcgtgatctgcccgcctcagcctcccaaagtgctgggattataggcaagagccaccgcgctcggcctgtaaacaattctaaaaaatcaaaagaattgtatttcacgttatgtgaaaattatacgcaagtcaaatttcgtgtccataatatggttttactggaatactgtcattcatttccatctctgtgtctgcttttgcaacacaggaaaaagctaaacaggtgtgactgagaccctattgccaagaaggcctaacatatttactatctggactttacagaaaaaaacttgtcaacactttctttacaatgtggagtcggcacagaaaatatgtgccttcagaaaaagagcgaaaaaaaagagaaaaaaaatctctgaaactcattaatacattaactttgtaattaacttcatggccattaactttggtaataaaaggttgctgatcccgtctgcccaagcaacacagaccacaatttctacttttgatgattcatgtattattttcacagacttctgatcacttgttttctttttattatttatttattttgagacggggtctggctctgtcgcccaggctggagggcaatggcgcgatctcagctctctgcaaactccgcctcccgggttcaagcgattcttgtgcctcagcctcctgagtagctgggattacagagaccgccaccacgcccggctaattttttgtatttttagtagaaacggggtttcaccatgttggccaggctggtctagaactccgcctctgcctcccaaagtgctgagattataggcgtgagtcaccgcgccaagatatcttctatttgggaacattttgttgtcaagtatccagctgggtacttcgggagttaaaaacattaattaaggcatggtcctggagtcaagtgagcttcggcgagaagtttgccatggacagcatttctggagcaaaccctgtaagaagggctgaattctacatgccgacatttcatacatttctcctgcatttcaggttgtaagtgtgctgcagcatgactgatctggccaaattcttccagtttcctcaagtgcttttcctttagtatcgttctgagtgtttacaaagaaatgattttccaaagcacttgtgaagcatctagttcgattggaacgcagtgacggctctataaaattcaaagaaaagaatctccccgcatgaatagttaacaaaaatcgcttgggccgaggtggcggggttgtaaaaattagctagttatatagtaatcatttttccataaatttaaatatctctaattaaagaaaaaattgacgtagaacaaaatctgcgggtgtgtgtgtgtgtgtctcggaggggattaccttatctcccagcgcggttctgaacccttccttcgctcagttctccctttaaaagtcgccaagtggaacgcccgcccccggacccgcacttgcccccctatactctcctcccggtcctccagacggagcccgcccggccaggacacgccagccccttcctcggccggtggggcctcgacccccgccgcctcgaggaggcgcggcgcctgcagtccacgcggccgagagcgggtagcggggagggccgcccacgacggaggtttctctgtggttacctcagcggcgctcttcgcaatctgaaagttggggcagctgaagagccccaccaccttcacctgcagcggccgctccggcagcgacggcgagccgcacctagcgtgcgggggcccgcacggctgcggccttgccatggccgcgcccggggacgcccggtgaccccaaacactgcgcgtcgctccggcaaccgcgcggccccgcctccgccgctcgcaggaggcggggcccaggggcgggtcgagggcggcccgtggcggctgggcctttcctcaactttgcgcctgttgctgggccgccggcgcgcgggcggccgcgaccgccggggacgagcttggaggaaaaggaaccgggagccgcccacccgggggcgctctccggacccccagggtcctagcgcgcggcccttaccgagcctgggcgcccggatttcggcagcggatcgcctttccgggttggcggcccgcctgattgggaacagccggccggttgccgggggaacgcgggag

SEQ ID NO: 36821 - DNA, 2300 bp, Homo sapien
caccttgaagtcccgagtttcaagataggcatcatgaagccctgtccactccttcagcaggcagcagcccaggtcttctgggtgcatgttgaggtctccacacaacagaaccacgtctgccttcttggatgtgtggctgggggaaccaggttggtgaggcgggagttcttccatcaccagctcttccccatgactggggccttgttcaccctcagcccctgggtcccatcccacttcccatttcaagcccaggctcacacactggatgaactgggccaattcccaagcttgggccacacgatgtgctaggtagatgtccttctgtcgattgtattcggcatggagctgagcaagatagatgagatcacagcagataagactgagggtcccaggggtatgtctgaatcaagcctgtgtctgtcacttggcatggtgtttggtatacaatggataagccttgcccattgcttccttataagatcttgcccccacacctcatccccaggtatgagagctagagaagtaccatctctctgtcccaggactgggctgcatgtcccagccctaggcactgccagcttcactcacatgggtcacataggcgttgagcaccatgccacttagatggagcaccagcagccccacagccttcccactgaaccagtcaccatgatggatctgcaggcaggaggagatagaaactcagggcaccgccaccatctttctgcccatcccctgcagctctcagagggctgcctcctctaccttgtattactggaggtggggaagggaggtggaagaggtcaaaggtctgccttaccatgtaggggtagccattgagagtgtagatgtgctgggtaagctcctggattggatgtttggagaagacacagaggccactgccaatgattccgctgaaagccaagccctgcttaataaccagaaaaacagggagagacacccagccttcttcccctcccttgtcttccagctctgatcagctatttttttctttttctactgctgggactagccctagaaccaaggcgacagcctttggaggagtatagggcagccagaaaacaaagctgaaatgggctgaagtcataggaccttcttggttcacccttctccttctctcacatccagagggagaggaggctggaggagactggagagtgcaggcaggatagggaagggctggcagggccaagagcctcctgggatgacaacaggcttcaggccagtgggcttctcacctccggaagtggtgtgcagctgggtaggtaggtgacagcttctgtctcaggtactggaagtcctgctcactccacacctgagggaagcggtgaggatgcctgcttggtctttccccagtgggacggtctgtccctcctcccagcctgggttccgcaccgtgctgcacaatctcacctcctccagcaaagccaggtcgaagctctcctggttcagaaagtctcccaggcgcctcatgcggtcggcccggtgcttgctcaagtacggaatgcccctaaggaagggaagagcggggcaggggaggcgactgctgggaccaccggcgctggggccagatgtggactttggaggttcgggttttccctacaccctgagatcgtggggcgggatagggggaggaaggctgcatgggtgcgaacggaaggtggcccccagaccgcactccgcagacgcactcaccagcagttgaggttgaagatccgcagtcgcagggagaagttgggcttcatggttggggagctccaggggcgctaggcggctcgaactctccagcgacggccgcggtggggacgggggcggccggcggcgccttctccccagaccgttccttcttcgcaggcggcgcgcacaggtgggcaccaagcccgcgtggctcaggtcgggcccgactcccgcgttcccccggcaaccggccggctgttcccaatcaggcgggccgccaacccggaaaggcgatccgctgccgaaatccgggcgcccaggctcggtaagggccgcgcgctaggaccctgggggtccggagagcgcccccgggtgggcggctcccggttccttttcctccaagctcgtccccggcggtcgcggccgcccgcgcgccggcggcccagcaacaggcgcaaagttgaggaaaggcccagccgccacgggccgccctcgacccgcccctgggccccgcctcctgcgagcggcggaggcggggccgcgcggttgccggagcgacgcgcagtgtttggggtcaccgggcgtccccgggcgcggccatg

SEQ ID NO: 36822 - DNA, 2300 bp, Homo sapien
cctctcctctgctccattcttctcagttcctcccatgccccaacacatacattcagtctttaccagacttgcagggcctccgtcaccaccatgctctttgttgcctgactggggcaggcgctggaggcagtagaacgtctcagttcttcttctcagctcttgtggccatggagaaggaggaaaaagagagtcccttctccagtgaagaggaagaagaagatgtgcctttggactcagatgtggaacaggtgagtgggccagcgtgcagccacaaaacgctctccagcccactacaggagaaacctgcactggtccactgcacccttctcttggaatgtcttctcacttggcctgtcatatctctggcctctaccttttctaccagagcttaccccacttcagcacgggttattttctgcctttccaaacaacactcctatccaccagggggcccaggccctatccctgactggcctgaccctcctataggccctgcagacctttgccaagacctcaggcaccatgaataactacccaacatggcgtcggactctgctgcgccgtgcgaaggaggaggagatgaagaggttctgcaaggcccaggtgaagcccgggggttcccaaaattctgatggggtcaaagttctgagactgagatcagagttcctccagtgctctgttcttgagcaacctagagactcctggatattctgtcttgtacccctcagaccatccaacggcgactaaatgagattgaggctgccttgagggagctagaggccgagggcgtgaagctggagctggccttgaggcgccagagcagtgagtgacaagctaggacacccctctgccttctagcactgtgttcagctccacgctccagcccgtaggagtcccagtggctatgccacacagctaacacatacctgtgacacccggctctcctgtctcccctaagcctgtaactcctgtggtgctggctggaagcctcctgatcaccctacccatcttccttcttctcaggttccccagaacagcaaaagaaactatgggtaggacagctgctacagctcgttgacaagaaaaacagcctggtggctgaggaggccgagctcatgatcacgtaaggggaaggggatggtgacagtggcccatgggccaggctccagccccttgggcaccttagacagctctgcttctacaatccctgacctccacagggtgcaggaattgaatctggaggagaaacagtggcagctggaccaggagctacgaggctacatgaaccgggaaggtaggtgaaatgtggggagaagcagacacatcccagggatgtgtcatgcaagcctcatgatctcagatactgaccaagcaacatgatgctctagtctgtgtacctctgagacaattcaggaggaagccagaggagggggctccaaagccccttctcacttcagttcaatcagagctgcacagttggcttttgtataagatctccttcaaaaaaaatcgtgctgctcagtagtgctagaaaaccactggtgttggcaaccctcctaatttggcagcttaggaaacaaagcccgggttatagaaatcacataggctgggattaggttgtggccctcctgcttccctgcccagttccctgttctctaagctttgtctcctccttttagaaaacctaaagacagctgctgatcggcaggctgaggaccaggtcctgaggaagctggtggatttggtcaaccagagagatgccctcatccgcttccaggaggagcgcaggctcagcgagctggccttggggacaggggcccagggctagacgagggtgggccgtctgctttcgttcccacaaagaaagcacctcaccccagcacagtgccacccctgttcatctgggctgcctggcagagagccttgctgtttacaattaaaatgtttctgccacaaacagcgttcacaccgcctacaggtgggaggtgggggcgtgtatggggacaggagaagatgtgtaggagccttaaggtctgtagtgtgacagtcacactgacccctggctcccatcgcctctacaaggaaaaaggcagagccactaaagggccaagctttattgttctttagttctgtccccctcctgctgccccaggagtagggctggctgaggctctgggcccagatcctgggcctcccttgcccttcctagcacatgctggagctcagcctgggccctatataagccattgacctcctgtacgtggaagaggtagaatgcacctgcccacagcaccagccct

SEQ ID NO: 36823 - DNA, 2300 bp, Homo sapien
ccaactttgtgaatggacgcaccgtggaggagacacaggtgccggagatcagtggtgtagccaggatctacaaccagagcttcttccagagccttctcaaagccacaggtcagggaccctcttgctgaatttcccctccccctgcctgactgtggcctggctcctgcctctcccttccaaacttgtcctcactgcaaggaactccacacttttctgtttttttggtctcagcagcaaaggagaaggaacctgtcccctcagggattaagcaagcacagccctagttgatcacccagcatgaaaagtcctggaatctctcagagatgaacctgtgtatgggagttttgcttaagtggtacttcaagaaggtgcctctgtttactttggttttgcactgccatgcgaccaggtggtgcaggtctcccaaatgccacccccctccaagcttccctctttgctctaagtcctcaggcctcctgggcctgggacagatggttgtttgtgtcatcaggactcgtggggttctatgcgtggagcactcaccgcagcctaagctgggatcccagctcagaggtcaggccatgttgggatgtttagggaaggtgatgcattatcaggagacatatctactgtcccctgccctgtacccccaggcattgatctggagaacattgtgtactacaaggacgacacccactactttgtgatgacagccaagaagcagtgcctgctgcggctgggggtgctgcgccaggtgaggcccagtcctggccaggagaggctgggtggtgagccccgggaggcagaggctaggcttggacatagtcgacacctgggtgtggggaccccgtcctctcctgcctttgtcctggcattaacttcacctctaaaagttctcttggccaggcatggtggctcatgcctgtaatcccagcactttgggaagccgaggtgggtggatcacctgaggtcaggagttcaagaccagcctggccaacatggtgaaaccccgtctctactaaaagtacaaaaattagctgggcttgttggcgggcgcctgtaatcccagctactagggaggctgaggcaggagaatcatttgaacctgggaggcggaagttgcagtgagccaagattgtgccactgcactccagcctcggcaacaaagtgaaactctgtctcaaaaaaaaaaaaaaaaaaagttctcccctgggatttacaaggcagcaggaatcatattctgggctaaacaccttataccagccacagtagatgtgtgtcagctccatgagggcaggcatttctgtctctttgtctgttgcttgctgctaattgccagtacctggaacagtgccaaatacatagtaagcgctcggtatgtatttgctgaatgaatgaactagttgagtgcctaccatgtgctagatactgtgttgagagttaaatttgcatctcccatctaattctcatgagtaccctgataaattaggcatgttgtctctaagtgatggacaaactaaagctcttgagtttgtggcaagtatatgacagtaatgatatgggcagaacagagcctgggacacccagcagcagggtgaatgttgaagaaagggctttgagaattccaggctgctggaattctagtcccagctcagccttcaactgctgtgtagtctagggcagccccttccttctctgggccccaggatgtgcaccttctgcgcccaagggggtggcactggcccactgaccctgctctcagaggtctctgaggttctgctctgttgaccatacaggactggccagacaccaatcggctgctgggcagtgccaatgtggtgcccgaggctctgcagcgctttacccgggcagctgctgactttgccacccatggcaagctcgggaaactagagtttgcccaggatgcccatgggcagcctgatgtctctgcctttgacttcacgagcatgatgcgggcagagagttctgctcgtgtgcaagagaagcatggcgcccgcctgctgctgggactggtgggggactgcctggtggaggtgaggggttcaggaggcacaggggtttcatggttaggggagggagctgcctagtatggaggaggggataaaaaggtctgcctgcagaggggaggagctaagggctgcctggtgtggggatggccccttctgctgtgacctgggtggatatctgggcttgggatgcacctgttggattctccctgagctgcttcctattcctctgacactgcagcccttctggcccctgggcactggagtggcacg

SEQ ID NO: 36824 - DNA, 2300 bp, Homo sapien
cattccccatctcttagtggtggtctaacccgccccgccatccccttccctctcacttctcatatccatttggaagctgcagattgctgagtttccaggactttaatccgcgccctttgccctcggcccgggcttaggggtcgacctctgtcacaggaggcgcactctgcgcttggatccatcctggggcgcccgggccgtggatctccaggtgggagaccggaggagagcgcagacgttccggcgccaccctcggacccgccggcttttccaaacctcttgaggagcctgagcgccctctcggcccggcgctgggaggctgccagcggacctgggaccgcggcgggggcgggtggtcctcgccttgcggcggggaaagagctagccttgcacgcgcaagcaccggcaaggagcccaggccgagggtgcgcggtccagcactgggcgccctgaccctcgagctcctcagcccccaacaggccagacccacccagaggccccagagcggaacggggtgtccgcagcgccacgccctcgggcgccaccctgcaggcatgggcgggcccaagactgtccccgctggaggcggtagagggatccagaagtaatgagatgctaatgagtcgcgaataaagcccgggcggcgccccgcgcccctcgcggaagcccacactccgcgcgactccaggcgcacgccccgggccgccccgcatcccagcatccccgcccgatctcggcgtttccgcccccgcccccgcccccgccctcccacccgctcagacctggttgccagcccaacaggaagcggcccctcccggcttcggagccgccggtaagtcgtccagcggagccggctgcgagccccgcggccgggtggggtgaggtggggtgcgcttccggggaaacgcagctgcggtcgctcgggaaccacgcctggcaggtcaggcaggtcttccctcagcccagccctgctcacgccgcgtccggactttgccgtccagtgtcggggacccccaccgctgccgcccgcggtccagctccctctccatcctttcagaccgctccacccctctcacagcctttgtcctggcgtttccaggctgggtcgctcctttctcccctttcgccgaggtcttcctccttccaccctccacccccaagaaagatctttgcccttccgtcatgagattccgtctgccctcgtccgggccacccgcagcgggaggctttcatctcctgtctcggcgcggcgggctgggaacggaggggcagctggatggtggaggggcctgagcctcagggacctgcccccactgctgccattcaccctccctaacgctgccgtggacacccgcctcctccataccctctgataccttctgggccccgcgtgagaaaccccctcgggcacccttcaggtggcgtgggagggggcgacaaagcgaggctttgtctccggagattcctgggagagcgcgcccgggcgcacagggggcggggcggggtaggggtcgatcagggaggggggaacctgggaggggcgcacccggctgcggtcgacccccagccctacccacggccccctggagtagggcacattcacagaggaagtgttttgaccacagtgcgtcagaaatagacccaggcctccgttccccagtcagtcgcaacatcctcccgccgtttgttgaggcagtttggtggagggaagtggaacctacgcggacagaggctgtttctctgtcaggaggcaagcacgagtgctgaggaaaactttgcccttgccatgagacacttctcagacacagcgtggcactgaggccatcaaggggcgccggcacagggacgcttggagggagatggggcaggatgtatgctcagcagctggggttgtgggtatcagatctgtccctgtgttgcatgcaaaggcagctctgtcctctccacatctaagaaatccccgcacaccctgattccaaggcctaaggaaggcaggctaagaattcctaccccagggcttggagatccctggacagggaggctgaactggaggctcccctggtgtcccatgtgccctctgtgcccaagactaatgtttttcacttccaaatttggcaaatttcacttggagtggactggatagcagctgtctctggagcagatgctggcaggggaatgggctgggaggagcagagccaatcactggtgaatcccgagctccctggggacaccagcctgctctcttcgcctccccttcctttttatttcttctgttctccagcctcttccccttctttttc

SEQ ID NO: 36825 - DNA, 2300 bp, Homo sapien
tgaccctgcttggcaaaaggcattgagtcaagccagaccccactaagcctttgcaaagtggagcggctagttgtagccgctgtagttgtagtaagtggagcggctagttgtgtaccatctgctagtgaaagggaaatgagattattctagaagccagggactgtctcgggatctcttatggtctctggatctcttatggtctctggatctcaaggacagcaaccctcctctttattcctcggttttattagtgtttccagcgtgacagttcacttcctctaaacaagacatagcttcgtataatgccagcctttcacgcatcattttgaatcaaccctggggtggtggagcccagggtaacccagctgtagtggactttagaacgtttttacaccatgtatttaaatatgggtgtgtctgatattcggcaaattcatttcaagccaaatgacgtgtcacactcaaaagctaggatgggcccaactgagaggctgccctagttttctgagcgtgacctggctgaattccctcgcctctcctggcagagaacaggcatttccccttgctttcgtcccactgcctgcttctcagctcgagctgggaacagtgagtgttcaggtcttactgggtctcagatattttccagatgaaatgcaaaatgagaataaagggagaggccctattccctcccagctctttatggtctctggatctcaaggacagcaaccctcttatttatacctgggttttattagtgcttccagtgtaacagtatcacttcgtctaaacaagaaacagcatcttataatgccagcctttcatgcgtcattttgggtcaaccctggggtggtggagccgacagacctgggcccccaaacagctctgccacttgctgtgtgcagatcacagaacatctgtgactcagtttcctttttggtaaaatgggactgttgcaagcactgatgttgaggtaatactcataggatgacggtcaataaatgagacgatgttttttaatattaactagctaaaagactggacgcgtcccttcactttaggcgctgttccttatcgggaatacgacgaagctgatcccaaaggcctctccagcccttttcagcagacagtcccgtgggtcctcactctaaggcattctttgaagacttggtctctcttccacacacccctcccattccccatctcttagtggtggtctaacccgccccgccatccccttccctctcacttctcatatccatttggaagctgcagattgctgagtttccaggactttaatccgcgccctttgccctcggcccgggcttaggggtcgacctctgtcacaggaggcgcactctgcgcttggatccatcctggggcgcccgggccgtggatctccaggtgggagaccggaggagagcgcagacgttccggcgccaccctcggacccgccggcttttccaaacctcttgaggagcctgagcgccctctcggcccggcgctgggaggctgccagcggacctgggaccgcggcgggggcgggtggtcctcgccttgcggcggggaaagagctagccttgcacgcgcaagcaccggcaaggagcccaggccgagggtgcgcggtccagcactgggcgccctgaccctcgagctcctcagcccccaacaggccagacccacccagaggccccagagcggaacggggtgtccgcagcgccacgccctcgggcgccaccctgcaggcatgggcgggcccaagactgtccccgctggaggcggtagagggatccagaagtaatgagatgctaatgagtcgcgaataaagcccgggcggcgccccgcgcccctcgcggaagcccacactccgcgcgactccaggcgcacgccccgggccgccccgcatcccagcatccccgcccgatctcggcgtttccgcccccgcccccgcccccgccctcccacccgctcagacctggttgccagcccaacaggaagcggcccctcccggcttcggagccgccggtaagtcgtccagcggagccggctgcgagccccgcggccgggtggggtgaggtggggtgcgcttccggggaaacgcagctgcggtcgctcgggaaccacgcctggcaggtcaggcaggtcttccctcagcccagccctgctcacgccgcgtccggactttgccgtccagtgtcggggacccccaccgctgccgcccgcggtccagctccctctccatcctttcagaccgctccacccctctcacagcctttgtcctggcgtttccaggctgggtcgct

SEQ ID NO: 36826 - DNA, 2300 bp, Homo sapien
ttctagtctgttcatttcttaggacagcattgaatgataggattttggagtagaaatgggctgagaaggctgagtaattaaactgcctccatttagagatgggcagacgaagtgtggttggtgacatccaaggtcacactaggctagcgtgaagcaaagctggaatccaaccagaccttctggattccagaacaatgtattccctgctgctttatgcccccatgttaagtatttaattagcataagttgaaacttcaagtcagcagtttttagcactgatgaactcattattgttctctgatcttctttaaagacaaattttatgatgtgtcattcatagagccacatgaccctgcttggcaaaaggcattgagtcaagccagaccccactaagcctttgcaaagtggagcggctagttgtagccgctgtagttgtagtaagtggagcggctagttgtgtaccatctgctagtgaaagggaaatgagattattctagaagccagggactgtctcgggatctcttatggtctctggatctcttatggtctctggatctcaaggacagcaaccctcctctttattcctcggttttattagtgtttccagcgtgacagttcacttcctctaaacaagacatagcttcgtataatgccagcctttcacgcatcattttgaatcaaccctggggtggtggagcccagggtaacccagctgtagtggactttagaacgtttttacaccatgtatttaaatatgggtgtgtctgatattcggcaaattcatttcaagccaaatgacgtgtcacactcaaaagctaggatgggcccaactgagaggctgccctagttttctgagcgtgacctggctgaattccctcgcctctcctggcagagaacaggcatttccccttgctttcgtcccactgcctgcttctcagctcgagctgggaacagtgagtgttcaggtcttactgggtctcagatattttccagatgaaatgcaaaatgagaataaagggagaggccctattccctcccagctctttatggtctctggatctcaaggacagcaaccctcttatttatacctgggttttattagtgcttccagtgtaacagtatcacttcgtctaaacaagaaacagcatcttataatgccagcctttcatgcgtcattttgggtcaaccctggggtggtggagccgacagacctgggcccccaaacagctctgccacttgctgtgtgcagatcacagaacatctgtgactcagtttcctttttggtaaaatgggactgttgcaagcactgatgttgaggtaatactcataggatgacggtcaataaatgagacgatgttttttaatattaactagctaaaagactggacgcgtcccttcactttaggcgctgttccttatcgggaatacgacgaagctgatcccaaaggcctctccagcccttttcagcagacagtcccgtgggtcctcactctaaggcattctttgaagacttggtctctcttccacacacccctcccattccccatctcttagtggtggtctaacccgccccgccatccccttccctctcacttctcatatccatttggaagctgcagattgctgagtttccaggactttaatccgcgccctttgccctcggcccgggcttaggggtcgacctctgtcacaggaggcgcactctgcgcttggatccatcctggggcgcccgggccgtggatctccaggtgggagaccggaggagagcgcagacgttccggcgccaccctcggacccgccggcttttccaaacctcttgaggagcctgagcgccctctcggcccggcgctgggaggctgccagcggacctgggaccgcggcgggggcgggtggtcctcgccttgcggcggggaaagagctagccttgcacgcgcaagcaccggcaaggagcccaggccgagggtgcgcggtccagcactgggcgccctgaccctcgagctcctcagcccccaacaggccagacccacccagaggccccagagcggaacggggtgtccgcagcgccacgccctcgggcgccaccctgcaggcatgggcgggcccaagactgtccccgctggaggcggtagagggatccagaagtaatgagatgctaatgagtcgcgaataaagcccgggcggcgccccgcgcccctcgcggaagcccacactccgcgcgactccaggcgcacgccccgggccgccccgcatcccagcatccccgcccgatctcggcgtttccgcccccgcccccgcccccg

SEQ ID NO: 36827 - DNA, 2300 bp, Homo sapien
ttcagatctcagctcaaatgtcaccctatcctgatttcacttccctgtcagtctccatcatcattctttataaaatttaacactttctgaaactattattcattagtttacttgtatatttgtcctgtctccccttagtagaatgtaagcttcatgagagcaaaggccttgttagttgctgtatccccaacacctgacgccaatgtctggctcttagtagacactcgataaatatctgttagatgaatgtatgacaccccaaatcctgttctgcaagatttaaatttaagaagacctgttaggggtagaccggctggccttaacaagaacaaaagttttgaaaaagtcagtatggatccaaaacaaaattgccttgaagaaagggctagtctgtgttgtgggtggctgatgctggaagatcctccagactcagtctttcctcgcaggattatgctccagtgagcaatgattgaatgaggaaatggaagtacctggcttaccttggcactgagtcttcttatgccgttgaggacctctggagggacagtgatttgactgcaaccctcgtagcagcaagaaacaatgaggtagctaacttcctgctggtatgcagaagtcagggagcgctccccatcccacttgtacccccacaaatccagaggacttagagacaattcaatatgaaagggaaacctcagagaaggagcatgtgtggcttgagctagttttaataaaatctagtaaaaatgtaagagccaggttgctaattacacctccggttcaagatcagggaggctatagatggcatgttgggaatctggaaatgggcagaaaaataagtaattaggtattggctaagagagagaaaatgctgaaataaatggatggaagcaggtggggagtagatctggatggggcttgtagaccacattaagaagcctggactttatccagagggcatgtgggagccacatggattctaagccaaggagtgactctagtctctggatctcatatgtacttggagaaatcctctgtacttctgcgaattaaagagaacaacgctgcagctgagaccagttagaaacagtctattgaacaaagatgatgaaagtttgaataataatgatcattttaatcacagcagacgaattaaaccaggcatttcctaagcccattacatacttaattttgtttatgcaatagcaaccctaccaaagtggcactagtgttaacatctccattttacaggtaaggtaaagaagttgtgagggtaagtaatttgcccaagatctctcagaacccaggtttctctgactgcagtgctctcttcattcccttagactaaggcatcaggagtggggaggaaaaggaggcagatgtgaaaaacatttaggaggtaagtaatagttattatattagcactagataatgacgatggtgatgatgatgacaatgatgatgacggtaagggggatttcatgcctttatacattcaagaacaacaccagattcggtgtcggagaagagataaaattaaggtattggcgttgagctaacagtttaatacgatataaaacttcccaaagggaggggtcacaacgcctctcctgtccattgcccccaattcaccgcaaaagtcgctcctgcctgggctccccggcagtgccacacgcaggacctcgggcgccgacaccgccccgcccctggccgcgccccgccccggccactgtccctcctccgaagccgcgcccctccccgccctgccccggccccggccccggccccggccccaaagccccgggcctgccatctcgccccgccctgccccgccccgccgcggctcccccgaccccaggcctgcattctcgccccgccttgcccctcccctcccctgccacgccccaacccttgaactgccttcgcgccccgccttgccctgccttgccccgccttgccccgccccgccccgccccgccatctcgccccgccccgcccctcacctcccttcccctccccgccgctctcgtggcccccacctccaggggcgcctctgcgggccacgtggttcggcgtccgcgcgcaagcggctcttggcgccgcgcttccgggttggctgtggctgtggctgcggcggcggcgcaggagcagaaaccggtgcggcgcagaagccccagaggcgggcggggcggagcggagggccagcgggccccggcgtgggtctcccgccaggccgccgggtgagttggcagcgacccggaccccaccgggcgcccctgagcggtaggtctgccgcgccg

SEQ ID NO: 36828 - DNA, 2300 bp, Homo sapien
cccctgatttactcaaggttttctattagaagcctctttgactttccttgtctgtgacccataattaagtccttgaacagttctcgagttcatttactggggagcagcttctggggtgtcagactttatccccagaaaaggcccgggacttacccagattgaattacctcctccctggtgttcagctttgcataagaaggacctcagtgaggcaatcatggttgagtcaaaaagatttcattccaccttaataccaggacaatgactgctcattcaccctgaatttccctaatcctgagggtcactcaagtgactcttcacaggacaaagaagttgagctactcttgattaaaaaaacaacaattgcaccctcatacattctctatgaggccagcctagccaacaatcccctctgctgtagaattgtaggccagtgcctagagactcagctgttataaaagaaaaacttcagctgaattaaattcaaaggagtttaagcaatgaacaattcacaaatcgggcagcccccagaatcacagcagattcatggagactccagcgaagccacatggtggaagaagatttatagacaaaaaagggaaatgatgtacagaaattggcagtgagatacagaaacagctggactggttacaggttggtgtttgccttatttgaacacagtttaaacacttagcagtctatgagtggttgaagtatggccgctgggattggccaggactcagttattgttacaggcacatactcctaagttaggttttcaatcttgtctgactattaagctaggttacagttcatccacaagaactcaaatatagacgtatggccgtatttagtttgctttaacagctggaaagcactgaggcagggggtcctgtggcttaggtcaaaccaaacttcctgatgaccaccagccagcatgcccagcttgctcccacctcacagggagtttcctgagcttgggggccactcctcctggaagctataaccagcctttttttttcctcctctcagtttgatagtgacaatctcattatctcaacctattgaactagtttaaattttccttgtcatttctgctcagaggcatgcatcataggtcctgatggaatgattcccactcaaatattatagggccactctcaccaactctcccccagctgcactcccagcctcctcacagagcatttactacaaaaagcaagcatggagcacactttttttttttccatattggcttagtctcttactaaaatactacttcttgagcatctaatatgtaccaggtcctactctagttgctttacatacctgatctccaatctttaaaacaactctaagagttaaacatcatttcctcttagaaagttcaaaccaggttttaaatctaaagttatctgcctctaaagctatactctttcatgtttagattaacagcaccagttgaacacaatattcaaggtactgtgggagttatctgtcaaattctgccaaaatctatctccagcatgctgagtgtagaaattcagagctctctcctacgcccaccttctgaactgtgtttggatgtgtcctgcccacctcatggctcttggcctgactgagattaaagatgtagagatgaagagggcaaagtgtgaagaaaataaattgagttacataaggaaaatcatgagctactcctaaagagacagactggttctggaagacagaaaggaagtacgagagaaaaagaaatgtggaatttttattttcatgtttttccttgttagtgttgtcatcgatggatatcctgtaactaaacatcaaatgaatctcttggaagctaggtcaatcattcccatggtcatctttgaattgagtgtgccttccaaggagattttcaaaagattgctcctagaaaaagaaaatgaacaaaggtaatgtacatgatgaagacaacaaaaaaggaataaactttaatcatacgggggaaaagatatgtttttaacagctttttccattccttctctgtttccctattagattgccttatccattgcacaatagtgcacaaattgtagctgtcaataatgtaaagtatcgcaaaaatattggtgagattaggcaatattatcaagaacagcatcagaactggtatgtgattgatggatttcacagcaaatggtgggtatggaatgaagtcattaagaatgttcaaatggtgaataaatacatgcagacatacctggaaagaataaaagcaggtaagatagcactttttaaggtagaataaaatatta

SEQ ID NO: 36829 - DNA, 2300 bp, Homo sapien
tgatttgcatttccctgatgattagtgatattgagcattttttcatatacctgttgtccatttgtatgtgttcttttgagaaatgtctgttcaggtcttttttccccattgttaaatcagaatatttgggtttttttttttttttttttgctactgagctgtttgagttctttatatattctggttattaatcccttgttggatggatactttgcaaatcttatctcctattctgtaggttgtctctttactatgttattttctttgtgatacagaggtttttttaggttaatgtaatcctatgtgtctatttttgcttttattgcctgtgtttttgaggttttacctggaaaaatctttgcccagaccaatgtcctgtagcacttccccaatgttttcttctagcagttttatatattcaggtcttccatttaggtctttaatccattttgagttgatttctgtataggtgaaagatgaggatctagtttcattcttctgcatatggatatccagctttcacagcaccatatattaaagagaccatcctttcttccacgtatttggtgcttttgtagaaaatgagttggctataagtgttttggctttcttgaattactttactactgtgctatgctatagctccctgggataggattactggagcaagatatatacatcacaatatattgccttattacttttgataatatcaatgccttcttaaaatgaacacatggaacacaatctaagctcttctgtataatttgggccattttcatgaacctcaattttttatatagtgcccatgagactactgaagtatgtggatggttgtgccctcacaaagaagccccaatccactggtgttgggggtcatttaaggactgtggccacttacccttttctgttgttgttgttttcagctgtaatttccgcttagtctggtttgctgtttgtgatctattgccttgttttacacaaatccatatggataagatcctgaaatcctgactgtatttccatagttttgcaaagcataaaatgaactgggttttccagaaacatttcccttccctaccatagggtacctgaatacagtctgagcaccagacagccctagttgcgagacgtttaactggtgggtgagtgaagtgttaatccggtagttttatcacggagaggtttaaaatgtgatttaaaagtatggtgtgaggctgcagctatataatttcatgtcattctaatttttctccttccccttgcaaaaactccagcccctttgaggcttatcctactcggatatatcaagaagccccgttcctccttgctgctgtcacctactaatttcttagtatttcctcacaatcacagaagacttagctgctgcttcattccagtactcaccattgttcttgacagtttcagcatcccgtggatgatccacacaatgtgagtcctgagattactgtaataaatggagaaggctgtaaatttttattattagtgggctttctgtttgatagatttattttattatgttaagaaagtatctttccattctgtattaactaaaacttttgtcaaaaacaaaaataagtaaactctattttattaaatgccttttggcatatgataccaagataatcatatatggttgttggtgctccctgaggaccagtgttgatggaactaattatgttaattgaaatcctaatatctaagcatccttgagttcatgatgtgatcattcctaccccatcttagggagggcagttaataagtcttatgtgttctaaattactcaaaactgcttttccttcactctccctttatcccacccctccctgacccaccccctgtgacaggctcctccattaagaatatgccttgtcggcccccagggctctggcaaaactatgtgtggaagacagttggcagaaaaattaaacatttttcacattcagtttgaagaagttcttcaagaaaaactactactcaaaactgaaaagaaagtgggacctgaatttgaggaagattctgagaacgagcaagctgccaaacaagaacttgaagagcttgcaattcaggccaatgtcaaagttgaggaagaaaatacaaaaaagcaggtagtaatctctttttttgttttttgtttgttttgtttttgctgttgttattgttgttgtttttgagacagggtctccatctgtcacccagacaggaaggcagtggcacaatcacagctcaccaaagcctcaacttccctgggctcaggtgatcctcctgccttggtgtat

SEQ ID NO: 36830 - DNA, 2300 bp, Homo sapien
gaaaatttttgcaatctacccatctgacaaaagtctaatattcagaatttatgttgaacttaaacatatttacaagaaaaaaacaaacaacctcatcaaaaagtagtccaaatgtatgaacagacacttctcaaaagaagacatttatgtgggcagcaaacatgaaaaaagctcaacatcactgatcatcagagaaatgcaaatcaaaaccacactgagataccatctcacaccagccaaaatggcgattattaaaaagtcaggaaatgacagatgctggtgaggctgtggagaaataggaatgcttttacagtgttggtgggagtgcaaatcagttcaattatttgaaacacagtgtggcgattcctcaaggatctagaaccaaaataccagttgactcagcaatcccattagcactatgtttattgtgtttattatagacacaagcacacatatgtttattgtcgcactatttacaatagaaaagacatggaaccaacccaaatgcccatcaatgatagactggataaagaaaatgtggtatatatataccatgggatgctctgcagccataaaaaagaatgagatcatgtcctttgcagggacatgaatggagctggaagtcatcatcctcagcaaagtaacacaggaacagaaaaccaaaatcacatgttcgcacttataagtgggagttgaacactgaaaacacatggacaccaagaggggaataacacacaccagggcctgttggggttaagaggaaggaacgtagaggatgggtcaatagttggagcaaaccaccatggcacatgtgtacctatgtaacaaacctgcacgttctgcacatgtacccccctttttttttttggaagaaataaaaaactgaaaaaaaattataaggacttgaaaggattttaccccaaataaaatcaattactaaaatatgggcttaggaagaaagataaaagctaaaccaaaataataggtgggggaggctttataggtcatttcttacatacaccttcattgattagataagtccctgtattttttgaacatcataggaaaaaaatcattattttccagctcgttttgaagcttgcattttttttttttttttgagatggagtctcactctgtcaccctggctggagtgcagtgtgccatctcggctcactgcagcctccacctctcggactcaagtgattctcctgcctcagcctcctgaatagctgggattacaggcacgcgccaccatgcctggctagtttttatattttcagtagagaaggggtttcaccatgttggccaggctggtctcaaactcctgacctcatgtgatccaccccgcctcggcctcccaaagtgctgggattacaggcatgagcccccgcacgcagccaaggtttgcatattctgatattaatatcaagtaagaatagtaaaaggaaaggttagtctcatttttgcacctttatagaaagtttgttgtatcttgttttgtggaaagaagtatgatgtaaataagtatgtaaagtattccctttgtatttttaaaaatactatatatgtgcctaaatatatatctatttttataggcatattggtaggatttttttaatgagtctgggagataaaactattaagaatgctaacatagtactggaagaaaaacggtgaaaagagattttcactttttatacattgtgatgtgttttgaatatttttacagtaagcatgtattttacatcataaaaaacattttttaagtgtatttcccttgctttaaataaattgaaagaatccttaatggactttgcaatattttctttatcataaatgaaaatacattttacactttcaattgagctaaataggatatttccaaattattatttgatcatatatccacttaataccaaagtaaatcctgaggcatctctcatttaatttgccatgggtaagaagttgtgaccttgactcagcttttacttttagggaataattctattttagaaactgacctcacaatgacccagcatcaacacatcccggagtttttcattacatctctgttggtagaggactggaggcaccttcattctcagtgctgctttattttcctcatgaaaataaagaaacttagaatgtgcacttagagtaatatatgagaaactgatttttaattaattaaaataatataaggactggctttttgtggatagttttcaagttgctacagattaaatattattcaagaagcattttaaaaaattatctgcatcaaaatacttttttag

SEQ ID NO: 36831 - DNA, 2300 bp, Homo sapien
tacagtcccaccaacagtgtaaaagtgttcctatttctccacatcctctccagcacctgttgtttcctgactttttaatgattgccattctaactggtgtgagatgatatctcataatggttttgatttgcatttctctgatggccagtgatgatgagcattttttcatgtgttttttggctgcataaatgtcttcttttgagaagtgtctgttcatgtccttcacccactttttgatggggttgtttgtttttttcttgtaaatttgtttgagttcattgtagatctttgacagttttttaagaaaaatccataaaacagaattgacagttcaaaggatatgcatggaatttaggcttgcatatgtatttccaattcctatgcctaatggttatgctcttatcagcaagtatatacatatatatgtatatgtttgtatatgtatatatatgaatagtatatatagtatatggtgtatatgtatatgtatgaatagtatatatagtatatggtgtatatgtgtatactattatgtgtatatagtataccatacatatgtattcatattttagttaagtaagttgtaacatattcatctgatgcaatactatgcatgtactaaaaactgaagatgtggatgaagatttattggcatggaataaaacagtgtaagcctaccaaaagaaaagcagaatgggaatatagggatctgtaaatattaattaaagacacatagaatcctatttttaagatcccaatattctgtattaaatctattatctacctgacaagttatatccagaacatagaaattattctaacacaattttaggcaaaagctgaacatatgcttaaagagaaaaaaataagtgaataagcatatataaagaagttcaaaagtattcatgattcaggaactgtaaatttaatctacaatgagatacttcttcacacccactagaaaatttaaaaacttcacaaaaccaagtgttggtgaggatgcgaggaaactaactttcatatctttctggtagagatgtaaaatagttcagttgttttggaaacagtttgatggtttattataaagttatctacacacttaccatatgacccaggaatttcactcctaggtatttacccaagagaagtggaaacacataaccacaaaaagacttctgtacaagtgttcatcacggctttattcataataaccaaaacctagaacacaacccaaatgtctatcaatagataaatgaataaaaaactgtagtatattcatacaatgaaatccattcaacaataaaaaggatacccacaataacactgatgaatctccaaaacattctgctaaggagggaaaacctgaaaaagatcacatactgtatgctttcatttatatgaaattctagaaaaggtaacactaaactaatttatagctacagaaagaaagtagttgccaggggccaggaatgaaagctggggaaggagtaaggcaggaaaggattgacaacaaaggagcataagggaatttagggagtgatgtaaaagttcaggctgctcttgaactcctgacctcaagggatcctcctgtctcagcctcccaaagtactgggattacaaatgttagccaccacacccggcaaatgttctatatcttgattgtggttaatatatatatatgtatatttgtgaaaactcatcaaactgtgtacttaagatgtatgccttttattgtatgtaagttatacatataacatggatttaaaatatatatatgttttaacttctgttaagtcaaaatatatacataatctgaatatatatactacatgataaatacatatatagacatatatcctacatgaaaaatatggctgaatttctattaaagcaagtactcaaaaataggtgaattctgaacataactccaaatatacctcaagcagtattaatatttttggaatagagatagaaatatagatagatatacatagatagatgaacaatgtgtttaatagtcacaataactcctgcttatgtcgattttctcaaatattctttgcaggtagtcgactatgcccaacttgttcagccacgttttgataaagcccgtgaaacattagtagaaaataccatagctgaggccactgcagcagcaattaaagttgtgaaagaaaagcttctcagggaactgcaagctagaaaacaaggtgaaacatctttttaaaatgtgtgttttaagtttaggtaaaaattaagccgggctacttgaaagcaaggactttgtttagctcatcttg

SEQ ID NO: 36832 - DNA, 2300 bp, Homo sapien
gattctgcagcttgtcccattaatctttttttttgtaagtccttttcttttaaaaattgagactagccactaccttaaagaattagggtggcatggtgtgaacttgatgtggaggaagaatggatacgagtgctgcaaagggtggaatgtagcagctgctattagtgcctcccccatatccacttgacatacaccttttctatgcacgaccagcccaacttccaaaatgttagcatgtgcgactttttgcctaagggctttctctggctgccagaacctactctccctgaacacagggtagactggaagttctagggcatcaatgttctgccctatcaggcttcatccaataactgatggaagttggcgaataaatactccagcttccttgcccctcaagaggggataactgagacatgcctcccagtattccctagtgaattcagcccacagagaaatttctctggtaatatttcctttattagttttcttcccctccctgctgctgtttcctgggattacgtctcatataaacaacctgccttcaaagttttgtcttaggatctgattccgggtgaaataaactaagataaagttaaaatggaagtgctaaactataataattgaaaactagaatccttcaggtattttaagagttgctatcctagataaaaacactgtgcaaacatttaactaatattcagaagagttggtttcattatgaaacagaacacagctaactatttttcccagttaaaagatccaagtccaaaatgccagaacggacacggccatccttctagttcttaataaaaggagtaccaaactacagggggaaagaagcgcaaaataacatagacttaagtatttctttacaatttttgtaatttctcaaattttaatttacaatatgatctttggtattacatgaatgttatctgggtatgctataattctataatttttttttaaagtttccttacacttagcagttgagaagccctctagcagaggtttctgaggtttagaggtttcctgggaaacctagaattgccgcctaagataggatagctgcctctcccctacatcttatactcttgcagtaggtgttcagtaaatatttgtggaataaatacttcagtcgttgaaaggagacgtggttttaaaaagtggatttacaaagagaccgttttgcaagaaaagaagctggtctgggggtccccgcaggaggcggggttccgtgcaacagataccaagatgcctccagggcggaccacgacccagcgggccgccggaaggctccttacctggccgcagccggaccctcctcagggaagcaactgcctccagggactccgcggggctgtcgggcggttgccggggagacctctggccgccacgcacctgctgcttggtggggcggggcctcgagaggcggggctgtagttctttgtcatttcttttccaattcgaaatagtcacttttgtacctaatttggcatttataattataatacactcattttcacaactatggaagagagggtacgcgcatgcccatttatgtcgcacacatgaaatgaagaaacctcatttcaagcgcggctccgccacactgcgctagtctctgtcgacaacttcaagtggctagcctcacgcacaaacgtgtggcaaagccacactttccagctttaggtgattttaaaacaatttcttgggccacacagcgtaggtacaacatggattagaggtgaggggaaaactgacactcagtgaaggaccgtcagagggccggcttccaggaaaatgggccgcagcaggcagggaaaacacaaggatctatcctgcaactcggagaacccttttcaaaagaagctacccaatcccaaaccttccgcttttttccaaagagagggaggagataaatagactcaattaatccgtcgactttttctccgcccatgttttcctccaatccttaccaaagatggtgcccttcgcttcctctctcggcagcacgcaggtcccgggagcctctacccgacctctctatgatacgtcctccagccccgctcccgacgtgaggggcggggcttgcctggaggcggggcgcagggatccggaaacacctgatcatctataggtttagtgcctaatgggtgttgttcctggctggacttgatgtccagggcctgaggggttttctcgccgagtctcctggggcggtccggaggctcgtgccctgttgtggggcccccatttgccgccgccatgcccacggccgccgcccccatcatcag

SEQ ID NO: 36833 - DNA, 2300 bp, Homo sapien
cagaaaaacacagggcagatatagggaactgaaagcaatacagttttactgcagaataaggcatatgaaggcacatggttgatcctcaataaatgtttcattaattgatattaaattagatgtaaaactagatagacaagttgaggacaaataatacatggctttgaatgccaactaagggattcagagtttacttgcttcagaattgggaccactgaagatttctgagcagaagagccctataatatgaattgtgctttctgaacactaatatctcacgcagtcctcatgagtgatcagctttttaatgggctgaaatttgtgttttatttacggccagatgcggtggctcatgcctgtaatcccaacactttgggaggctgaagccaggagttttagaccagcctggccaacatggagaatccctgtcttttattaaaaacacaagaattagccggtcatggtgtcacattcctgtaatcctagctacttgggaggctggggtgcgagaacttcttgaacctgggaagcagaggttgcagtgagtgagccgagatagcaccactgcactccggcctgggtgacagagcaagactctgtctcaaagggaaaaaaaaaaaagttatttatgtttctaatgagggaaatttagcagcatattttacagaaaataggtttcatttcaatgacaaatgatacttctttatgggtctcattagagaactgaaaatacttgcaaatacagtatatttgataatgtcattttctgctctagatctaatcaaagttgtcagcaaaattaatttaaggtccacaattctctactcatgttaacctgagggagaggttattgtgctattaggactacgttataactgagaaactgttaaatgccttctcatactcctctaatggagacaacccaagtttcagagaaacagtttataaagcactctataacatagtgaagagcattatgaaaatatctggcatatgcaatcttgttagcatgaaatgggtaatattaaacacagtccctaatatcactgtggcaccccaatttagaagagctatactgtaccaactttgctttccacccacagaaaggaccaagtatgaagttatataaacaccattctcccttaattgaggaactggtaatcgaaatacaaactgatctgcttattcactatttacatggccattcaaagtaataaaattttaaaagtaaatgttatgttgaaaaaagtcaagtgaaaagcaagatgttatccaaacaaattatctgtctttaaacaaagtaagttttcctttcctttcaaataagaaaaaaagagaaccaaaaagttcaccaatagaagtgtaattcacatgaatcgcagtgatggtataccatggaataggaaaaaataagttacaagtcatagttcaaatttttttcatacccctgcctgtactgtaacttgtgaactctagaactttaacagactttctgaaagctgaaaagaatccagtaactcgtacagagaacctcatgaacagttcctgaggtaccacaagcacctgtttccagcgtgttccagccatggcttgtaagtggacctgcaaatgctgcaatgtccagggtaccaaaataggggaaaggcgcccaggcacagctcaagggagctagcttaccccaaggctgtgtttgacagggatttgggaactggagaggaaggaggaggaggcagagtacagcctctgtcctacggccccacacccaccggcagacatccatcctcccgcctgcgccccgccgcgagggggtactcacagctctagtctcatacagaaccagcttctggaccgagctgatgatgggggcggcggccgtgggcatggcggcggcaaatgggggccccacaacagggcacgagcctccggaccgccccaggagactcggcgagaaaacccctcaggccctggacatcaagtccagccaggaacaacacccattaggcactaaacctatagatgatcaggtgtttccggatccctgcgccccgcctccaggcaagccccgcccctcacgtcgggagcggggctggaggacgtatcatagagaggtcgggtagaggctcccgggacctgcgtgctgccgagagaggaagcgaagggcaccatctttggtaaggattggaggaaaacatgggcggagaaaaagtcgacggattaattgagtctatttatctcctccctctctttggaaaaaagcggaaggtttgggattgggtagcttcttttgaaaagggttctcc

SEQ ID NO: 36834 - DNA, 2300 bp, Homo sapien
agaagactaatattcgtatcttactgacaaaacaaaacacctttaaaacaaaaggatgatttatctgggctgaaaataaaactcctgcctactgaagtctggtgcagctgagttatcacgattttcgtcctgtaatttgttttatagggtactaattaacagggcaaagtctgaagccaagaaagtaaatcacattttgctgttttccttttctctagcaagatgcagacctggtctttaattaaagcgcaagttccaagggcgatatcagctaccgaaatcgggaaaacatgggccgaaaaggtcacagtgaaacctgctgtgtagagttcagaaaagataatgggaaagagaggaattgcacaggcaacctccaaaagaagagattgttttcctcagatgtccctgtcttatccatcttttaactgctccccataactcagaatttcttccctgactctactcaactgagcatgtaccacaaacatcctttttaaaaattggatttcaggcctggtgaggtggctcacacctgtaataacagcactttgggaggccgaggcgggtggatcacacgaggtcaggagttcgagaccagcctgaccaacatggcgaaaccccatctctacaaaaattagctgggcgtggtggcgtacatctgtaattccagctactggggaggctgaggcaggagaatcgctagaacccaggagacagaggttgcagtgggccgagatcgggcgactacactccagcctgggcgacagagtgagactctgtctcaataaataaataaataaaatttttaaaaagtgaatttcttttcccagataattcctgtttcgggaacggcatttttttttaaaggtagctactttcccatcaaacacccctgtcccaacctcccccttctccggggtttcttttttgacctgatccctcagtgatctttgacgctgggctttgctgcccggcaggtgtcactcatccttcacccctcccctcccagctcaccctcttcgccgcctggtctcagggtcttcttcactcctttctacctctccttgtctctctcccatcccattcctggaagttctggactggaggtggttgctctggcttctcctccctcctaggaccctcagatagtgttgggggcagggggagtgcggcggggagggcacaggatgggctggcgaggagagtgagtgctgggctcgcaccgggagccgggagcctgacgtcaccacgccctgcctgtcaatctgcagcgcgcgccgctcgcagccgccttttctgccaccaactgtatctctcactcgcggagccggcacagcgacaggcgccccgcgcttgcctcctccccggcccggccgcctcctgcaggcagctgctctgtttgcgcggggagctcagcccggcgccccgcctcggcgcccatgaccagcgacttccagaagtcctgacgccccaggtgagtggccgagttcccagggaactttgaggatgtggggagaggaggggagaaagatatccaggggacaggtctttccagaagaggagaaatggagccaaccttgactcccaccctctgctgcccccatacacacaccctagtctctcctcccagacccccttcgcaggggtctctgggctccaggactctccaggcttcgcaatgccagaaacttcgctttcagcaccgcggacagcgtctctgctgcccagccccatggggatgtcctggtcgcgccgccacaacccaggcgggactctcccaggatgacactcctagcttggtgcactcgggtgcgtgtgcaaatacaggcagccttggagaattgatccttgtgcatgtgagtgcatgttgtcctggtgtatatctgcaaaaactcagaagtccgcgtgggcatttcactcactcactcaacaggtatttattttgggttcgcacttaacccatgattccccgatttgctctggggtcccagggtggggtgggcaactcaagtggggcaatgcgagaggaggctctacgcgtggggaagtttcctggcagcctgaagtgtacacctgacgcctgcactccctccctatgcagggtgcaaatccggccgcgatgaacgcgagcgccgcctcgctcaacgactcccaggtggtggtagtggcggccgaaggagcggcggcggcggccacagcagcaggggggccggacacgggcgaatggggaccccctgctgcggcggctctaggagccggcggcggagctaatgggtctctggagctgtcctcgcagctgt

SEQ ID NO: 36835 - DNA, 2300 bp, Homo sapien
gataaactgttcctgagagttcaaattgagactgcatttctaattatgatataatgctatgaacaatcagaaaaatgaatgttacctaccatgcaaatttaaatttaagaacattagacggattgaataaccaataagtcaattacatcaattagtgaacagaaaaaagaccttagctaatcgtgaatctaacaccaaagaaaaaatttaagtcgaatccaccgcacatcttattacatagaaaaggaaatgattagagtaagtcgtatttaagtacctagtctagctggggatcaattaattaatcggttatagggcaggacgtgaatgttgagatcggatgtgctttctttcatcgttattccagttcatcatccgcaagtgcaagagaaggtgtcagagtaccgaagctagggggcatgctgtagcaaggggaaaagaaaaatgggaaaggtgcaatggatgctgcatagttgaataattatctgggtggcacaatgggcgagtcctgccgacatgagcgctgagtgagcggctccgtaactctgcccaaggcagcccccatgaacaggcaccagaagcgacagcaccgcttcgcctccccttccaacgaagaaaaggatgcccgcactcgctttaccgttatgttttcagacaccgactcgcggagcaaacacgcaaacgcacgagctcgctttaccgagcctcgcgcacgtagggcgagcaggggattctctgtcgcccggggctaccgcctcccccggaaagaggcacggggcggaccgcgggcgcgggtgggcagggaagcccgggcggtggcacctcaggtgacacccacagtctctccagcgagagcagccccggggcggtccctgcagccaagccccaggcgcgcccgccgccgtctccctcggcacccagccccgctggcgggtgggcggtgggcgctcggaaaacccgcggatgggggtgggggccggggcggggaaggcgcgcccatccatccccgtcacctttgcgggccacacaccactcggtctgctccggccagtaaggaagagttcctctcccaacaccccctccccgaaaaaagcaattcctcagggactcgcgctcaccgtgaaatcttgggggctcacgccttaccccttcttcatgcttcggcagcggtcgccggtccccctcggctcgcgggactccgcctagagcccccaggagggtcgggctctggggcggaacccgctcagggcagcggcccaggcgccaggccacagggaacgccgcctggggcgccaacccgccgccggacccaccgtgtgctcgacgcgcgagtgaacaacaccgcgagctgccgttccccccgccccctccccgcgcgagacgctccacaaccgggcgcagggacccgcgccagaagcaggggggaccgcgagactctttccgcctatggtcccatccttgccccccgccccaggagctattcctggccagtcagaggtctcaaaacttcagattctcactttcctcttcagcctccagtgcccaggtgcagccgaggtgggaaatccagcctccgcccactcccccattagtggggccgaagctcgctcttcccccctttcctgaggttctgtggtattgcccaatcctcagtttgggggagggggacgaagagaacactgcttggctagggaatgagggaagatgatagccaattgaatggaacatccattcgggggcggggtcaaagggggacacgcccccgttccgccccctcgttgcaaactacacttcccattgtgccctctcgcgcttcctgccgcgctgcacgctgggagtgcaggaccgcgaggcctcaaggtattttggaactcatattctttagtcaactaggtcctaaatgttataaactattataattctccctttttccctagataaacttttttaagctctcagctcgacagtagttattctaataataattagcttattgtttcaaaatgtaagacattatttcttagcaaagaaagttaatgatgtgttccattgcaatctgtcaggacctgggagcctcttcttcttccgccctggcagggtctccgcagaagatttgttgccgtcatgtcggctgcgattgcagctctggccgcttcctatggttcgggttcagggtccgaatcggactcggacagtgagagcagtcggtgtccgctgccagccgccgactccctcatgcacttgactaaatcgccttcatcaaagccgtctctagcagtggcagtggactcggctccgga

SEQ ID NO: 36836 - DNA, 2300 bp, Homo sapien
aggcaggatttgaattacagtcttaattccagagcctgtgctaaccatttcacggtgttcaccttgagctagaagcagcacagcctgaggttgaaggtatgggagaatatgtggaatgcaaagaggactaagagcagagtcctgggaaacaccagtattgaaaagggagagtaaaataattggaacagaatgctgagtagagccccatggaagcgaaacggagagaaagtttcaagaaagaggaactaatgaacagtgtcatttgatgcagacatttaagtcagatggctgaacttgacaactggaaggcctgggacatcactcacagacagtagtttcccaagaggatagggccagactgcattgggttgaggagaaaatgagacgaagacaaaaagagagctccaaaaagctgagctgtgaaaggagaagactcaggaggttactggaggggcttaagtttggaaagttttgttttgataggaagttaggaggattctaagcattctttcatgacagatgtccatttttaaaaagtaaaattcacatacagcttgttaaaaacctgtaaaacacttcttaagtcattaaactagacttggggacatgatacaaaggaatttttggacaccgcctcccctcttcacatcttgagctgatcacctacctcgggctctactgggcctacactaccaattggtagatgctctcatcaggctccagacacatcagcttttcctcagttcttcaaacccactaggctctttgcgttctcaggcttgcctgtcacctctgcctggaaactcttgccttattaatcagcttcctccattgagatcatgcagctgtttctcaaatccaaggcctttttctcactgtattaacacacacaatcataaaacatttactgcactctcactagttggctctgtgctatatgctttatttgtgtaatttcactcaattttcacactcatcttttcatgtagacagatgttttgaaaatgatctccactgtacaggtgaggaaagaaaggaggctgcataacttgtccaagttcacacaagtggtggtgccaggattagaacctagttcttcaaaaataagacaaatcgaggccactgctcacacaatactctagtttgggaagtcctgatctaatttcacttatgttccgagattacacctgcactttccaggctatgtccctaatccacaaattcaaatttcatcccctccttccacttgctttctgatggcgggaggcaagggcagagagcatcggagggctattccgaacttccaattctgcctctcccgaggatgcatgtgggaaggagaagaaattcaaacgttagcaacttatctctgagcactgagaaagaggtaacccggtacctaacaagcggctggcagttctggagctgaagccaacaattcccacactgcattagtagcaaaagtgcttaccttaactgccacctccggagccgagtccactgccactgctagagacggctttgatgaaggcgatttagtcaagtgcatgagggagtcggcggctggcagcggacaccgactgctctcactgtccgagtccgattcggaccctgaacccgaaccataggaagcggccagagctgcaatcgcagccgacatgacggcaacaaatcttctgcggagaccctgccagggcggaagaagaagaggctcccaggtcctgacagattgcaatggaacacatcattaactttctttgctaagaaataatgtcttacattttgaaacaataagctaattattattagaataactactgtcgagctgagagcttaaaaaagtttatctagggaaaaagggagaattataatagtttataacatttaggacctagttgactaaagaatatgagttccaaaataccttgaggcctcgcggtcctgcactcccagcgtgcagcgcggcaggaagcgcgagagggcacaatgggaagtgtagtttgcaacgagggggcggaacgggggcgtgtccccctttgaccccgcccccgaatggatgttccattcaattggctatcatcttccctcattccctagccaagcagtgttctcttcgtccccctcccccaaactgaggattgggcaataccacagaacctcaggaaaggggggaagagcgagcttcggccccactaatgggggagtgggcggaggctggatttcccacctcggctgcacctgggcactggaggctgaagaggaaagtgagaatctgaagttttgagacctctgactggcca

SEQ ID NO: 36837 - DNA, 2300 bp, Homo sapien
gaacacagttcctcagtgcagcctatgacaggtatcttaagctctgggacactgagacaggtaagagttcacttatgctaatacacattcatcttacaagttatttatatttgaaatggtgtgagtagtcttttgtggcaaaatggcaccttctctaactgctgattctcataccattcactgtcagcaaatatcacaaaatacatttgtaagtcgaaactgagcatgagtagctctttcactgtgaaacttgtttccaccagatagattttataaagcaaacgtactgacaaataagcaaagtggaaatcttgtataggccatctaattgatttttttgttcccctacatcacctagcactgtgcattgcacataacagaagtgcaataaatgtctaatgaacaaaattaaatgtatttgcgcaaattgattaaaatgtaggtctcaactttcacaggccagttggttttatatattcacagccatactaattgctgtttattaattgattcacattaatatgttgtggctagtataattttatgtaattataaaaattatcttactatcttattgtcttactgtcattacccttactgcatctgaagggtaatgataatagttaatgtttattaaacatcatttaacaggcataattgctaagcactgatattcagtgtctccttcaatcttaatttatccctatgaggtaagtactattattatattatagataaggaaactgaggcttaaagagctaactttttcagggtcacacagctaataagtagcagacttgggttcaaacgaagctctctctgatgccaaagcccatattcttcagcactttagcagtggttctcaattctggccacacattgtaatcatctgaagagctttaatattactgatgcctgagtcctaccttcaaaggtatttatataattggtatggctatagactagatgattgtactgtgtagccaaggctgagagactactattttgcagattcttttaaaaatcaagataaaatacacatacagtaaaatgtatgaagtgcctaaatattcagtgatttttttttttttttttttggtaaacatatctatgcagttgtctaccacaaagatcaagatctagaacatttgcggcactcagtaaaggtttcttatgcccttttccagtctgtgcccactgccagtaaccatagtaaccacttttgtcatcattttcctcttcatttttcctcttcttaaacttcttataaacgaaatcataccattttttctcttttgtttctagctccagcataatatctgagattccctcatggcttgtaccagtagtttgttcttttttattgcttgcactattccattatatgaatgaagttataatttatttattctacaattggtagtaccgatttacttttgaaaaaattatttttaatcattaaaaatctgtgaaaaagaacaaatgtagtttacagtaaagagcaagcaggcagcccttcctcaaaatgtattaagcaggtgacctctagatcttaatctcacagtcatctttaagtggtcaaatttattttacctatttaatttgagtctttggttttaggacagtgtatatcaagatttacaaaccgaaaagtaccttattgtgtcaaattcaatcctgatgaagataagcaaaatctctttgtggctgggatgtctgataagaagattgtgcaagtaagtctttcacagtattttgttaagactcctaagctttatgttgtataaggggatggaataagttaataagctaatattactcatttaatgtttgctacttttagggacggctaatgcaccattcttagcagaaaaatttacatttataaaaatatcgtgttgaagatcttctccttctccactttccagaattatggtctttcataaatccactctacttctgtctttaccttttttcttgcctgatacacagtgggacattcgaagtggagaaattgtgcaggaatatgatcggcatttgggagctgtcaacaccattgtttttgtggatgagaataggagatttgtgagcacatctgatgataaaagcctaagagtttgggaatggtgagtttccatcagtagaaaatctgatttacataaagcaagcagttaaaaattatatagacaaagatgaagcctgataatatgcaaccatttgaatattttttgcaactgtgatcctggcttgccaatcaaactgttttaactatttaagtactgacaatatgcagattaaat

SEQ ID NO: 36838 - DNA, 2300 bp, Homo sapien
tctcttaggacagcctcagttatgctgcaggacagaaacaacatccaaatcttagcagcttaaaaggcaaaagtttgttcttgctcacactacatgtggattgagcatcagcaaggggccagcttgtcatcagggacctaagccgatggagcagctgtcatcctgattgtcatcagcgcatgtgcccaggggcggaggggaggggacctctgaggttctcgcctctgtgattaaacactctggacaggaagcgactttcaacgcttctgatgatggctcattggcagagcaggccacatgtctccaccctcagcaggaggccagaaagtgtgattctatagttcccggaagatggatagcagaagcatgggatgaacagtactgacaactacatgattggcggctctgtctttccactgataacagtaatgactatcaagtcagaaattacttgtaagggaactaaaattatcctaacttctaagcctgtataagaacaattatcaatatgtttgtaatcagtcaatcataattagttaatatgtattaagacctgaagatgcatggatttttttttttttttaagacagagtcttgccctgtcacccaggctggagtgcagtggcacgatcctggctcactgactcactgtaaccttcacctctggggttcaagagattctcatgcctcagcctcctgagtagctgggactacaggcatgagccaccacgcccggctaatttttgtatttttagtagagacaaggttttgccatgttgaccaggctggtctcaaactcctggcctcccaatcctcccactggtggggcatggtggctcacacctgtaatctgctggcatgccccaccaatgcattgatttttgaacatgtccatgcgtcctttcctttctgtattttccacttgaaatgggggaggaagaaaatagcattaaatagaaaccaaaatcacgctgcagtaatgaagtttatactcactgtccccatttcctcatttccactctatttttcctctttaattttattttttattttttatcaaagttatatatgcccatagtttaaaccgtcctcccttctgaagtccttttccctctttctggaaaagttaatatgctggacctcccagactggtcctccaattcttttagctttgtccccctcctatttatctctctctattttactttctgggagacttactcagttttatcttttaccttgctattgaattttttatttctactataacatttctaatattccaaagctcttttttgttctccgaattttcatttgttataacatcttatttgtgttagaagattgcaatgtcctctcttatctttatgaagatactaataacagtttttaaaaactttctccctgaatagtatctgagtatctgtcatctccaaattgtgggaggtttttgtttttgttttttgattttctcatttttcatgatagaggtttttcttggccgtgtggtattctttacctgtctgctgatgtttatgagtggaccctgaacagcagatgggaatttctgagtgtttgcacagggcttgttgccagtgagctcactggagtaagagggcagggccatttatttggggacatctgtgatgtcattcagtttaagtttttcttcttgggcgggtcctgtttcccagggaagagggttccatgtcctgcctggggaagatgaaggcccggatgccagctggcatttgagaaggtgacaggggaagaggctggggtcctagcatccagtttgcatgtgtttccttaacactccttttttcagcacggcatccctgcctttgctggtgctttgtgttttccagtccaaagacccctaagaaagaatagacatatcttttattagggtggtaatagcagcgaccttggcattgcaggtccaggagcttggctggtcagctcctgggaactgcctcccaggaaacaaacacaggcacctggtgtatccaccagatgccagctgatatagtttggctgtatccccacccaaatcacatcttgcattgtagttcccataatccctacgtgtcgtgggaggaacctggtgggaggtagttgaatcatggagacagttaccccatgctgctgttctcatgatagtgagtgatttctcaggagatctgatggttttataaggggctttccccactttgctgagctcagctctcattcttctcttcctgccaccatgtgaagaaggacttgtttgcttccctttccaccacgatcgtaagttt

SEQ ID NO: 36839 - DNA, 2300 bp, Homo sapien
cccaccagtcagaaacccacaacctggggcttgtgattggcatccaaagtagggtaagtcttgtgggactgagcccttaacctgtgggatctgacactatctccaggtagctggtgtcagaattgaattgaattagaggacatgcagctgaagtgtctgctagggaatctgcagaatgggatgcttggtgtgtagggagacaacccccacacacctggtcacagaaagtgttctgtattcagtgactgtgacagtattgagcatagccagagaaaaagttgcttttccccaccaccccctcaccggccctcagaccaccttacaaagaattgtacatatctcaacttatcagagacctacaacaacttgcaagggattcttagttcattctcagttttcagatgggcaatccaactcagaagtcaggtgatttgctcaaggtaaaaatgcaggtctcttgaaaccaaagtttgtgttttggttaagggcttgagctttggctgggcacagtggctcaagcctgtaatcccagcactttgggaagccgaggcgggcagatcacaaggtcaggagatcgagaccatcctggctaacatgttgaaaccccgtctctgctaaaaatacaaaaaattagccaggtgtggtggcgggcgcctgtagtcccagctactagagaagctgaggcaggagaatggcatgaaaccaggaagcagagcttgcagttagctgagatagagccactgcactcccgcctgggtgacagagcgagactccatctcaaaaaaaaaaaaaaaaaaaaaaaagagcttgagccttgacgtcagatatccagactggattttaccatttaagagaccctggacccttccttactgtcttggagcctcaatgtactcatatacaaaatggggatagtgataatagtacctacttcatagggtggttgtgatatatgatgtcatacatgtgtctagcacatggttaatgctacatatacattattgaaaatattattgtcactaatttgacacatcacactgcctccctggaaacaaacttgttaactgtgcctcatgcctagagctcagtagacactcatcaaatattgaatcccttctttgaatatgtgggctaaatcagggatcccaaatccccaggccacagaccactaccagtccgtggcctgttaggaactggcctcacagcaggaggtgagccgtgggtgagcaagcaaagctttgtcttcatttatacccactccctatcatttgcattactgcctgagctctgcctcttgtcagatcagctgaggcactagattcttataggagcacaaacctactgtaaactgcgcacacaagggatccagtttgtgtgctctttatgagaatctaatgcctgatgatctgtcactgcctcccattactttcagagaaaaccatctaattgcaggaaaacaagctcagggctcccactaattctacattatgttgagttgtataattatttcattatatattacaacgaataataataaaaataaagtgcacagtaaatgtaacacacttgaatcatcctgaaaccatctccccatccccagtctgtggaaaaattgtcttccatgaaaccagcccctggtgcctaaaaggctggggactgctgggctaaagaatcatgtggttctatcctagattatctcctgaatagtgtttccagctccaatcaatcaacaacattactcagccctcaccccctccttcctgcttcccccaccagctgacccagcagagccaggcacccggctaactgtgggcagccaaacgaggttggaagttggacaggctcacccattattcaccatacctacaaatcagctggagaaagcccaggctggcggccagacagagggctcgtgggccagaaagggaagggcttggcagagacagcgccatggagatgacaggttgaggtcacttgctcctttctccggggcaatgggtgacagagacagccatgcaggccaatggaaaggaagaccagggggaatgtcctgaatcaagtcaccaatgggaatcagtttcgctttctctctgtctctcagggcatgagaccagccaggcactgggaaacaaggtttggtgccagagattttggtggcttccaagactgctttttcagagacaggtacttgaattcttgctttcagctgaggggtcgttccgtccatgctctgggagtttgggagtgtgtctgaatagggtcaggggacagtgatggacaggccactgtgccaggacaca

SEQ ID NO: 36840 - DNA, 2300 bp, Homo sapien
ctgcaagctggagaactaggaaagctagtggtgtaattcagtcccagactgaaggcctggtgtaagtcttcatctaattccaaaaacccaagaaccaggagctctgatatttgagaaccagagaatatggatgtcccagctcatgcagagaataaatttgctcttccttcacctttttgttttattcaagccctcaagtgattggatgatgcccacctcaactggtgagggtgatctctacttagtctactgattcatacgctaatctcttccagagacactctcacagacacacccagaaataatgttttgccagctatctgggcttcccttaacccagtcaagttaacacataaaattaaccacacagtatgaattcatgtatatttattttatgctttgggatatactatgccatttattttgttgctcaaattgtttcagcttccaactggctgtaggggccagccttacagggtctgtgggtttttctccccatgtgtggagacgagagatcgtagaaataaagacacaagacaaagagacaaaagaaaagacagctgggcctgggggacccctaccaccatgacacagagactggtagtggtcctgaatgtcaggctgcactgttatttattggatacaagacatgggggcagggtaaagagtgtgagccatctccaatgataggtaaggtcacgtgggtcacgtgtccagtggacagggggcccttccctgtttggcaaccgaggcggggagagagagagagagagaggagacagcttatgccattatttctgcatatcagagacttttaatattttcactaattctgctactgctatctagaaggcagagccaggtgtataggatggaacatgaaagcagaccaggagcgtgaccactgaagcacagcatcacagggagatggttaggcctccagataactgcaggcaggcctgactgatgtcaggccctccacaagaggtggtggagtagagtcttctctaaactcccctggggaaagggagactccctttcctggtctgctaagtagcgggtacttttctttggcactgacgctactgctagaccatggtccgcttggtaacgggcatctttccagacactggcattacctctagatcaaggagccctctggtggccctacccgggcataacagaaggttcacactcttgtcttctggtcacttctcaccatgtcccttcagctcctgtctctgtatggcctggtttttcttaggttatggttgtagagctaggattattatagtattgaaataaagagtaattactacaaactaatgattggtgatacttatatataatcatgtctatgatctatatatatctagcataactcttgttattttatatattttattatatggaacagctcgtgctcggtctcttgcctcggcacctgggtggcttgccacccacagctggccactgggaactttttcaggttgctacttgggcccctttcatatgcccttatccttttgttttttgagtatttccttactttatggtattgtaagatattccaggcttattttgtattcttcttttcctggctttagaatcagccactttttctggctcctctcattggagaatggtatttagaaactaagatctgggcaatgggtgtgcttgctgctcttgggatgtcattgcttctaggccttctcagtagatggagctaagtaatatatgtatatatactaacccacagatataaatatgtctataattatttctatatttatccattcgtgtatatgttaagataaacatgatggagacccttcaaatttgcttatgttctttttcagcctatagaccagatataataattagcttttcttctcttgcagattccagagagtcctctatttcatatgtgccttccagaacatctcttgtggtattcactacttggcttctgtgttcatgggagtcacccctcatcatgtctgcaggcccccaggcaatgtgagtcaggttgttttccataatcactctaattggagtttggaggacaccggggccctgttgtcttcaggccagaaagattatgttacggtgcagttgcagaatggtgagatctgggagctctcaaggtgtagcaggaataagagggagaacacatcgagtttgggctatgaatacactggcagtaagaaagagtttccttgtgtggatggctacatatatgaccagaacacatggaaaagcactgcggtgacccagtggaacctggtctgtgaccg

SEQ ID NO: 36841 - DNA, 2300 bp, Homo sapien
actgttggacttctctgagaaagcgataggtgtgctcagattttaaggatgaggtggagaagttcagagagagggcatttgctatggaactgaggctaccaaagtgacgaagagaatgcatccctgttctctaggaactcaaggtttagtggccttatagagtggaatagcacgccaacagtggggccagtgactgccaggctgactagagaaggcaactctcactgtggatatagtcggaaactggcttttctgcttcagcgctgtggaccagcaattgacctttcttccctaaagttcattcacttgataccttccagaaggaaggtcaccccctgcctgggttggctatgggccaaacccctgcccactccaaagtgtggcttggaatgccatggtctgcttattaaaaatcagatttcgggaggccaaggcggtcggatcacgacgtcaggaaatcgaaatcatcctggctaacacggtgaaaccccgtctctactaaaaatacaaaatattagccggacgtggtggcgggcacctccccgctacttgggaggctgaggcaggagaatggtttgaacccgggaggtggagcttgcagtgagccgagattgcaccactgcactccagcctgggcgacagagcgagactccgtctcaaaaaaaaaaaaaaaaaaaaaaaaaaaaaaaaaaaaaaaaatcagattcctgttccccaggcatcctgaatcatcagggatggagtctcaaaataaatgtacatttatttattttttatttttgtatagacgaggtgtcgctatacgttgcccaggctggtctcaaactccttggctccagcaatcctcctgcctcggcctcccaaagcactgggattataggcctgagccaccacgccggcctaattgtacttttatttttttgagacggagtttcactcttgttcctcaggctggagtgcaatggcacgatcttggctcaccgcaacctccgtctccagggttcaagcgattcttctgcctcagcctcccgagtagctgggattacaggcatgtgccaccacgcccggctaattttgtatttttagtggagacggggtttctccatgttggtcaggctagtcttgaactcccgacctcaggtgatccgcccgcctcggcctcccaaagtgctgggattacaggcgtgagcaagtgcgcccggccttaaatgtaccttttaaaccaagttctgcagtagattcttaggcattaaagtttgagagccatgtttctgaggggcgtcatgctgaaggctatatattcttgcggcccccggaccgagcctagcccttgcattcccaccctgggctctctctcagcgacaacttttcccaggcgtcggggcttccctcgagcgtggcgaccccgcagacatggtgccaagagccagggtgggcggcggggcgggtgggagagcggcggcgctgggggcgagggcaccatgcgaccgcgggcgccgggaccacagcgcgccgggaaggaggccgaggcggcaggaaaaaagccgaagatacttggggggaccgaggggccaagcgacggagggaggaacagaatacagcctcgcgctggtcccgagcactgggacgcgcggggagagcaggaggccgggcggggaggttcggggcggggcgcgctacccgcagtccccggagctcggctaactcggcgcccagtgcacggccgcaccatggggtcccgccacttcgaggggatttatgaccacgtggggcacttcggcaggtatgggggaggggccccgcggcgccacgcgggaggcggcgccgaggggtctgtttctttccgttgcggcggggttctcgcgcggcgctcgcgatccgaaaacatctccacttcctcctcaccccgcgcagtcgggacacgggcgtccagacgccggcccctagctgggcttctcctctaggcctctggcagcgggacctggcatggtgagcagaggcgctgggctcgctcggagtgcgcctgttgccgggcaggagggacctggtgcgtgctctccgcggcagcagatgctggaggcatctggctggagatctggctcgaggggccagatctcactcgtagggggtgcctgtgcctggccgcccgtttctctaatccgccgccacttccctagacggctgctgcccagttctgccctgcgcctccgtagggcctccctctgtgcctggcaggtgttccccagggacaaccgttagtcagagttggttgccgtttattaaaacctaatacgtgccag

SEQ ID NO: 36842 - DNA, 2300 bp, Homo sapien
cattcctcacctgaagaacttaggctttcttaagtctctttagttagcaggaaactatctaatttaaaaaccctctccaagttgtttattacttaagggattagtccttccaagagtatttatgtttcagaagagaatgtctagataggattgtgcataacaaaaataagtcaatttttaatggtgttattgtaggctctgtgacaagtaggggagggaagcactttgggaaatggactctcctctctttcaaatattattcaagtacaagtttgcgcctgttactcttctgctttaagactgtctacagggagttctccttgtcctttggtcaaagtaaaatgttcaacacagccttgcaagatcctgccgcttctcggagccatcagacccactcttgatgctctgctctggtagagctctgccctggccctcaaactgttggacttctctgagaaagcgataggtgtgctcagattttaaggatgaggtggagaagttcagagagagggcatttgctatggaactgaggctaccaaagtgacgaagagaatgcatccctgttctctaggaactcaaggtttagtggccttatagagtggaatagcacgccaacagtggggccagtgactgccaggctgactagagaaggcaactctcactgtggatatagtcggaaactggcttttctgcttcagcgctgtggaccagcaattgacctttcttccctaaagttcattcacttgataccttccagaaggaaggtcaccccctgcctgggttggctatgggccaaacccctgcccactccaaagtgtggcttggaatgccatggtctgcttattaaaaatcagatttcgggaggccaaggcggtcggatcacgacgtcaggaaatcgaaatcatcctggctaacacggtgaaaccccgtctctactaaaaatacaaaatattagccggacgtggtggcgggcacctccccgctacttgggaggctgaggcaggagaatggtttgaacccgggaggtggagcttgcagtgagccgagattgcaccactgcactccagcctgggcgacagagcgagactccgtctcaaaaaaaaaaaaaaaaaaaaaaaaaaaaaaaaaaaaaaaaatcagattcctgttccccaggcatcctgaatcatcagggatggagtctcaaaataaatgtacatttatttattttttatttttgtatagacgaggtgtcgctatacgttgcccaggctggtctcaaactccttggctccagcaatcctcctgcctcggcctcccaaagcactgggattataggcctgagccaccacgccggcctaattgtacttttatttttttgagacggagtttcactcttgttcctcaggctggagtgcaatggcacgatcttggctcaccgcaacctccgtctccagggttcaagcgattcttctgcctcagcctcccgagtagctgggattacaggcatgtgccaccacgcccggctaattttgtatttttagtggagacggggtttctccatgttggtcaggctagtcttgaactcccgacctcaggtgatccgcccgcctcggcctcccaaagtgctgggattacaggcgtgagcaagtgcgcccggccttaaatgtaccttttaaaccaagttctgcagtagattcttaggcattaaagtttgagagccatgtttctgaggggcgtcatgctgaaggctatatattcttgcggcccccggaccgagcctagcccttgcattcccaccctgggctctctctcagcgacaacttttcccaggcgtcggggcttccctcgagcgtggcgaccccgcagacatggtgccaagagccagggtgggcggcggggcgggtgggagagcggcggcgctgggggcgagggcaccatgcgaccgcgggcgccgggaccacagcgcgccgggaaggaggccgaggcggcaggaaaaaagccgaagatacttggggggaccgaggggccaagcgacggagggaggaacagaatacagcctcgcgctggtcccgagcactgggacgcgcggggagagcaggaggccgggcggggaggttcggggcggggcgcgctacccgcagtccccggagctcggctaactcggcgcccagtgcacggccgcaccatggggtcccgccacttcgaggggatttatgaccacgtggggcacttcggcaggtatgggggaggggccccgcggcgccacgcgggaggcggcgccgaggggtctgtttctttccgttgcggcggggttctcg

SEQ ID NO: 36843 - DNA, 2300 bp, Homo sapien
aggctggtcttgaactccagacctcgtgatccacccgccttggcctcccaaagtgctgggattacaggtgtgagccactgcacccagcctgaagagactcaaggtctaaggaagttttccaggagtgggtgatgtagcaaataaggtaaatcattccccctcccactagttttccaagtttctttcaaaacctagcaggcagttcactattctttccttatctaccactttgggtagaattgacaattcccttctttgtcctcctaatgaatgtgttatgtcctatcctagcaccaatcatgtttaagtgtgtatcccaaacatttgggacattaggctcaccattacaggggaggaaaccctcttaggttcttcagctggtctataaactaaattgataccagtcaggttaacaggagaaaaagttttaattacgtatgtatgcacaagagtcccacaaaatatgagactcaaagaagggccagatgtttgacacttatattacatcctgacctcaaaaaggaagtggggcccggcatggtggcacggacctgtaatcccagctactcaggagtctgaggcaggaggatccttgagctcaggagttggacgccagcctgggcaacacagcaaggccagtctcttcaaaacaaaagtggggtttggggcttccaggagtggtggagacaagttaagagaggataagaggaaaaaatgtctaaggtgaataaaggttgacttttatgcagataaaagtatctcagatgatacaagttgactagcagcagctctctttctggtaagattcctttaattacgaaaatttcctttagaaatgtaaatttctctttacaaaggaagagttattctttattttaggcagtagtgggataagtgaagcattttcctgtgttggctggatcttaatttattttgctaaaagacatcaatatgccagagtggcgtattttggggtggcatattctggactccttcagttataatttggggtagtgtgtcctgagccccaacacaatgaaatcaatcaacgttcaccctaactaaaggggctttcttaaacattctagaacctcacatcatgcatagaccataaaaaatcctttacaattcaacccaaaggatcgtaaacgcggcttcctccaggcacttttaattgtccttagacagatggccaaagcctggttatgggaaccgcatatgctaagagaaagctgactacagcgccaagaaaatgatgattggctgctggggctcagaagttgcatgttctcctctggccaaggcaggctctaggaaactgctgaaggttcagtttttgaaatacggtttttgcatcgtaaagaaaaaagatcaacctatcaggaagaaccgagcacatccaatcaccaatcaagagcgggaaagaagccaaagcctggggatacccacgcaccaacgaggacgtcattctccagcccccgccaatgagcagcgggacggggggcggggcaataggcggacccactgccctagaaaagaaacaagctgcggtacaactgtcctcaccagccctcgcctcccgagtcactgcagccaacccttcagcaaggtgctgatttaatgctttccatactctctgcgtggggctagttacagtgaagtatccccttcccactagagtaaggcacttctttccagtgtctccccgagaaccgcagaaagcacactggaacttcgagctttctaccttcacaggaaccgggagccgtgcgctacctgagggggaggggcggccctggtacgcaggcgcgcatgctttgtgggggcgaggctgtggtggcccgaggtaacctgggagctgtatttcttacgccggcaaaaccgcccaggccgctgaggccttcgcgacttcatttcccaggagcctccgcgaccatggggcgggccagtgagttcgctaatgagctcgaggaagccacggcgcggcccaccaggttccaaaacaaggaaatgaaggagggaggcgggactgggggtgcctgcgggagccgccgccgccgtcgcggaggaggaggaggaagaggtggaggaggtggctgctgtggccgccgaggagtcccttgctgaaggcggaccgcggagcggcgggcggcgggcggcgcgcgcgcgcgcgcgagaggcggctgttggagaagtggagcggcggtcgcggggggaggaggaggagggactgagcggcggcggcccccgcgtcccgtgcctctatgggggaagcagacaatggattatgatttcaaggc

SEQ ID NO: 36844 - DNA, 2300 bp, Homo sapien
ttttttcaggtttaattccccaatggaaaaagactaatttttttcctgctatctccagcagttattatagtgcatggcaacaagagcaactgagatttttcttgattaaagataccatttttttttgagtcggggtcttgctctgttgcccaggctggagtgcagtggcatggtctcagctcactgcaacttctgcctcccgggttcaagggattctcctgcctcagcctcccgagtaaatgggactacagacacatgctaccacacctggctaatttttgcatttttaataagaggcagggtttcactgtcttggccaggctggtcttgaactccagacctcgtgatccacccgccttggcctcccaaagtgctgggattacaggtgtgagccactgcacccagcctgaagagactcaaggtctaaggaagttttccaggagtgggtgatgtagcaaataaggtaaatcattccccctcccactagttttccaagtttctttcaaaacctagcaggcagttcactattctttccttatctaccactttgggtagaattgacaattcccttctttgtcctcctaatgaatgtgttatgtcctatcctagcaccaatcatgtttaagtgtgtatcccaaacatttgggacattaggctcaccattacaggggaggaaaccctcttaggttcttcagctggtctataaactaaattgataccagtcaggttaacaggagaaaaagttttaattacgtatgtatgcacaagagtcccacaaaatatgagactcaaagaagggccagatgtttgacacttatattacatcctgacctcaaaaaggaagtggggcccggcatggtggcacggacctgtaatcccagctactcaggagtctgaggcaggaggatccttgagctcaggagttggacgccagcctgggcaacacagcaaggccagtctcttcaaaacaaaagtggggtttggggcttccaggagtggtggagacaagttaagagaggataagaggaaaaaatgtctaaggtgaataaaggttgacttttatgcagataaaagtatctcagatgatacaagttgactagcagcagctctctttctggtaagattcctttaattacgaaaatttcctttagaaatgtaaatttctctttacaaaggaagagttattctttattttaggcagtagtgggataagtgaagcattttcctgtgttggctggatcttaatttattttgctaaaagacatcaatatgccagagtggcgtattttggggtggcatattctggactccttcagttataatttggggtagtgtgtcctgagccccaacacaatgaaatcaatcaacgttcaccctaactaaaggggctttcttaaacattctagaacctcacatcatgcatagaccataaaaaatcctttacaattcaacccaaaggatcgtaaacgcggcttcctccaggcacttttaattgtccttagacagatggccaaagcctggttatgggaaccgcatatgctaagagaaagctgactacagcgccaagaaaatgatgattggctgctggggctcagaagttgcatgttctcctctggccaaggcaggctctaggaaactgctgaaggttcagtttttgaaatacggtttttgcatcgtaaagaaaaaagatcaacctatcaggaagaaccgagcacatccaatcaccaatcaagagcgggaaagaagccaaagcctggggatacccacgcaccaacgaggacgtcattctccagcccccgccaatgagcagcgggacggggggcggggcaataggcggacccactgccctagaaaagaaacaagctgcggtacaactgtcctcaccagccctcgcctcccgagtcactgcagccaacccttcagcaaggtgctgatttaatgctttccatactctctgcgtggggctagttacagtgaagtatccccttcccactagagtaaggcacttctttccagtgtctccccgagaaccgcagaaagcacactggaacttcgagctttctaccttcacaggaaccgggagccgtgcgctacctgagggggaggggcggccctggtacgcaggcgcgcatgctttgtgggggcgaggctgtggtggcccgaggtaacctgggagctgtatttcttacgccggcaaaaccgcccaggccgctgaggccttcgcgacttcatttcccaggagcctccgcgaccatggggcgggccagtgagttcgctaatgagctcgaggaagccacggc

SEQ ID NO: 36845 - DNA, 2300 bp, Homo sapien
aacaagaaaaatgatatattttacaaaggaccaatccagttggtagactatttaaattatcctatatcaaattaataaggatttactttgccaagattcttggcacttttatattaacttaaattgcactgggaaaaaagcataatagtagttgagaagcaactaattataagcaattataagccaaattatgtttataccacaattagtgtttgaggtggtttagtaggcagattcttcagtaagaaccatcaaataattgaacagcttgtaaaacacagaaatacttcttttatctttattccaagtagagtaaccacattcttttatcattataaaataagcaacatttattatcttttgtcccaatccgcagtttgagttggatgcttataaaacatggcaagagggctgggtgcggtggcctcccagcactttgggaggccgaagtgggcagatcacctgaggtcaggagttcaagacaagcctggcaaacatggtgaaacctcgtctctactaaaatacaaaaattggccgggtgtgttggcatgcacctgtaatcccagctactcgggaggctaaggcaggagaatcgcttgaacccaggaggcagaggttgcagtgagccgagatcacgccactgaactccagcctgggcaacagagcgagactccgtctcagacaaacaaaacaaagcaagagtagtttatgtacctagctcacaacatagcttctttcaacaggtttcacggagacacgtgaaccacgttcttgtaagacaagagctattctacagggtatctagagtgcaaacccaaaccatgtctttttcagtggatttttcatgttgacatcatcttatttcactttggggaaagtttttttctaaggatgatagcgaaaagtccttttgtcttgtgacaatagcaatttttatgtcagcttgggtttttttcctcccatattcccaagtaaaagtaataactttgttaccagttttgccatctgaggttaaactgtttgaccatggcttgacgactattttatacttaacacttataaaatattagactgatagttatttaagttaccaccagtgatagctctggaatccctgttttattaatttccaggtaaatccttcttaagcacatgggaagatagcactgtaaattttggggggtaaggagaacctccatcaattaatacatcagcttgataaaattcaaagaaaaacatgatcaaataagttcagattatatttaacacattcagtttctagaagtagttttgctgaataaattcccaccagttgagctaatggagcaacggagctgccagtgcttcccggaggctgctgtgctcagccaattcggaggcatggcgagccacacggtgggaggtgggtaaagccggggccctccaaggctgggcgccacgttgcttttctcttctgaaataggaagacaatgcttctggctattgtataaaccagccgaggactgctttcattcgcacatcagccaaggcgtgagcagaattaaagcgccttctaattcgacccctggcaacgtgcgcgtcacggacaaatgtttagttttaacgcctggctgcgttcgccttgggaaaacacacttttaagaatggccaagtacctcagcagtcgcggtgaactgcacaagatcaaaaccaccacgccaacccagcgctggccaccgtccccgctgaaccccgccaacacccctaaggacccacccatgttttctgctaatcattttttttttctaaacagctctgcacagcctttcctcattccgttcccgctctccccacccactctgcgttcgatccgaggtttctagtccccagctggacatcacagcaccaactcccactcaggagccggccagagcccgagccgcagcgcagtgggcagctccccgcgctctccgccaggccctcggccagccagccgccactcggccgcgagtgattgacaggcggcagcagctataggccgtggaggtgggacgatgcgtcacttcctggtcttttggggggagccgggatatataagggcggtgctcacgcagcgctctcgcttacacagtatggccggcgacattagctagcgctcgctctactctctctaacgggaaagcagcggaatacaagagactgaactgtatctgcctctatttccaaaagactcacgttcaactttcgctcacacaaagccgggaaaattttattagtcctttttttaaaaaaagttaatataaaattatagcaaaaaaaaa

SEQ ID NO: 36846 - DNA, 2300 bp, Homo sapien
ggactccagcctgggtgacagagcaagactcagtctcaaaaaaaaaaaaaaaaagatttgccatttttatgagtgtagagcaatggcctgtcagatatcataaggcttaaaaatttttcttctttttttaaagaccagggtattactctatcgcccagcctggtctcaaactcctgagcttaagccatcccaatcccaaagtgctaggattacaggcgattctcctgcctcagcctcagcctcctgagtagctgagattataagcacctgccaccacgcccggctaatttttgtatttttagtagaaacagggtttcaccatgttggtcaggctggtctcaaactcctgacctcaagtgatccaccgccttggcctcccaaagtgctgggattacaggcgtgaaccaccacgcctggcctaaaaaatatttctggcaaacagctgggcatggtggcacatgcctgtggttctagctacctgagagactaaggcaagagaattgcttgagcctgggaggtcaaggccgaagtgagctgtgattgcaccactgcacttcaacctgggcgacagagtgagaccctgtctcaaaaaataatatctgtcatgttaagctgttccatggaattacattgtctttttataatgggcacactaatgaaagaatgaacactttcctaattctattctcaggcaaattaagactagtttcttcatgtccatatgaccttcattgctatggttgcttgtactgcacatttcctgttaaacgggctttctcattgcatttggagagctgcgtagtattcccaaaatcttctaggtatgcttgtaattggcagtcattccagttttttgtgagtgctataagagtaacatcactcactgtgtcccgacagacaggcttttaaatttctatgccaattagattggtaaaattatgctcttctttttttttaagtgtttcttaaggttaaaaatctgcacattttatagacaaagtatcccattgaatttctgtaatcattgattagttaatggtttaccttggtttatggacctttgaacatttttttgcctatttttctttaagtaatttgtaaatacatagtataatgaccaatttttgtttcatatatagcataatatacctatcatttatctgggtgtgtcaatatagattattttgaaagaaactaaaagttggtgtacaatattaattaaaaatgtggtcttcatgagaaaaagtgtgagctttgtaatttttatgagtaggtgggtactattgtggattaatcgtaacttttttgttaaatgatagatctgagtgggacatacttttgaaggatgtgcaatgttcaatcataagtgtgacaaaaactgacaagcaggaagcttatgtactcaggtaagtcctgtaaaacaagtgttaggtagctaatttcagtcctaatcataatgtgaaacagttaagttcctctcagttgtagttctgggggtttttttgttttgttttgtttttttgagacggagtttcagtcacccaggctggagtgcaatggcgccatgtcagctcactgcaacctccgcctccttggttcaagcaattctccggcctaagcctcctgaggagctgggattacaggcaccttccatcatgcccggctaatttttgtatttttagtagagacggggtttcaccatgttggccaggctggtcttgaactcctgacctcaggtgatccatccacctcggcctcccaaagtgctgggattatacacgtgagccaccgcgcccagccttttttttacattattcttaaaaatatggtataaaaggaaacatttagtgtaacgtggatgtttctaggacataggttttgaagcctcaccggacagttcaaggtgtttgccgtcttttcctcccaattggtaaagaaggacctcttaattagaagttcaggcaaagggaaagttagcttctctatacaaatacagttgtctaattggtatataaaagctcatcaccttttttgtagttgcagagttaatttattccataaatacttttaatgcttatagtatatattgtgatgggccttgctgggggatactggactaaacagcccctccccccctttttttttctgaggcggagtctcagtctgtccaggctggagtgcattggcgcaatctcctctcactgcaacctctgccgcccaggttcaagcgattttcttgcctcagcctcccaagtagctggtattacaggcgcctgccactgtgcccggctaatttttgt

SEQ ID NO: 36847 - DNA, 2300 bp, Homo sapien
ggatgttttgtatactagaaaaggaaaagaataatgtgttacttgcttccttgagatcctaatatttaaaagtactagccaaaattgtaaatgataattaaattggttgattgcaccctcagtagtacattagtattgttataatattgtgacttttttcaactgcagtgagagtagcatgtttgtctccaagagacgtttcattttgaagacatgtggtaccaccctcttgctgaaagcactggttcccctgttgaagcttgctagggattacagtgggtttgactcaattcaagtaagtaagcaaacatttaaatatttttcaggcataaatgttagcgttcttatcctgtaatatgcgaagtaaataaatttatatacttactgcctttgttacaatgcatgcaaacacgtggtaaggtgttcataccttaggaagagatctgattctcaagaacagcagaaaataggaagcagagaatgagttaggatgaaattcaaatgggagaaagaaatgaagaagccagacacttccagtagttaatttcttaacatggctacttataataatagagaaatggtaagaaaagaaggaaaagcaagaaaaatgtcgttactgaaattgtccagtctttataatgaagagttaggatgaagagcaacagtcagtattgagttaaattcttatacttttcaagaactaaggtgtttttacctagggtataattttctgattagcagttgttacattttatttattttttatttttttgagatggagtttcgctcttgtttcccaggctggaatgcaatagcacgatctcagctcactgcaatctgcacctcccaggttcaagtgattctcctgcctcagcctcccaagtagctgggatcacaggtgcccaccaccatgcctggctaattttttttgtatttttagtagagacggtgtttcaccatgttggccaggctggtctcttaactcctgacctcaggtgttccacccacctcagtctcctaaagtgctgggattgcaggcgtgagccactgcacccggcctgaattttaatctttaacttcataaggaaaggatggattgtcattagtactcaatacagtttttgttgttatgaattgatccttgtaagaaatctaaagcaatgtgtgcttaaccgatgcttaaaactaatatgttattccccccaaatttttgcttatatgactattaataagctcagtttagaaactactgttctagaaaggaatatacttggtgttaatagttgttatgacccatcatcactagactgggctttttaaaaaaaagagagagagagagagatggggcctcagtatgttgcccaggctggactcctgggccaagtgatcctcctgcctcctaatagcgagactacaggcatatgctaccatgccaagctaaaatatttgagttttgattttgccgagtttttgatatgtggacaatagttgattagcttcgaaaagtgatagaattctacatctaaagtcatctttttttttctttcttttcttttttaataaagagcttcttttattctcgtaagaatttcatgaagccttctcaccaagggtacccacaccggaatttccaggaagaaatagagtttcttaatgcaattttcccaagtaagtttaaataaaatataaacctgttgtcttcttaaagatagaaagtgcaacctcagagatctttctatatgagagcatacttatgcatatatagcattctacacacactaatacttgcttttcttgtgggttttttggtttgttttagacaggggtctcattctgtcacccatgctggtgcagtggtgtgatcacagctcactgcagcctcaacatcccaggcttaagtgatcctcccaccttagcctcccaagtagctggggctacagatgtttgccaccccacctggctaatttttttttaatttttagtaaagacaaggttttgccatattgcccaggccggtcttgaacgcctgggctcaagggatccacctgccttggcctcccaaagtgctaggattacaagtgtgagttactgcacctggtccatatttactttgacttagatgttttgggagtacagtagtgatctttatatagcttgtaattcaaaatatgcagaatttataaagaacattaaaatatcagataaaatatttttagttaagattaatagcttattgcaaattatgtatacacatgtaaaaataattgtgtatcataaatcagtgctgtttaaatgatgga

SEQ ID NO: 36848 - DNA, 2300 bp, Homo sapien
tattaaattgctgccagaattttacatccagttacctccactttctagaacatattctttactaatgttattgaaaccaatttctacttcatactgatgtttttggaaacagcaattaaagtttttcttccatgagttgagtccttaagaaaatgattccagttactcattttgcatatttgctattttaacattattggaccctgcatttatagtcctttgatttcttccctctccctggtgtctcccccaagaccccaaataaagcaatacactgttaacactgtgggtttatatactaattctataccccagatggggaatgggggagatggtccctgggcttaatattctttaaagggcatgggaatttagcctctcttttattgtaatgtgctcttttggaaaatagttggttagcagggaagacccagagttgtagattgagattagggtgtactggctgaactgtggaaaacatacaattctgtgttcctcagtaaatgagattagcgtctaatgagtagcacccctttactaacttagtagtagtataaaatcatttttatttagttaattaccagagagatttagcataattttgttctggattcagtaaatcaagtcagcttggatcattcaccttaacttttcctttagcagccatttccactagtttccattaagtagtgttctataaactttgatccaaagcagaatcaatgtcttttccatctcgtgacttaaagttctgtgactgtgatgcatgtgagtgttccgacttcatctgttcctcttaactacggtgtttcccttaccatggcattcataggatgaaatgaatgactgcccagaatgagaatttgtccagattattcagataaacatcataaagcagaatacattataaataagtagaatatgaataaatagaataataaaattccaaaatactcaatgggaaatgactagtaatataggctttcaagagttggtaccttttagctatatttgcagattctctgggattttaaggaactgagaaaacagcaaagttgactaaattttatatttcttgtcctctaaatattttgataatttctggattgatgcagtgatgtttttgttccttccgtatttataaatgaaacacctttttttagtgtttctaaacctaaaatctacttggtttgaaatcaagtggttggaacactgtttgacttttatttgaagcatgttgttgattgaaaatttcattgaggaagttttcaatcagtgtgatcagtttgattctgtaatgagcacagcacctaatattttgaggagctctgttttgaggaccaatgcttaaggtggactttgttcgtaaacaatatcccaatagatttgttgacttgaggtctggtttggttttgtttttgttttgttttgttttgttttgtttccaatagaattaagaattctaatgttgaaaaactgcacaaatttttatgggacaaagcctagaaaagagaaatgtagtttgaatcataatctaaatcatcgtatgatagaagagggaaagttttggtgccataatttctcctttcactggtgttggacttaaatcagttgaaatgtatttctgtaccacaatttacgcttcaataaaagtttaattgtctagtgacattcagaaacttttctgttgccctgttttttaagtagcctacttgaccaaatactacatgtctgaagtttaaaatcaatacaacaatgtgtatttatgagtttggagttagacagaagtttaaaagtgttaggtcccaacctttattatagactagactcttaaaacattggttgaggatgatcaaactcaaataagtttccttatttcattcatggttatttctattaagtagaaaaaaatttataaccttgatcattttctttattttttttaatttaggatcttgttctgttgtctaggctggagtgccgtggctgttaacaggtgcgatcatagcatactgcttccttgaactcctaggctcaagcagtcttgctgcagcttcccaagtagctgggaatgcagggttctgccatcacacttggctttgtcattttctttatttggcaacattttagttccacagtcaaatatgtaataagctgaaaaatcttatgaaaatgtatattctgatctttctcagaatatgcttccgttagaaaatatttcctcaattttcattaaaaacagatggtgttcctagaaaagcaaaatattacatatctgtgcaatatgtaattcacaagat

SEQ ID NO: 36849 - DNA, 2300 bp, Homo sapien
gggacatcttgagttataacacactaacctttcaaaacacacatattttcattcctcaagcctttgtttctgctgttccctcagcttggattatccactcctccttactctccccacatctccctcaaaatctgacaatttatgtaatttttcagtttaccaagtatttttagatatacgattgaatttttgctttccaagcaaaaaagacacagtaagtattattattattttttgagacggagtcttgctctgtcggccaggctggagtgcagtggcacaatcttggctcactgcaagctccgcctcccgggttcacgccattctcctgcctcagcctccggagtagctgggactacaggtgcacaccaccatgcccagctaatttttttgtgtttttagtagggacagggtttcatcgtgttagccagaatggtctcaatctcctgaccttgtgatccgcccgcctcagcatcctaaagtgctgggattacaggcttgagacaccgcacccggtgttaagtataattattttcatcctcatataataaataagaaaactgaggttggaaaacttcacaattattaagcttcagagctagaattgaaatgtacttctaacaggtccagtgttccttctacttttttaagctatgaaatcctatacatttaattaggcaactggacaaaaatatacacaaaagagtgttatttacaatatccacaaattgtaaataacctatgtgttaaaaaatagaggatcaagttatggcacactcatacaaccattatgtaaagacaggcgctgtggcgtgcacctgtagtcccagttactcaggaagcagaggtaggaggctccctttgagcccaggagtttgagggtacagggagctacgatggcgccactgcactccaggctgggcgacagagccagaccctgtcacaaaaaagaaaggaaagaaagagagaaagaaagaaacaaacaatgaataaaagaaagagagaaagagcatcatactaaaaaatttatatattactactaataatagattaaatgcactttaaatgcttactatgtgctgaatactgggctaaatttattttatatgtattgtctcatttaatcctcacaaccaccaatctgcccaaagccttgctgttaataatgcagcagaacttgactggtattaaaatccaaagctcaggctggggacggtggctcacacctgtaatcccagcattttgggaggcccaggcagggggatcgcctgaggtcgggagttcgagaccagcctgaccaacatggagaaaccccgtctctactaaaaataacagaattcgccgggcgtggtggcgcatgcctataatcccagctactcgggaggctgaggcaggagaatcgcttgaacccgggaggtggaggctgcagtgagccgagattgcaccattgcactccagcctgggtaacaagagcaaaactccatctccaaataaataaataaataaaaatccaaaactcacgatcttaaccactagatcacgctatcgcaagtacgaagaccgtttctttcacaatcacaaacatctatgggatacttctgaaaattctgttcaaacttctcttgcccaggtctctgtgttcctataacaatgtgtatctcttacagcacttgcttggatccatttatgtacctctcacagatcttatgctcctgcaggcctgaaacttaagcccactttctatttttcatagctcctggtgcagtgctttttactgtgtaggcgctcattagtattaaactgaatgtgcctttaacttggcttggggtacgttgaattgaggatgagcgctcacacaatattaagaatttctttccaagaaatgtgctcgggtcaaacacaaggcctttctgtccatgatccgcctgaaaccatggtttccttgttttcgcctttatcccttctgccttgccagtcctccccgccagcggggccgagagcccggcgactcttgcgtgaccgagcgggctccgctgcctacggcagcccacccccagcccctgctctgaggcaccgagaaacgaggaggcccgtggcgagtctccacgtgggtaccggcgctctcggcgcccgtagccacccgcccgccggaagccgacatctcgagttctggcagaagcaatttgcgcggcgaggagcggagcggcaggaacccaataagctgcttcgcctcggagctgaagcccgtactcaagatggcggctccgggcgggcgtggccagtgactagaaggcgaggcg

SEQ ID NO: 36850 - DNA, 2300 bp, Homo sapien
tttagtagagatcgggtttcatggtgttagccaggatggtcttgatctcctgacctcatgatccgcccacctcagccttccaaagtgctgggtacaggtgtgagccactgcttccggcctacattttagacctgcaaaactgatttcagacttctgacttcctgaagtataaaataataaatgtgtgataatttgttacaacagaaataggaaactaataccaaactctcttacattgctcatgggaatttaagtggtgcaggtgctttggaaaacagtttaccagtgcctcaaaatgttacacttaagagtcagcatatgacccagcaatttttctcctagagaattgaaaatgtatgtccacacaaaaatttgtacactaatattcaaagcagctgggtgtggtggcacgcgcttgtggtcccagctactcgagaggctgaagcactagaatcacttgaacccaggagatggaggttgcagtaacctgagattgcatcactgcactccagcctgtgtgacagagtgagactctgtctcagaaacaaaacaaagcaaagcaaaacaaaacaaaaaaacacaaagcagcataatccataatagccaaaaaataggaaccattcaaatgtacataagctgccgggtacagtagctcacgcctgtattcctagcactttgagaggccaaggcgggtggattacctgagctcagaagttcaagaccagcctggccaacatggtgaaaccctgtctctactaaaaaatacaaaagttagcaaggtgtggtggtgcgtgcatgtaatcccagctacttgggaggctgaggcagaactgcttgaacccgggaggtggacggcgcagtaagccaagatcgcaccactgcacttcagccctggcgacagagcaagactatgtctaaaataaaaaaagtacctaggttgataaatggataaacaaaatgtggtatatccatacaaaggaatattattcagtcctaacaaaatggaagtactgatccacgctacatgtatgaacctcaaaaagatagtgaaagaagtcaaacacaaaaggccatacgttgcacgaaaccatttatatatgttcagaataggcaaatccattgaacataaagtagattattggttgccaagggctggcaggagggggaagtggggcatggactgctactgggtgtgtgtgtcaggggggttctttttgaggtgattaaatattctggaattagtggtgatatttgcacatctttgtgaatacaccaaaaatcactgaattgtacactgtaaaggggtacattttatggtatgtgaagtatatggtaacttaaaaactggggaaaaatcacgaacagcagtacattttctgcgcatcttttatgtactaggcaactgtggtagtcataaattctgtcacacagatcgcatagttgtcaatagtgcccctttcacatcaatgtttttagtgcttatgtgagtacctaccgtgcaatcaatcaacctttctagcatcctgggattccttgaagaataaaatctggtttctgaatacctgactccaggtatgcacactagcgcgtacatcaaactgcgagggtctatgttattttattttatttttattttatttttgagacgaagtctcgctctgtcacccaggctggagtgcagtggcgcgatctccgctcactgcaacctccgcctcccgggttcaagcagttctccctgcctcagcctcccgagtagctggggttagaggcgcccgccaccacgcccggctaatttttgtatttttagtagagacggggtttcgccatgttggccaggctggtctcgaactcctgttatcaggtaatccgcccgcctgggcctcccaaaatcctgggattacaggcgtgagccaccacgcccggccagtgttacttaaaagtattacctcgcacctgtaactccaggaaagagccggggcaaaaatccgtaaccaagacaacagggcgcgattccaatcaagatggccgccagcgcctctagacgccctctacgaggccgtccccggaagtggcgttacgcgcagcttccggttccgcctgttccggcgcacgtaatcgccgagggcacgtgcatgccccctggttaagagttgcaggtagcggtagcgatggacactctggatcgagtagtgtaagtgcgctgggtctcagccccggggagcgttggggtgaaagggtcccgtgatgagggtggtactgtctcggcctctcactcttcctggttacccctctaattacct

SEQ ID NO: 36851 - DNA, 2300 bp, Homo sapien
gctgattctttaaaaataccaacaaaatggacaaaaccttagcaaggctgaccaagaaaaaaagactcaattaccaaatccagaattgaaagagggctcattactactaatctcacagaaataaaaattgtaaggcagccaggcaaggtggctcatgcctgtaatcccagcactttgggaggccgaggtgggtggatcacctgaggtcagtagttcaaaaccagcctgaccaacatggtgaaaccccgtctctactaaaaatacaaaatcagccaggcgtggtggtgcacacctgtaatcccagctgttctggaggctgttggcaggagaatcacttgaacccgggaggcagaggttgcagttagccaagattgcaccactgcactccggcctgggcaacagagagagatcctgtctcaaaataataataataataataataataaattataagggaatactatgaacaactgtatgccaacatattacataatataatttagatgaaatgaacacattcctcaaaagacacaaactaccaaacctgattcaagaaagaatggaaaatctgagtatacctataacaactaaacaggctgaattaatagtaaaataaaagaaaagtctgagcttcactggtgaattataccaagcatttaaaaaagaaataataccactatggtgctattctatgatagtattatggcatggcgattcctcaaaattagaaataggattaccatataatctggaaaatctacttctggatatatatccaaaagaatggaaagcatgttctcaaagatatatttcttgttcatagcagcaatattcacaatagtcaaaagatggaagcagccaaagtgtccgtcgaaagatgaatggataaacaaaacgtgatgtatacctacaatggaatattactcagccttaaaaaggaggaaaattctgatgcatggtataacatgaatgatccttgaggacattatgctaatgtgagataaaccaatcacacaaagataaatactgtacgattccacttatacgaggtacgtaagagcagtcagaatcataggaacaaagccaggtatgcatctaaagtctgaggtacttgggaggctaaggcagaaggactgcttgagcatgagttcgaggctatggtgcactatgattgtgcctgagaataaccactgcactctagattgggcgacatagtgagatcttgtctcaaaacaatttttttaattatagaaacagaaaatagaacagtggttactaggagcagggagaaggggaaatgggaggttgtttaataggtatagagtttccattttgcaagataaaaaagttctgggccaggtgcggtgctcgtgcttgtaatcccagcactttggaagactgaggcaggtggatcacctgaggtcaggagttcaagaccagcctggctaacatggtgaaaccccatctctactaaaaatacaacattagctgggcatggtagagcatgcctgtaatcccagctacttgggaggctgaggcaggagaactgctggaacccgggaggcggaggttgcagtgagctgagatcgtgccattgcattccagcctgggtgacaacagtgagactccgcctcaaaaaaaaaaaaagttctggaagctggttgcacatcaatgtgaatatacttatcactactaaattgtaaacttaaaaatggttaagatagaaatttttatattagtgtattttaccacaatttttaaaagataaatgatacaaattcttcacaaactctttcaaaatatagaagaaaagggaacatttcccaactcattctatgaggctggtattaccctgatacccaaaccaaagacaccacaagaaagctacagactaatatctcttacaaataagatgcaaaatcctcaaaaaaatattaggaagtagaatttggcaacatgtaaaatggattatacaccacgatcaagtggaatttatcccaggaatgcaagattgttttaacatccaagagtaaattgacgtaacacaccacatcgatagagtaaatgggcctttctgcagaatccacaccgaccagcaccatgcccgtgacactggggtactgggacatctgagggctggcccacgccgtctgcctgctcctgcaatacacagacttaagctatgaggaaaagaagtacatgatgggggacgctcctgactatgacagaagccagtggctgaatgaaaaattcaagctgggcctggactttcccaatctgccctacttgattgatggggc

SEQ ID NO: 36852 - DNA, 2300 bp, Homo sapien
ctgggattacaggcccacgccactatgcctggctaatttttgtatttttggtagagatggggtttcgccatattggccaggctggtctcgaactcctgacctcaagtgatccgcccgcctcggcctcccaaagtgctgggattaccagcatgagccacgacacccagccctcttagactcttttttactgtgacagtttctcagactttccttgtttttgatgacttttacagtaatgaaagtacttaatgggtattttgtagactgtccttgattgggatttgtctaatgtttttctgatggttagccagggattatgggttttggcaggaagaccacagaggtaaagtaccattttcatcacatcatatcggggatacattatcatctagttgaggtactgtgtgccattttttgcaccctaaagttatttcttccccccactccccctttccatcctatactctttggaagaaagttactacgcatacccacacttaaagagtaaaccattgtacttcacctccatgagggagggagtatgttcataaagtatttacatttcctgcaggagagatttgtctattctctcctcattatttatttaatcatttacttacatcagtactgactcgtggataattcttacatatgtgtttgtttgtgtgcatgcaaatatataatcgatgtgctttctttgcccaataatatgttgtggacaactttcaaagtcaataaatacagatgaccttcagaacttttagaggttttaaagtaagtatctaatcagtcttctaccaatgtacattatacttccaaattttccttatttccaacaatactggggtatcatcttcatacatacatttttgtgcacttatgtgcctattcctttgtttactattttaccctcatttctaaggcagattacacttgagctatgttccccattccacaaccaagcacggcttgctttccttagtttatgctattttctctacctggaatgctcttttcctgtcttgacccactgaagtcgtatgtatgaatcagggcttcggccaaaggctgtttgctgtagaggctcttctacagtgtttggagagaatttaagggactatctcatctctctcttttgtacatgtattataacacatcatctgagcctcctagtctctcccaggactcttttttcctaccagtttatcaactgataagaggcagaaacgagatcaatcgcactcatctgtgtactctatcacagtggtgggcacatcaagtaactagcatattttgactttgattgaagtgaagaatacgaataacagaaattaagaagcatcctcaatattgcatagcaggttactcttcttttcttttacataggatggcactccatgcttcagggagacagaggagttgaatacaggttttagtttttgtttaaagtgaaaacgactctgatgtagttgaaaagtaatgctttctagctgtctgttaaaaatgtttgttggttgaagacttcggaattgcagtccagtgaggactgaaaataagcatctttggtgtgccaaatattcataaggaaattgtatacgaatgcaagagaatggaactgaagtaataaaataagggctctgatccttcagatgacttatttaagaagccaggtggcataacgaatcttacatattataattagtactgagaggtgaatgccaaaacataaaacaaacacaatcgagacaatgttagtgtgactgtgacgctgtgtcggtgagttgaggctaacgatccagtgtggctctcctgaaggcccaccgcgcccgcacctaggagacgcgccccttctgctcatgctttgaggcggggtgacccacacatctgtgcccctctctgagcaggaggaggccccgtcgcagacgcgcgcgcagacagcgtctgccgcgggcacctggggccgcgcgccgcggggcgccccgcctccgctctccgaggcccaatcatctggaggctgtgggggcacgtcccgctcccggccacgcccccagccggcggggcggggggtgcttttaagaaccggcggctggcagtgggctcagtcgggggtgcggggctgtgacctagaggcttcagtgtcgatccccgaggtgttcgcgcgcgccagctgtcctcgcggccgcctgcgcgctggccgcctgcgcgctgccagcccgcccgcccgccaggggctccgccgccctcgcctcggcctcgttagcccgccaggagccccgcagctcctccgggagcccgctggt

SEQ ID NO: 36853 - DNA, 2300 bp, Homo sapien
acattgcacttatttggctgccaaacgtcacaaactggaaccatgtgttactgaagggaaaacctggaagtgaaaagggttcagcagtagtgcaaataccatcataaagctcatatacttcactctgcaggagggagaagctctgtggttttccaactgagagcattacagtacagtgataccactgtacaggaactgatgttcctgatgattctgctgtgaacagtatttttaatatacactttgaagaaggcagagagaaatgtataatagacttaaatttttttctttaaaattgttaaataaaaacaaataagcactttaagtaagttacaattatctggaaaactacttaggtggaaaaactgatacagaatgaatgaagtattaatttctgttttgttctgtgttattattatttgggatagatgtcttgtttctttaagcagactatgaatatcttgaaggcagaaccacattttttttttttttgagacagggtctcactattactcaggccagaatgcagtggtgttatcatagctgactgcagcctggattcctgggttcaagccgtcctcctgccccagcttcctgagtagctaggactacaggcatgtgccatcacacccagctaatttcagctattttttttttttttaaatagagatggggttttgctatgttgccagactggtctcaagccatcctcctgccttggccacccaaagtgttgggattacaggtgtgagccaccacgtctggccaaggaccagatttttaatattcttttccacaatgtatctggtacacagtagttgcttaatatgttggctaaacaaagagtggagattcagtaaagggtgatcagagtgaggtgagattaatttgggaaagcctagaagtgattcttgagcctgatttgaaggtggtgctagctgtggattagtagagggagaagggcatctcagagagaggattgccaacatgccttaattttatcagattctagagttccttatgattacctcagcatgttgctagactagcattattatccaaaattttaattattaaccaactttaatcttactttctaacaaattgtttgcttttactactgatagccttttcaaaaaactttaactagttttattccttaccataattgtttcaaagaacataatgatatgatcctttatcttcctaagaaatgtgcaattatttggttaaactgtaagattatttaatccattattcttttgacacatgcatggccttacagcttacaaactgggatcactaaaggaatacacttaatttaagtctttctgtagtcagaatatgatttcttgttgtcttgcacaatactgagaacagtgcagtacagggcgaaggttggtctacagcccttaggccagcaaaaacaggcacaactgcacctctgtgcaaatgttcctgacataaccttggggaaaaaatataaaatgcggccttttcttttactaccttgtttggtaagtacctggaaaaactccatgaaataattagatttcatagttaattctaacttttttaaaaaatgtttcattgagactaggtttttggtttgttaattgaatcactgttgattttacccttcctggcaccaacctttatttctgagctgtggagagcacagttctcactcagtgctgtgtgcgtcacctgaaatccacagaaagaggtggctgaacaaaatcactgatgaccttaatggttatttttcacatattcagattaaattaaaatacgtttagtgctacatgcttgacttactgagtttttccctctattttggttaattttttttttttttggttaacttttacttgtagaaaatatgttgatgaacaaaaacccacttatactataagattttattctaccaagcacacagtaacaatattgaaagctgctttccatctttttcatctttatacagttccatcgagcctctgtaccttacctatggaatcatatttgcctgcggctgctcctttgcataccagccttcattggtcattttgggacactatttcaagaagcgccttggactggtgaatggcattgtcactgctggcagcagtgtcttcacaatcctgctgcctttgctcttaagggttctgattgacagcgtgggcctcttttacacattgagggtgctctgcatcttcatgtttgttctctttctggctggctttacttaccgacctcttgctaccagtaccaaagataaagagagtggaggtagcggatcc

SEQ ID NO: 36854 - DNA, 2300 bp, Homo sapien
atcattagaactaagtcgaaggctgagagaaagccattcaccaggatacacgaaattgggtggggatccattcagtgaaactacagggatcagtaggaaatacagccatgcaaccagtggaactaagcatggatgttaatggactcttcaggaggtttttgaaggataggaggaagtaaagggaaatgaaaaaatgatgaggataagaataatgtaagaagagtaagacaaaaggtacataagaaagggcatgaaagtgcaccagcaggaactcctcagagccacccatgctataggttgccttccccctccccgatctcgtgtcatattttctattcagttttccattgatttaacatcaaaagtcatctggacataggccaatttcaagtaacattcgtataaattaaaatattcttaaatgcagctaaaaggattagaattatccgaagtaaacatgtttacttttaaactgtgtgtacttttactttttttttttttttttgagatggagtctcgctctgtcgcccaggctggagtgcagtggcgcaatctcgcctcactgcaacctctgcctcctggattcttctcctgcctcagcttcccgagtagctgggactacaggtgcatgccgacacgcctggctaatttttttgtattttagtagagatggagcttcaccgtgtttcccaggctggttgcgaactcctgagctcaggcaatccgcctgcctcagcctcccaaagtgctgggattacaagcgtgagccactgcgcccagccagaatttgaatcttaatacaagaactatgcaattttcagtggaaattttaagtcttgtagcagggctatggagtaagcattgtaaatatgatcaaagagatgaacacatcttgcataaagtatcaataatctgggtggtatattactgcttaaatggatggatcccagcaatatccattgcaataaaatttaaccaaaatgtttctggaagtttcttggccatctgttacaatagtatccaatctagagtatctataaaaaggaatgttactccctttcatgctttttttggcctcaaatgccagaacctttcgaatttgagaattttctgagtcttatcaaaaacaggatgaggagataaaaacagagttctgactctgtattcttttcagactctcagaaaagtgtctggattgaacacaaaaaatttaggcttatcaggtcactttattgcagcagtaacacttcattcagaaattagaaaggatttagtttgactagattaaagcacaaatttttatattagtatttttcattttctttgtgcattttaaacttttagaacttttcccacaaaaaacatagtactaaatatgcatttatggaatttagcatcttacgtttatactttttcttcttaattttatattattatagcagagtattctccgtatgagtctattacaatagaactttttcagtgttatagatccagtttgattcattccattaaactgaaaactacatatgtgaagtttaatatacaaacacatatgctgagatctaagttatatatacttgtcactgctgttttaatatggaaactaaccaagcaatttcttttagtttcagatgatcacttttttcctaaaatcagccaaattttgaaaagaaaaacactgtagaggtctttacagagtaaagttttcatttttaaattactttctgtaaaattggggagaaggtgttttgaggggagtctgtgctaaaacttaaaacaaaatttaacatttattttttgtttttgattttcttttacagacagggttctgctcagttgaacaggctagagtacagtggcatagctcactgcagcctccatctcaaggctcaagcaatccttccactacctcagcctctgagtagctggggctacaggtgggcaccatcatgcctggctaatttttaaattttttgtagacacagggtctcattatgttacccaagctggtcttgaacttctgggctcaagtgatccccctgccttggactaccaaagtgctaggattacaggcatgagccactatgcttggcctaatttttttttttatttttagtagagacaggatcttgctatgttgcccaggctggtctcaaactcctgggctcaagcaatcttccctcctcagcctcccaaagtgctgggattataggcgcaagccaccttacccagccaaaattaacatttataatagtgggtttgatgattggtcttagtagtatgttttgttgaacttc

SEQ ID NO: 36855 - DNA, 2300 bp, Homo sapien
tgtgaaactaaaccagcctcaaggctgaaaggcaggtgagaaaagactacctaccaaagtaggttttgtttgtttgtttgtttgtttgtttgttttaacatggattctccaaagataggtagaaaagtcctggtttggcgtcattagtctacttcagcccctctctcactgattacgactgaaagactcatgacaaaatacaaatggcaactacctgccgcctctgaaaagtaaataaagaattgaggtagggagtcaaaacttagaaacctgcaaggggatgaatttcctggcttttttcttcttttcttgtggtttgtcctgaggagagaccccagctgggaactgttgggtggcatgggtagctaaaactcgaatagaaatctcatctttctgtgctgaaaggaaataacggttagcccagaactctattttcagtgaaaatattttcaggaatcaaagtgaaataaagacattctcatatgaaggaatgccagctgacctgctctaaaataaatgcttggcgggccgggcgcggtggcccacgcctgtaatcccagcactttgggaggccgaggcggtcggatcatgaggtcaggagttcgagaccagcctgaccaacatggtgaaaccccgtctctactaaataaaaaaattagccgtgcgtggtggcacgcgcctgtaatcccggctactcaggaggctgacgcaggagaatcgcttgaacctaggaggcagaggttgcagtgagccgagatcgcaccattgcactccagcctgggcgacagagcgagattccgtctcaaataaataaataaataaataaataaataaataaataaataaataaaaaagaaatgcttggcggggcatggtggctcatacctgtaatctcagcactttggaaggccaaaggcaggcgaatcacttgaggtcaggagttcgagaccagcctggccgacatggtgaaaactcgtctctaccaaaaagcgccacaacactccagcccgggcgacataggctctgtctcaaaaaagaaaacaaacaaacaaaaaaaaaagtgggggtgcgggtggggggaagacttaatgactaaacgaataagtctggagagacgggttgcaagggatgatgagactaaggtttgtagtctgggagcctaagtggatgaaagttggaagaatcaggtggaaaagaacatttcaaatagaccacaaagaaaagtatataacattttgaggctgtggtacgctttgttaaagagcaaaaggaaaacaattcctcaaatcaggggggagggatagcattaggagatatacctaatgttaaatgacgagttaatgggtgcagcacaccaacatggcacatgtatacatatgtaactaacctgcacgttgtgcacatgtaccctaaaacttaaagtatataaaaaaaattcctcaaatcgatgccacgctccacttctttacaacgatggaattatttcaggaattggaattatttcaggaattgtgtttgaaaccacagctttggatcccgatttctttcttgagctactgttacactgtttatatacggccactaattcgatgactgagcttgggcagattgttaattattttctatgacttaatctttctatctgtacaacggggataacgtggaatttggagtgttgtgagggttgagataatatacgtgataacttacacaatgacgttcaacaaatacttgtggagtgaaagatgcgcgattcattgacagatctcagggatttcagaaagctgtataaggaccagctcttcaggctcccttcgctccccaggagaccggggagccggcgcgaggcgctacagtgtaattcttggccccttttcctcataatggtttggccgcatttttacctcttgatttccctggtcccaggctgcaacttcagctcgctccgccatggggcgcacgtccgccagcctctgtgagctcagctaagtatgatgcctaggctagagagctacgtccggtctcctaggcaaccatatcaacttccggcttgaggcacgatagcggttggcgagaggccacatttccgccacgtgacccgcgcatgcgcctgcttgctggagagcgagcgtcttttgccacgaacacctgcggcgtgccgaagttcctcttctctgccccggttccgggcggtccgctgggaggtggcgcccggagggacacccgtgcctggggtcggggccagtgctcttctcggagctccagaagttctgctgagaagcgcggcggcagcaagacga

SEQ ID NO: 36856 - DNA, 2300 bp, Homo sapien
gcactcaaattccccatctttcaaggttcatatcaaaatcatattcactagtttaaataggaatatgctaccaaatctcacaacattgacattttaacaaagagaattcacattaaaagataactgctttaaaatgagtgcttgtgtttgggaaagcgctattatcttggtagtccacagaaactgactgtagtaataagatgaatggtgatgagggcaaggagcatcaagtgggaaatgctatctaaaatcccatagggcaattcatagctagagggaagaacaacctttcctaagatgcattatttcctagaactccattatttcatggaagcagttcaaagcatgcaaaaaagcaaaaccattttaaaacacctagtaaactgggcctctatcttttttatattatcataagccccaggagtttttgagaacgtaccttctgtcacggctgtctccccttcccatcccttcttcaacatagttgtgtttaaaaaatatatacctgtacttaaaacgcaatcctacagcccagcctaggagcatttcaaaatgtctgtgctgctgagtctggctgtggttcctaataaattcaccccattaagtgtgatgttttaggttgggcaacataaacacgcatttcctacttccatggatgcacatttcctgaaagcactgcacctaaggatgctgccctgtcccccgacgctcaggcactaaactctaaggagtcacgacctgcactcacagcagagccacacggtcaccccagtgagaaagattatctggccccaagcgccactctctccggcccactgcatctccggaactggcagaggagagcgagggtgagaagagaccatggggagcgactgacaacaaggctgacacttccccgtttccagaaagcggcacttgggggacacaagggatgtcccactagcgaccgacctcagagcaggccctacgaacccgtccaccgatggacatggcgcggccacctggcccgccgtccggggcgcccgcggctttcgctctcccggcccgcgccctggagtgcggctcccgctcccggccgccacacgcagtctaaacacgcggcgctcgccacctccctgcccgggggtgggggcgccgcgcagcgctcgcgcggacccacatttttgcggctcttgtcacgcacgagagaaaaggcgaggagggcggaggggagggaagacgcggcagcgatccacggagacggccggcgccggtggcgtgtgcgcgtgtgcgcggcggggagggcggccccggcgccccgccgactcccgctcccgccccgcgcccggcgcccgcttacctgccggggtcgctccgaagactcgcaccaccggcaccttcttgacaggggcctgggtgaggggggattggcaggtatccagcccctgcagcgggctggccatgtagtagtctgcagtcactatccttactgaaaacatgttcgccgccgccgccactgcctcccttcactggcgacccggcagcggcagcagcagcggcggcggctccctccgcagcggcggcggcgccccctccccttctcggcacggccccctcccctcacacagaggcacctcgaggagcggcgggcggggcggtgtaggcgctgctgccgccgcctcctcaggagcacccggcaaggggccgcaggagagaagccctcgagctttcgtcggtgctggtgctgccgccactgccgccaccgccgggaatcacacgggctcctcggtcccaggctgcagctcttgttgccatgatgatgatgtcacggacgcaaccactggggggaggggagaggggggtgtgtgtggcgaagggaggctgcgagtagtgcgggggagggggctcggcgggaaaaggagcgagagggcgggcgcccgggcgggacacggagggcgggggccgagaaggggctttctccccctccccgggcacgcggcgagggaggcggccggcggccggcagcgcccgcgcgggatcgatgactcggctggcgggcacggtcacctgggtgaggggcagcggaaggggcggcggagcaccgatctcatggatgggctccgaggggcttgcgggaggggggcgccagtgttcggggccgttttggcggctatgcaggattggcaggagctgcgatgctcacacttgcctcgccgaccgccatttcacatccagcagaggaggcgggggcagccgctgagacggtttttcacaaggtaagaaaatccgcccgcgtgaggagggaggcgaggcgcagatct

SEQ ID NO: 36857 - DNA, 2300 bp, Homo sapien
ttcagtaagagccaaaatatcaacacttaaagaattctaggtgtcatggaacactgagaatcactgatattgtgtatctgacattcggcgtgtacaaaatatttattttataaaaaatacattttagcatggtagtcatattttaaaatcacttctatagccttctaaaatttcagatcaagagattttgcctcttaaaaatattagctaatttccagcatattagtagaaatcttgccacgtatgtttataatcatgctctgaggttaaaaactacaagctaatttactgtagtaatcagtctcaaatccctcggagcgtaagttcttattatagcatttatatgttagggaatttatagacagcttcttaccagtgagctgtctctttgggccttttgattttcctatttgaaaatccacaacggttccaaacgagtagctctcacaccacttcaaatacgtggcaacctggtaaccactaaaatgcacctgtataacacacaaatgtaaaagaacgatctctacttggatgggttagaaatgtgtcaagggtcctaattcaggggcaaatttcgaacttgaacccacgctttctgcctcctacagcttgcatctttttgttgagaagaaacccttcaggattagtttttaagagaaaccttcccgttttacatatgtagaaactgagcccaaagaaacaaaattatttgtccaaggtcacgcccaatatcagtggccaagtcagagaggaaccccttgtttccaatttaatagccaagccagctgcatgttactactctttaaaacaaaaattccctaactgcatcgcttcaccccctctcgatttttgaataaagttgtttattcaaaacggcccttccccacggtggtgcttttatgccttcgggtagtaaaaccttccataacgtgttagtgaaaaacacgaggaggccacgtctaacgcggtgactttcacaggcctttttctttggccaaaattttctcggaaagactgttaatcctacattccgctgggggaggagcgacgagggaggagggaggtcaccggcagctgacaagtccttacatgtacttgcgcgtgcccgggacgcagcctgcggggccgaggaaaccaacgaaggatgtattaggacgagagggaaggaagggggcgggagaaaaacacggtagtgggaaatccctgtgcactggatctgccaacccctcgcaaagctgagaagagccgtgcgtgaataaatctcattaaatggcccggcgcagacactgcagcagcaaagaggagggggcaccgcggctcgcgcggcacgttcgggaagggggaacgccagggcggcccttttataggccgaagcccgcgcccgcgcgcccccacccttcgcaccgcccccgggccacgcgcggagccgcggcgttacctgagaagggccggctgcgtccgcacccggccccgcccgttccgccgcccgcccgcccttccctcccgcgaggccgcagcggcacgagatctgcgcctcgcctccctcctcacgcgggcggattttcttaccttgtgaaaaaccgtctcagcggctgcccccgcctcctctgctggatgtgaaatggcggtcggcgaggcaagtgtgagcatcgcagctcctgccaatcctgcatagccgccaaaacggccccgaacactggcgcccccctcccgcaagcccctcggagcccatccatgagatcggtgctccgccgccccttccgctgcccctcacccaggtgaccgtgcccgccagccgagtcatcgatcccgcgcgggcgctgccggccgccggccgcctccctcgccgcgtgcccggggagggggagaaagccccttctcggcccccgccctccgtgtcccgcccgggcgcccgccctctcgctccttttcccgccgagccccctcccccgcactactcgcagcctcccttcgccacacacacccccctctcccctccccccagtggttgcgtccgtgacatcatcatcatggcaacaagagctgcagcctgggaccgaggagcccgtgtgattcccggcggtggcggcagtggcggcagcaccagcaccgacgaaagctcgagggcttctctcctgcggccccttgccgggtgctcctgaggaggcggcggcagcagcgcctacaccgccccgcccgccgctcctcgaggtgcctctgtgtgaggggagggggccgtgccgagaaggggagggggcgccgccgccgctgcggagggagccgccgccgctgctgctgcc

SEQ ID NO: 36858 - DNA, 2300 bp, Homo sapien
cctgagaagttaaaacaggaattactatccatttcacagatgaggaaataaattccaaaaaataagtgagcacttagctaaatgatggtttaatattcacattctctgactcaaaattccagaactttttcttacttcaggaagaatatacatataaaacacatttgatagtggttaattagggggctattgtcaggttttcaatttgagcatcaacttaaaactaaattacatgcaatgaacacaacattcctaatttcatgctgcaaatgtttttcttcaagagtgaacattcttggagttctagaaggatttgacttgtggttgcaactgccttttcttaaagtaaataatgttgattcaagaggtaaggggaaagaaaccctcttctagaaatcgcaaatctgttaatttgatgcttttaccattttctagttaggaatattataatttaaaagttatggatacactgattataatatagtacaaggattctcaattttattttgcttaagaatcacggggtggcaagtagtgttgctaacaatacagattcccaggccccatcccccaaaatataattcagtaagagccaaaatatcaacacttaaagaattctaggtgtcatggaacactgagaatcactgatattgtgtatctgacattcggcgtgtacaaaatatttattttataaaaaatacattttagcatggtagtcatattttaaaatcacttctatagccttctaaaatttcagatcaagagattttgcctcttaaaaatattagctaatttccagcatattagtagaaatcttgccacgtatgtttataatcatgctctgaggttaaaaactacaagctaatttactgtagtaatcagtctcaaatccctcggagcgtaagttcttattatagcatttatatgttagggaatttatagacagcttcttaccagtgagctgtctctttgggccttttgattttcctatttgaaaatccacaacggttccaaacgagtagctctcacaccacttcaaatacgtggcaacctggtaaccactaaaatgcacctgtataacacacaaatgtaaaagaacgatctctacttggatgggttagaaatgtgtcaagggtcctaattcaggggcaaatttcgaacttgaacccacgctttctgcctcctacagcttgcatctttttgttgagaagaaacccttcaggattagtttttaagagaaaccttcccgttttacatatgtagaaactgagcccaaagaaacaaaattatttgtccaaggtcacgcccaatatcagtggccaagtcagagaggaaccccttgtttccaatttaatagccaagccagctgcatgttactactctttaaaacaaaaattccctaactgcatcgcttcaccccctctcgatttttgaataaagttgtttattcaaaacggcccttccccacggtggtgcttttatgccttcgggtagtaaaaccttccataacgtgttagtgaaaaacacgaggaggccacgtctaacgcggtgactttcacaggcctttttctttggccaaaattttctcggaaagactgttaatcctacattccgctgggggaggagcgacgagggaggagggaggtcaccggcagctgacaagtccttacatgtacttgcgcgtgcccgggacgcagcctgcggggccgaggaaaccaacgaaggatgtattaggacgagagggaaggaagggggcgggagaaaaacacggtagtgggaaatccctgtgcactggatctgccaacccctcgcaaagctgagaagagccgtgcgtgaataaatctcattaaatggcccggcgcagacactgcagcagcaaagaggagggggcaccgcggctcgcgcggcacgttcgggaagggggaacgccagggcggcccttttataggccgaagcccgcgcccgcgcgcccccacccttcgcaccgcccccgggccacgcgcggagccgcggcgttacctgagaagggccggctgcgtccgcacccggccccgcccgttccgccgcccgcccgcccttccctcccgcgaggccgcagcggcacgagatctgcgcctcgcctccctcctcacgcgggcggattttcttaccttgtgaaaaaccgtctcagcggctgcccccgcctcctctgctggatgtgaaatggcggtcggcgaggcaagtgtgagcatcgcagctcctgccaatcctgcatagccgccaaaacggccccgaacactggcgcccccctcccgcaagcc

SEQ ID NO: 36859 - DNA, 2300 bp, Homo sapien
ggatttcatttgagcttcattttgttgcttctgccctgtcaccttaatttgtttcacacatttgcacaagttcacatacaagttgtattttttgattcctttatattatggaaaaagaaaaacacattttaaaagagataacatcacagcacccaacatcaatacaaaaactcagaacttatttttactgtattttttagatttttaatctttcagcgaagctgcaataacagtgtacataataaccactgatttttctacatgaactgttcacagactagaaaattctgagattttataaaagtttaaaaatccttaaaaatgtttaaaaaaccctaattatgagaagtacatattctgttatcaaaaatcctaaaaagtttaattccaacagctaccttgccctataaaacatttgtttgcctgtcaatctgtgaggttggatcgagcaactctgtcccacacagcgttttcttgtactcattagtagtaagcattgtggcaaagactaatgtcctcatgaaaaagacagcaaaattcactttaagttcttctgtacaggtgcaatagtcctctgaataaattgtaaaaattaaaaaaaaatttttttttgacacgatctcactctgtttcccaggctggagtgcagcggtgtgatcatggctcactgcagccttgatctcctgggctcaagcaatccttccacctcagcctccccagtagctgggaccacaggtgcacaccaccacacctggctagtttttttattattatttatggagatagagtctcactatgttgtccaggctggtctcaaactcctggcttcaagggattctcccacctcagcctcccaaagtgctgagattacagatgtaagccaccatacctggccggaattttgttattttgatttaaatgctgaatgaagtaagttttaaagcctatattattcttcctgatataactgacagaaggataagttctcatattaggttctttaaaagttaatatatttggtggcaacacagaagaataggaagatcgcttaccaaggaggtaggtaacctggatctcacttactctatggggtcttaggcaagtcatttactttctctgagtctcaatttcttcattataaaatctaaagacttggattatttcaatggtcttgacaggaagactgcactggaattgcctgtgggcattctgacttggtagatatgagaagaaagggcctagataaatgtatctttacaacgtctcataaatgattctgatgcatattactggttaagaaccaatggtataaataatttcttgggttatttgaaattctaagaatctactttttacatccaatcaacggaatttttaaaactcctacctttcactattacatcattcttcttgatgaataagtatattttaggaaatggagaagctgcctctaaattgtgaatagcttactgttattgagtgcttagcagtctaaggtgttaactcatttaatatatgtaattcaatcttcacaacaacactaagaggtaggtactactattattatctgtttattacagacaggaaaaatgaggcacagaaagtaatttgcccaagttatggagcaggtaagtagggaaattgggctgcagagtttaaacaccagaatgctctactattattcaataaatgacctatatataccaataagccccatcactattccccacccgaatagtgctgttttccctgctactacaggggaaaaaaggggtatgtttttagacaatctttgagagcagaagggagaagctgggaaactcaagaatgaaaaaactcaagggacctgggcctaagacctctggccctgaattacaactagagactactttgatttacaaaagcctctttaaatagggtgactatttttaggagttattttccttcagttatcatttcatcccatgatgtctaagacatgctctttttgattgaataaatattaattttaaaaaatattagaaatgtaccttatcagatgaactagacccaaaactgtaaagcaaaacaggaaaggataaaagctatgttagagtcaaagggaatgataatcaaatgattcagcctattgttaattttgggtatgcaaaggagaattataacaccatactttggcataaggtagagattaatccataacacggtataaccttcccttcccaacagtattagatgggctgtctacttgggtgatgaatttactcaggatgagggcaggaattcaggtgaaggagaaagac

SEQ ID NO: 36860 - DNA, 2300 bp, Homo sapien
aatcactattttttatttatttaattttttttgagacggggtcttgctctgttgcccaggctagggtgcagtggcacgatctcggctcactgcaacctctgcctcccaggctcaagcaattttcctgcctgagcctcctgagtaactgggattacaggcacctgccaccaagctcagctaatttttttttgtatttttagtagagacgggttttcaccatgtttgccaggctggtctcacactcctaacctcaagtgatctgcccccctcagcctcccaaagtgctgggattacaggcgtgagccaccacgcccggccaattatcaccatttactgagtgcttatttcctgcctggcattatgataggccttttccatgttaactcattttagttctcacaaccaccgtaggaagtcagtttattaactacatattacaagtgaagataagatttagagagttttagtaacatttccaaagtcatgcaggtgggaagtggcaaagccaagacagaacccaagctgtccgtttcttctcaaccctgacactatattgcttctctcccatataatagcaatggattagtgacacagtctcagaaagctacaaaagcgttctcaagagtagtcgttggccatcacacatttgaaaacaggagtcatctaaaccaaaataacagccattccatttttcatgtaaagacacatattctgaactctgtactctatgtatgtgatagttcggtatacacagggcatggtctctttccgtaggaggcttagcatcaggttgaagagacacagcagacataaatgaaacatgtcctgaataaaagaatgttatcatacgtgttaattgtccagtatcattagtggtcacaatggggtagagttaggtgaagtgaggaagaggaggagattggcatgtgggaaggattcacagagcaggggggtttgtgctgtgcctttagggtacaggggactccaatgtggggagtaaagtagacaggatatgtgaggaaaagagaggcgaggctggatcatggatggcgaggctggatcatggatggatcatggatggcttttcaagtgatctgcctgccacggcctcccaagtgctgggattataggcatgagccatcgtgcctggcctggaatgacatttaggacaagtaatctgggagcagtgcagctgaatcacgtaacccctccccagggacactctccctgagtcacccattccagtatataatccctcttcccatcaagagcatctcgtaaacacacacgtgcacgtacacacacacacacacacacacacacacacacacacacacacacacacacacacacactctgcagtataagcctgagcccaagaagggccttcttatttggtttcttataaaataaaaaataactgatctttctccttttaaaatatcccttcaaaaacttgaatgctgatagtaaatatcagtcttttcaaggcctaagagttctacttctgactttcatcataaacctcttccctaccgtttcagtaattgtttttgtgactgttccttggctctgctccaagtttcatacaatccttttgaaacatatagattgaaactgtacataataccataataatgacctcactaatgcaagtaaagcaccacaattgtatctcagttacttgtatgccacacatccattaaaatgttccagaattatgtttgcctttcaaatgtctaaattacagatatataatatatgtatattgctggcttatatccaacttagtggtataccgtgtccctcagatttttaaaaacctgattattgtgtagccatagatatattttgatgtgtatcacaatatcctaattatggacataacattaactacttaaatgcctactaatgttgaaatagggaatattttcagaaaattatattttgttttttagacctatgtgctccttcttgcaaaaagcattagttaagttttggagctttaaatgtatatagtattgtgttttcttctgctctgcatcttgagagaacctctcattaagggccaactcccacatctttttttttgcagattgacatatttgaggatagaatccgaggcattgatatcattaaatggatggagcgctaccttagggatgtaagtacattccaaaaaccagagtttgttttctggtgagaaagacaatgagcttatgaagttgttttattaaagaaaccctggcatacccacctaagtctgaagctgagaaagccccaacaaagcctcccttgtt

SEQ ID NO: 36861 - DNA, 2300 bp, Homo sapien
ccaattaaacaaatcttgaatagagaaatcaaatcctgcttccctctttggagtcagagcacaggccctcacatgtggcagccagctgaaacgcttattgactacaactccatggagctcccctcttccttctgtctcagttaagaaatagaggcagaggagagagagcccactgggatcttcccatagttctaaaagtctttctgtccctgaaggtttgcctttgtaaagaatgaaaattgactgtaaatgtattcctttctagggaccagccacatcaccagccacctaatagagctggtgctcctggggagtccttggagtgccctgcagagctgagaccacaggttccccagcctccgtccccagctgctgtgcctagaccccctagcaaccctccagccagaggaactctaaaaacaagcaatttgccagaagaattgcgtaagttgtttgcaacattgttctctccttcctctttttttttttttttttttttgagacggagtctcgctctgttgcccaggctggagtgcagtggtgcgatctcagctcactgcaagctccgcctcccaggttcaccccattctcctgcctcagcctcccgagtagctgggactacaggtgcccactaccacacccagctaattttttgtatttttagtagagacggggtttccccatgttggccaggatggtctcgatctcttcacctcgtgatccacctgcctcggcctcccacagtgctgggattacagatgtgagccaccgcacccggccactccttcttcttgtgaggtcttatactttgtgatggctggatgatcactcgtccctaatctcgaagattttccttttttttaagacagggtctcactcctgttgcctaggcgggagtgcggtggtgtgatcatggctaactgcagcctcaacctcctggggtcaggtgattctcccacctcagcctcccaaatagctggggttacaggtgcataccaccacaaccagctaatttgcttatacttttactagagacggggttttgccatgttgcccaggctggtctcaaactgctggattcgagtgatccacccgccttggcctcccaaagtgctaggattacaggcgtgagccactgtacctggcctcataacctcagctatttctcatgtacacagtaaaataaaatgcacttttttgctttttgcttaaaaagtaaccagcattttgtatgaatgtttttagtgattctgacaccactagtaacactcaaaaactgcttacctctagatttccttaagcacatactccaaaaacaaataaccccagtgccttttccctcttctaaatgatgctcttgagtggacttgtccctgggtaaattgattggatgtccatgtggtattgggcagggacccagcatctcaccataagttagcagcagccatcaagaatgaggtcatttcctgtaggaatgagcaatcttgtttggaaaaaacggtctcacattctccatactgcatcacaaccaaatgcaaactaagccttttatttaaagaaacattcaactaagcgtaaggtgatgattctttttccacattttgctgccagaaccagaaatgttgaaatatcaccaaaatgttctcatattaaggtcagtcaggacagtaatttccagaaatcttaagaaaacagccactacttgtgaaattattatatgatgtgcttgctagagaagctcaggtaattctaatatgcattttccaaatctgggaacctctttgaaccaaacctgaaacaaagccttttgcatctgctaattccttttgggggatctgtgctgtttagtcattgacaactctgaaagctctctatgacaatgattcattgctgttttcattcaaaacattttatttctgaacactttcttaagatcttaatcattttaattttgagcatttctggagaacagatgctgccccacatacattatagtcctgatatcaatctatagatcatatatatcttaccataatctataaaggaagtcctcaaatacgtaacaattgggtgaatgttaggtgttcagaagaaaattgagtgccatctatatatctggctgcttaagtgagttaatatgaccattatacacacttccatttgggaggtgtgtttcaaaaaacctcagtgtagatacagactcgtattttctctccagcccccctttcttctccatcttctgccccaagggcttcctgagatttaagtggtccattccagactaaaagccaacacaaagt

SEQ ID NO: 36862 - DNA, 2300 bp, Homo sapien
gggaaagggagagacggagggaggagggaaggccagccggaagttagaagttgagttttctgttgcgtcagaaaacagagcaagggtcgttgtgcagcaggtgggtaagtttgataccaagtgggagaagactgtcaaagagcattcatttggcagggagtggagaggtatctttctgtaggctgttaagtatatttggtggaaaactgctggccccatctgtgtgaaaggggagcatttcaaaatgcatgctgtcctgatcccattggattgggtacaaggtgcaagagaaagtgaattcatgctctccgaaacttgttttagaacataatttatgtaaactgactttaggcacagtgagccctcagtgaatgtggttgaaatgcgacatggatccaaagtaggaatttttaaatccagacataatcccttttctctctctggtatttgaagtatgctgtgtactagccttgcatagaataaccctctgggatttcttctttttcacttgcttgctcttttacgacacctgctctgcagcctcctgcaaacccccagttgctcctgtgcagtcctctggactgcgttcttcctgcccctgcagtcaaggcatcatctcaatcagtttaatgatgagaggagactggttttctttctcattgtgttaggtgaattaagagttcttcttacagctaaaagcaatattgcccggcccgttggataaatgctctgcaggctaaggtctagtttagcgagccttgctggttcaactacatcacaaaccagatggtcatggctacctttgttgcaggcatagtgcccagagggaattaagtcctccaaatgacctaaaattaggtagaaaatgtcactctgaccttttttcaatgtgttttaaacttgggcttgctttctttgcttaaaaaaaaacacttttattttttaaaattaggaaatagtcaaatggaacaaaattataaaagtttaaaaggtgaaaacttcctcccactcctctcccccagcttaattccatcctcaaaggcaaccagtgtagcaatgtctgtatatcctccacacggtttatacatatacaagcagatatgcacacagaaacacacattctcctctcgttttttacacaaaatagcagcatagtatgcacactgctctgcgcctggcttttaaaaaaaactcaatatatcttagagatcattccatatcagttactaagatttatttcttcatgtattccaagcacacacgaagcagcccacattatgataatttctctttcctcaatacttggcagttgattttcatctgtgttttccccttgctggtgaatgatttctaccacaggatggtccaatcacattctttgaattgccttccagataaaatatcttaataagcattagtgcttttgcctggaggataagtaaacaattttatgtgattagggctttgcaagcacattggtgtctcactgttaatttaaaccacatcttgaatgaggtcccttaaggtcataaagtgaggactccaagaatttatctgtcttctaaggctatagcatgttttctcttgttccagaaactagaatgaaccgaagcattcctgtggaggttgatgaatcagaaccatacccaagtcagttgctgaaaccaatcccagaatattccccggaagaggaatcagaaccacctgctccaaatataaggaacatggcacccaacagcttgtctgcacccacaatgcttcacaattcctccggagacttttctcaagctcactcaaccctgaaacttgcaaatcaccagcggcctgtatcccggcaggtcacctgcctgcgcactcaagttctggaggacagtgaagacagtttctgcaggagacacccaggcctgggcaaagctttcccttctgggtgctctgcagtcagcgagcctgcgtctgagtctgtggttggagccctccctgcagagcatcagttttcatttatggaaaaacgtaatcaatggctggtatctcagctttcagcggcttctcctgacactggccatgactcagacaaatcagaccaaagtttacctaatgcctcagcagactccttgggcggtagccaggagatggtgcaacggccccagcctcacaggaaccgagcaggcctggatctgccaaccatagacacgggatatgattcccagccccaggatgtcctgggcatcaggcagctggaaaggcccctgcccctcacctccgtgtgttacccccaggacctccccagacctctcaggtcc

SEQ ID NO: 36863 - DNA, 2300 bp, Homo sapien
cagcatcacagggagacggttaggcctccggataactgtgggcaaggctgactgctgtcaggccctccacaagaggtggaggggcagtcttttctaaactcccccgggaacccctttccccgtctgctaagtagcgggtgttgttccttgacgcttttcgctaccactagaccacggtccgcctggcaacaggcgtcttcccagatgctggcatcgccgctaggccaaggagcccttctggtggctctgtctgggcataacggaaggctcgcactcttgtcttttggtcacttctcactgtgtcccctcagctcttatctcgtatggcctggtttttcctaggttatgattatagagcaaggtttattgtaatattggaataaagagtaattgctacaaactaatgattaatgatattcatatataatcatatctaagatctatatctggtataactattcttgttttatattttattgtactggaacagctcgtgtcctcggtctcttgcctcggcacctgggtggcttgctgctcacaaggtgggaggatcccttgagaccaggagttcaagaccagcctcagcaacacagggagacctgtctctagaaaaaatttaaaaattagctaggtgtggcggtgtgcacctgtagtcccacctacccgggagactgaggcaggaggattgtttgagcccaggaggtcaaggctgcagtgagctatgattgcgccactgcactccagcctgggcaatagactgagacactgtctcttaaaaaaaatcgatatacatatctatgtgtgtgtatatgtcacatatattggcaaaaaataagataatacttttagttaaataatatctcagagccactttttcatgttagtggctcagataatacatacatattgatgatttttaatagctgcatcattttctgcaaaccaaatgcaaacaacctgtgtatactgtgttaaaaacaagctgcattttctctgcttgtggaatgttgagcaacctgcttcctgtatcctgcttgagcagaacctggtacaatctgaacagggatgctctggggcctgtccccttgatgagagtagagagatagccggctgagtggactgacacttggaccccttcaacaggcagacaagtccagcaccaggagcatggtgtgtctgcccagggcgcccagctggccagtgacatggctgagttcgtacccaggtcctcctgactccaaagctccagctaacactgctcccattactgactgctgccccgaaaggcagttgtctctctctctctctgttcacatcgctgggtatcatcctgcctgcagcgctccttcatgcaataaattctgcaggctactgattaaacaatgggaaggaaaggggagaaaaaaaatcttgaggtcaggaaaatgcagccagaggaggttagtgtgcatgtgtgcatgtgtatgtatgtgtgtgtgtgtgttcttaaaattaaccactttttttgtgcctgacaatagggtggtgtgtgtgcacaagccacaggcatgtgtatgctgtgtgtacacgtgtgtccaggagcatggtcagtgagcccccccccacccccccagtggttatgggcagcaaatactgattttttgggtttttttaaattttttttttgagacggagtcttcgctctgtcgcccagtctggagtgcagtggcgatctcggctcactgcaagctccacctcccgggttcacgccattctcctgcctcagcctcccgagtagctgggactacaggcgtccgccactacgcccggctaatttttgtattttttagtagagacggggtttcaccttgttagccaggatggtctcgatctcctgacctcgtgatcctcccgcctcggcctcctaaagtgctgggattacaggcgtgagtcaccgcgctcggcaatgctgatgttttaagcagttagaggaggtggaagaagctcgactccctcttcttccccattatctgcccacaatcccctcctttggagctgctaatgattactaattcttaacattcgagttcaatctcctcccggagacaccctcccaggcgagggcactgcgactacactgaggttctgcccactcctgggcagcttcttagctgggtggcgaaaacaaaaatgccgcctaattggtcactggccctttctcatgaatgaaggaggtttctgttttaagaaataaagtgactcctcagccgttgattcactgcccacagggagattttgagcagaggcttcctaggctccgt

SEQ ID NO: 36864 - DNA, 2300 bp, Homo sapien
aatgtgtaatatgagagagctttagaacagtctgatactgctcccatcacccagtccagcagaaaagcagtgctcagaagagtgcccagggagcactcttctgatatggcacctcctgcattggtttgcaagatagtatagaaaagcatgccttctcctttgctgcctcaagcccttcccatcctgtgccagctgtgccctccccagtgaataaatgttattacacatgatggcatgtgtttcttatgtgattctttggtcccaaatgggctagtttgcggttttggcagggacctccactggcctgttctacctgacccctgttggcttgttggggtattgcaagtccaaagggggaccatttaaccaacttgtatttctgaatcttcttcacttctcacacacataccagtagattttaaaatgcaaggtacactgctgataaaagtcacaggaggggcctgtcacggtggttcacgcctgtaatgccagtactttgggaggccgaggcgggcggatcacctgaggtcaggagttcaagaccagcctgaccaacatggtgaaaccccatctctactaaaaatacaaaaaattagctgggtgtggtggcaggcacctgtaatcccagctacttgtgaggctgaggcagaggttgtagtgagccaagatcgctccactgcactccagcctgggcaacagagtgagactccatctcaaagtcacaggagggatcggctttaatacagagagggtaaaagagaaacataataggctacagaatcttcactcatctggttgctatttattgttccaggcactggcaatgtagctgtgatgaaaacagacagggtcccgctttcctggaacttgcagtccattgggcaatgagacaaataaacaggccctgttttaatatggcgccaagggtgccagaaggagggagatgaggatgccatgggagcacttcagaaagcacaacccagcctggaagggcagggcagtcggagaacgccttgcagaggaagcggtgccttattaactaggacatggatacgtcacatatcaaagaggaaggggaaaaagtgttcaaggttatgttccaaggcccgaagcgggtgggggaatggagtctttgaggatctgagaagttgggcgtgtttgaataggagagccgagacaggaagagtgggaagtaaacaaggaggaggaaatgaggatgcttctcaggatgctgactggagcaactgggacactggtggtcccatttacttagatgaggagcctgggagaagagggtttgaggagggtggggtggcaacaactcgagtttttaatccgccactaactctgtaacatgggaatgatttttttttaatgtttttgaaggatgtcaaaagctaatggaaatttgaaaagttaattagcagctttaagtgatttcattactgtagactatcatgacatcctgcaaatatactctgacctcttaggttctgccgattttatttttcatccagtaactagttcttagttttgatacttagcatcatcttagtgcttaaaattgaccagttttgtgcctgaagatgtggtacccatgagtgaagcagtctagtgacttgattgaaggttgtattctggcttatccaacactcctgtgccctcttccttaaatttcctgtgccctgatggaagtttttattctaatgttgcatagactcattctacagagcatgtattattttttttagatggctaaaggcagaattggtaaatatgattggaccgtctgtaggcaggtgtatgctgttacagaattttacgagatacaggccttattcgaggaaagttgctgcatggtgaacattgtgctccgtgatgatgctgtcatccagaacatatggggaacaaatgcgattgtggggtcaaggaactgaacttcctcctaaccatctccccagccactgcctttcctcatgccccctaataggcctgaaatagccaacagtgagccttgtcaattactcctcgtttactgtagagcaacccagcaactagggagcatcccagcttacgtgcccccttttttgtctttggcaggaatttagataatgggctgtgtgcaatgtaaggataaagaagcaacaaaactgacggaggagagggacggcagcctgaaccagagctctgggtaccgctatggcacagaccccacccctcagcactaccccagcttcggtgtgacctccatccccaactacaacaacttccacgcagccgggggccaaggactcaccgtc

SEQ ID NO: 36865 - DNA, 2300 bp, Homo sapien
ttgtaacaagtgccaccaagtgctagtgtcctttttctgtattatgtatgttgagttgtagatatctgctgtcaggccctgtccctgccactggctggtgatgtgaacacatcttgtgtctttgcatctctgcaccacagtttcatcatctcacaatgaactgcctgctctccaagatgtggagttttttaaattatacaatttggttgcaccttaggggatccctctgattatggaggcacagtaaggtcctgagcataggtggtcagcagtccagaaagggagaaggccgagggcagactggagaatgggactggtgagattcagataggaagagcaggggagaaatggtcaaagtgagactggaatcaaaaggttggcatttctaaaaactataattgcacttaagaagttttgccaaaggcgatttagttaccccacagtgaggaacatgggtgcctatgtctccagtcacttccccacaagaaacctaattgcagcctgggctccgtgcaactcccagcttgaggggaggcccatgggcttctttgtgtgaggagcgcgctgcagcattcctgcccacacacgccactgctgcctttctcctgagaaggagttccgttattatttcatgtgacctcacagccaggggagctggtttgccattttgcataacacacattaaatttgtttttagatgtgctgttgagccttgcctgtggatcttctgtcctcttgtcggtccctgcctgctgcagccatccaggcacttaggatgcctatctttttctctacagctgcgaggagcccagtagttgggtttccttaaatgcaagcagatggaagcgagcaggagtgtggaggcaattagaggatttcctcctccaagcagtgcgggtttgctctctctttgggtgtgtggctgttcttgctcattttaattttccatttgggttttgtcaggctgtcagcttttttttctggctgtattatgctgctggttgcaggagcttgcaaaatggggtgatttggttgcttattgtttggaatcaaacttttcacagtacggtatgggtgacgcatatcgtgatgatgatgacacttcatatttgtaaaatattctgcaacgtaaagaatgttttcacatacgtcactgtctcatttggtctggacagaggcccagaaaaaaaaaaaaatgaaggctgtactcagtctgctagagtcaaagttttgccttatctttttacgccatctctagtcaaaccacagcggagagaataatcgaatgaaaactgaagctttctgctttattccttttctccttctcctttcagtcaggtaaatatttttcactttctgaacacagtgttagattctctggtgacaattaaataatcgtagcagataatcgttgccgtcggggagctttcaatgtaggtggggagacaagacatacaacagtgagtttacataacagtgcctggcacacagaaggcactaaggaactaggtgctgaatgagtgggtgagtaaatgaatgtggaacatagcccaccaaagtcctgaagggcaagaacccctagggggggaaccaaaagatccacagtccttgatgagaatgggcaccgagtgcctgggtgcctgggagtgagcaggcgagaggacccagcaccgttgtggacagcctccgttcggttagcaccactgcacgagggctggagtagagaggaagccatttgtttatgagctgagaagagtgagcaggaaaaatgccattctttgctcttaaggatgagacaagcataaaaagagaggcagacaggcagaccagaaggaagagattgctgacaaaatcattgtcaggaaaagtgccagtgaaatcactccaccttaaaagatctatgttctggttttgagaacctactatattgtagacctgtgccagaagccagaagaaggcaatgggaagaatcaaagagattcttggccccaacccttaccagaccctgccatgcacaggaaacagttaaacaatgtgactgtctcacctgcaaatgatcaagtgttgggtataagccaaggagctgagagagggggagaccagcgcaggtctgaggagctgagaagggaggcttacgtgaagggtaagactcgcatgggcctggccggtggacaagatgtgggaactgcatggacagttatgtggaggtgcattccatcctggctggagagtgtgtgaggggcagtgggagattggtggaaaagatataggccactggtgtggaaggctgggaagccacg

SEQ ID NO: 36866 - DNA, 2300 bp, Homo sapien
acagtaagtatttagtaaatgttagctattattatttataaatcgtttcccttatttattgcctaactacaatctcaacctactctcaggaatatagaaatagaaattgattcatcatgagaaataatacataagctttggagtcagatctggctctgccacctcagtaggttacttctcaatgctttagtttctttatcaggtgaagacctattgcgtagggttactgtgaggactaaaatgagataatatatgcaaagtgcctaatatgttcagtactcttttctctttctgtgtcttggttcaattagaacacccttctgtttctgattttgctaccaaacatgtatttttctccctctggtagagtgttcttccatttattttggtgtgacacaaataatttaatacatgtttatatcacaagtccacatgtgtgagtgaaacaaaaactccacaaaataatgctctgtgtgattcctgtactaatttgctatggctgccataacaaagtatcatagactggatggctcaaacaacagaaattcattccctcacagctctggaagttaaaagtccgagatcaaagtgtcagcaggtttggtttctcctgaggcctctctctttggcttgtagatggctgtcttttctctttgtccttacatggcctttcctttgtgtgtatctgtgtcctaatctcctcctcttatagggatactagtcatattgagttgtggtctgcccatatgacctcattttaactctgttacctctttaaaggcctgtctgcaaatatagtcacattctgatgtgtgctagggtttagggtttcaatcatgaattttggagggatacaattcagtcaataacagttcccttgatatttttatctgtatttcattaaagaaaatgctgggcagaatcaaccaagttaaattttgtgacccattgaattgactcgggaccacaggttaaaagagtgtgctttagcgggttgtgttggcttacccggttagtgtgaaattgaaaccagcattaggacttgcctgtgacttagtgtggagacaggcccagaggcacaaaacagtaagaatcagagtggacatccttctgcaaacacagacatcaccttagcccagggttggcaaacattttctgtaaagggccagatagtaaatattttcatctttgcgggccatacagtctctatcaagacaattctgctgttgtgtgtgaaagcagccatagacaatatggaaacgagtgggtatggctgtgttccaataaagctttacttacgggcactgagattttaattttgtataatctccatgtgtgatgaaataatcttttgattttttgtgaccatttaaaaatgtaaaaaccattctcagttcatggactgtacaaaagcaggcagcaggccagatctgatccgcaggctgggggttgctgaccgctgcccaccactgcccttgctggtagagcctcagtcttctggctgcagactctcgaggaattgacctaggtgattttcctctgtccatgtacattttgaactgattatcttatttgacccttgtgattcctctgtgttttcagtaggaaaatctctgtggcattcatgatcaaaagttatttaaaaagcatatgttatcttcttaccagagaactctaattagggatgggggaccttcttaaaggacccacacaattttttgtcagatggtgaagttaggaatagagttgacaccgaaaagtctatgcaaaaacaacagagcttgaatttaaggagggctctcctttgggaagctaatatccagggaaacagagtgaccaaagaaaggcccgggtgtcctcatggcggatggaggagagcagctcagtggcaggggccctgccccgggatcttctcccaggtaggggcaggctggagggtgagtgaggtctccacagtccccacatggtttctttcgcaacccagaatgcaagccgaggtgtgtgtggctgcctctcacttcctgtgggggctgcctgcagtctcaggatgtccatctcggtgcctgcgtagatctcctcccctcccagagggtccaagagaacaaaagtgtctgagaaagccagagtgtgaccacgcggtttctatgctccaagggatttatttcagtggtaggtggagcagctctgtggagcacatggctaatgataatggattgactgaccagaagcaggagaggacctagcagaagccggaggtcaagctgccccaagactgggggacagcctgggtgaagactctg

SEQ ID NO: 36867 - DNA, 2300 bp, Homo sapien
cacataggttatttaaaattttctagtagacgcatttaaaaaataaaagaaacaatttaattaactctaataatgttttatttagcacagtacatttagactatcattttaacatgtaatcaatattaaaatgggatactttacattccatttttcatgcttgatctgaaatatctaatacatcttttacatttacagcacatcctaatttgcagtagccaaatttccaatactgaagtacatttcaagtacttaacagtcatgtggctagtggctacctcctcggacagcccaattctagaactatggtcctcaaggtgctgtctccagattggctgtatcaacatcacctgggaacttgctaaatgtgcaaattcttgggcaccatcccaaaccccctaaatcagaacctcaggtggttaaacacagcaattcatgtttaagcaagccccttcagttatttctgatacatgtcaaagtttgagaaccattgctctacccaactgcctctgcatcccaatccaaataaacccagagcagccattgcggactagccctgaggacgaagagcctctgctcttgagataagcaattcttggctaaatgaagctggctttctcttgtatggaaatatcctagtcctagctatggttccatttcttgggattatggaatttccagacacaatttaaacatggtttaatttgtcattttgtttaaggaaaaggaaaaaaatccagtaacctctgtatactgtcaccttgagttagttacttaacttttcttttcctcagtttcctcctccataggatgcagatcatttaataaatgttagcaacttttcttaaaaagtagtgtgtacaaaaagaaaaaagtcagcaaaagggacagatttttttaaactacagtaaaaacaagtagtgggccggaaaggcaatattatagattttgagcacagaagcagaagctgattcacttataatttcttagaacattagatttgctgagggggaaggtagggttcttgccaaaatcattaaggagagcgattctgagtatgccttaaagcagaactttcagtaaacaggaattacctataaagaaaatcaggaagccaaagtgtttctttttatgaagttacatcctgccatagaaaagctggataggaaataaagaccgatgcactcccaactgtatactaaaccggcaattatttcatcaagggaaatatgagcaaaagctcagattcagtgaaggggaaaaaaacatgagaagtttgaatgttatgagaaaccaaagacaaccaatgactacaattaaacgaggttttttgggggtggggcggggaatgtacgaacaaatctctgtcatttcaggttccttagtcgccgcttggcccctccccctatttcagtaatacttcctccagacttttgctagaaaaaaaatataaatgagtgtccgcagaaataggggactgataaaatgatcctaatctccttctcctcctcattgttatttgttgtgcgtttccacgtttcaggacaggattctactttgctccgtactcttttcagtttgatcaaagaaaacgctgctatcaccgcccaattttccatttcatcctctcaccctcaaatgaaaagacaccagaaaggcaagatagccctgtctcgaggcagtttcccatggttttgggggaatggcaggtgccaatctgcagcagcagctgcaaccttccgcaaagcggaaactgcagttcacactctccgctctttctcccgccctactccgccacctcacaactccacacaatccttaaaaacacacagacctcctcctccaacctcgcattttcttgcacaccctgcaccgcacgcaccctgggatgcccgctgccacagtaacgctcaacccactcggcggccccacctactgccgtcccgcccacgccccaggcgccaatggttgcggctcgcagctcccaaggggctctttgatagggcagccgggcctgtcactctcgaggcgcgccccgccccctcctcgctcccctccggagctggaggggcagagcatcagcaagagtagcagcgagcagccgcgctggtggcggcggcgcgtcgttgcagttgcgccatctgtcaggagcggagccggcgaggagggggctgccgcgggcgaggaggaggggtcgccgcgagccgaaggccttcgagacccgcccgccgcccggcggcgagagtagaggcgaggttgttgtgcgagcggcgcgtcctctcccgcccgggcgcgccgcg

SEQ ID NO: 36868 - DNA, 2300 bp, Homo sapien
gaacaggaatggaaagcaggtcagaaaacacagtctttactgcatgtgagtctgcgctcagctaaaaatcagagtttggttactaaggcagaaaagatctcagggtacagctttctctctccgcagctgcctcactacatataggattggcaatagattggaatagtgtctctcctacactacactcgcccagcagagaaaggcacatcagaactcttaccctttctgactatggagagtgggaaaatcaccacgctcttcaatatggagtttatttaaaaattctatttgctaaagttttaaattataatatatttatccagtgttacaatgaaagagacgcaaacagggagacaattctatttaaaaaaaaaaaaaaactaaaggatcccatctccataaatatccagtacaagcttttgtaacctcttctgataatcactttttacatgattatgttcttcaagatatatgcacagcattataatcgctgtgcaatgctgttatattttttcacttcgtgttatttaaaatatgctctctgctctctcatatgtccatatcgtcaatatacctaccatttttcatgccaaaatattgaatcaatgtagcaattatacctatgttaccaattataggacattttcatgacttccagttggttttgtgtttgttgttgttttgtcacacaaatagaatagctataaacgtcctagtgcaaataagcatttctttcttctaagaacttctttagaataaattgtcaaacatgcgactatcagagcaaggaccatggccaatctggtggctcctatgtgaactatattctctccaggaaattctctaatcatcaaggtatctacatcatttaatgatgctattttgtcctcagctctgccaaatataaatttctacaacatttaatggtttctaatttactggggatatggtgatatgaactaaatcacttgagtctgaatatatttaaatgttttttaagcagaacatcattgatgtttatttactatttatgtttttaatccctttgagtcatatatccattcctattttgcaatctgactacaattagaaactgctgttgtaaatttacaccagttcctcttatcttctgaaccccaaatgtgtatcttatcatttttattatgaatgatcttcctttctgttgcttttcttccccctgctccctccttaggggtgctcaaatgaaagagaaaagtttaaaaagcaacatttgttagaagacataatgatgcacatttctgctcaactgggagtacattgtctgctggggccaaggtctgggaggtatgtttcctattagaagaagcaggttcctaggttctctctgctgcccacagaaatggcaggacttggaatgcaggggcagcacagtgtgtactcaagacaaaagacaagtaaaggaagcaagatactgtgcccaggccattctaagggcctactggcaggcatttttcagaccatataggtggactcctagttttccatgggatgcattcctaaaaaagcattttcatttgaatgtctgaaaatcacacattgggatacatgttacggatttatggattgggggaaggctgaaaaaacattgtgaatccctaattattgggtccttagatactgcttatctcaggcctgagccactcagtgaacagaagagagactattgagcccaacaacttctcctcctttgtattaggttggtgcaaaaataactgtagttttttgccattaaaagtaacagccaaaaccacaattacttttgcaccaacctaataccccttctctgatccatttacaggccccctgcagaaggtcatgatgccctcagtctttacacttgaactctgggactctctagttacctggagaagaggtggcactgttttctaacatggagacagacacaacacaaacaaacatataaaagctaaaatctgaaaaagcaagtaaataagcatgataattaccaacttatgcaataaaggatataggcaaggtgacgtcagaaagagtaatttggaggtggtgctatttaagataacatcatcagggaggccctcccggagacggggacatttgagctgagatgcaaaagatggtagacacacaaagagcagagaagggtatgccaggaagagggagcaagccaagaccctccagctagtggagagttggggcctgcaggaactgaaaggcaggagggcagaagggcagaggtgcaggagggcagaagggcagaggtgcaagcaggggccacc

SEQ ID NO: 36869 - DNA, 2300 bp, Homo sapien
acccgacctttctctctggctgcccttaacatattttccttcatttcaactttggcgaatctgacaattatgtgtcttggagttgctcttctcgaggagtatctttgtggcgttctctgtatttcctgaatttgaatgttggcctgccttgcttggttggggaagttctcctggataatattctgaagagtgttttccatcttggttccattctccccgtcactttcaggtacaccaatcagaggtagatttggtcttttcacatagtctcatatttcttggaggctttgttcgtttctttttattcttttttctctaaacttctcttctcgcttcatttcattcatttgatcttccatcactgataccctttcttccagttgatcgaatcggctactgaagcttgtgcattcatcacgtagttctcgtgccatggttttcagctccatcaggtcatttaaggacttctctacagtgagaacactgggacacaggaaggggaacatcacacaccggggcctgttgtggggtggggggaggggggagggatagcattaggagatatgcctaatgctaaaggacgagttaatgggtgcagcacaccaacatggcacatgtatacatatgtaactaacctgcacattgtgcacatgtaccctagaacttgaagtataataataaaaaaaaaaaaagaaaagaaaaagatcagattggaccaaaacagacacattttcttcactactccattatctggttttgtcctatttcttagggaggcaagataaggcgttggcatcctaactgcagtgggtattccttgttgtttgatgtgcatatacttacagtttaatgactccttagtaagctctgtgtgatctgcaggttttagggtgtccatggttctccaaggacaccagattctctgtggtggaggacagcctcgtttttcccaggccctcagctcaggcctaagcgaggcttgatgttgtctttatacagtagtgactgccttgaacagtaacaaaggtgagcaatcggtataggataggtaaggcagcaggaaaaggagggataggtaactgatcaaaggaaatagaaataggccttgggatgggggcaggcaggtgggacgcctcagggacctgagagggacaaagcaccacggcagctgcaaatgaagatgggaacacagacccaggctgagaacatggagaagcgaaggtcccacatgatgacacaggaggagatgcgctggtggtcacacctttcagggaggtgagtatgaagaagaggagtacaaacctgtcaaaattttatttttaatcttttttttttttttgagaataattctcactcttgtcccccaggctggagtgcaatggtgcgatctcggctcactgcaacctccgcctcccaggttcaagcgattctcctgcctcagcctcccaagcagctgggattacaggcgcctgccaccacacctggctaatttttgtgtctttttttttttttagcagagacgggatttcatcatattggccaggcttatttttaatcttaattcattaaatgaatgattgctaccagtgtaattgttttattttaggcccggaaaaatggaggttaacttcattgtcatctgtcatggaactgtggccacaaaaagaggcgtctctcaggccaggtactgtaggagtccgccccctgctccatctgtattttttccactcacagtccacctggcatgagaaaggtgttgggataaaggtgagcccagggcactgtgggtgcctccgagagaatctgagctgggggagtcagggtccttcgagagcctgccattaatatggagggggaaagccagggctaggctgcgatgggtgctgttggtgggggggccaggcctgcactctgtacgtgagggtgaagctggagaaggaagcagcctagagaggacccggagcagggcaaacacagatggagaagctgagggcaaggaagggaatgacgtgggaccccacccgttgtcgggggcaggctctgctctccaggaacaggtaacacagtcacttagagaacagtcactacttgccctgccctcctgagtcccgggaggaaagtgctcgcccattcctgacctgtgacacgctcactgcgaaggcaggttattagaagagtcccatgaaagtaaacagggtattaaaacggatccttaaaaatgaaagtgcaggctgaaagttggtagtgtgggaggtagagggtgtgtgttcttgtgcagaggagcgtggggtttgcagagg

SEQ ID NO: 36870 - DNA, 2300 bp, Homo sapien
caaggtagaggagagttaaatgccttagagaggtggggcaagaggaggactgaagagggttcacggatgtgagaccagcaaagaggccactgaacctggcatcctgaatcactggtggctatagctgaacctgtgcaaaactgagatggaggcaaaatttttttaagtttaaaatttttttaggattctagcttcactatttctactcccttctccattttgatgtttccttttcccctgctccttctccagaagcccagcagtgtcctatcctccccatcaaaacccattctcacgttgtgcatgtaacttttgaatcacagctgaaacgttactctttactgaggcatatgtgttttaccagtagtaagaaaaaaggctgagggtttaatattgggtggaatttcctacagatacttctaaatgtagaatttttgagctgcaaatggacttagatctagtaatcaattcaacagtccctggttccatcaaataaacattaagagttatttacataagcaaattgccaggcactgtgctaggtgctggtggtatactcacaaacaaaccacaagcacctgaggttgggtggctttacggctagtggaagagataggcacttacatgggtaatttcagtttaaaaatgtgtgcaaggcagggaagttataggaacctttctggaaaagatgatactgaaacagaaccttgaagtatcctttaactagatgaagaaggagctgggtctgggcagaatgtcccaggcaggaggaacagcatcatatatgcagggaactacaggcactttaactttctggaacctaatgcatacaagaactgcaagacacgaggagggccctgaatgctgtgcataagtgcttgcacatttcctgtaggtcagacactttcacgtgtgaaggatgagggagaggaagaaatccagatggttttcagcttcctgactaggggacctgagtggatggtgacgccattcactaaaatgggaactgctagttgaggagcagtttgtcagggggagggtacttgtagaacctcaaagtgcatatgtaccatagcaactaataagttgtaagcttaagggatgaggtctaggctggagaaatagatgcagagatttggtgatttgttctgtatcaaagctgggttgcagtatgatttggactaggaaaggaaggagggtaagtgttgagagcttaggctctggaacctgcctgcctgatttaaatcagtcttctatcacttacttgatatgtcacataggacaacttaaataatttgagtctcagggtcctcatttacaaaatggagtatacagtttcctattgctgctgtaagaaatcaccaacttgaatggcttaaaacaacatgattatctacagttctggacatctgatgtccaaaaatgggtcttacagggctaaaatcaagcgttggcaggactgcctcccttctggaggtggcaggggagaatccattctttgcctgttccagcttttaaaggctgtctggcttccttggaccatgacccatttcagcaacggcatcgctcctacctctgcttctgccatcacatcttctctgacatgcctgcctccttccccagtggacccaatgtacttgtgattaccttgggcccacctggataatcgagagtgataacctcaagattcttaagttgatcacatatgcaaaaatccccttcaatgttttaggtaacatatatgcacagactccagggattaggacatggacatctttgaggggaccactatctgcctatcacatggtataatcaccactgcacgctgttgctatgaagtttgattgaaataaccatgtaaagtgatttataaagatggcagtcatcaagacagacattaggcaaagatcttgctttcaagatgctcacattcttggtgcaggtatcagaaagtaaacaactgaaatgtgtaggtaataagaaaggtggtaaactctacggtgaaaggactgggatagggtgccctttcacaaagagtggtcaaagagggcctcactgagaaatttgagcacagacctaaagagagtaaaagagtgagccatgaagatatctaggggcagagtgtgcttggagtcagagaacaaggacgctggtgtggctggtgtggaggcagcaagggggtgagtggcagtgggcaaagtaatatggggaggggggaccacaggatgcagggccatggtggcactttgaattttacatggaaatgggaggccatgaggaagtcactccatatgagcaaa

SEQ ID NO: 36871 - DNA, 2300 bp, Homo sapien
cttagcaagagaagcgccggaaaggaagtatgacagaagcaaatttgagtctcctaagagaatttagaggtgaggatattgtgggctacaaataagagggaatctatagtctatatgacagatatctccataaaataaatataaatgataccagccattaaagtaactaacttcctttggtctgattccatggtcaccaagcaaccttcagattattacacagcttttcagttagatttcctacaaaagataaagtaatgtgcctatgaaaatgagaatttggtctttggttaacctggctgtactggagagcactgaacccatctcgagatgccaatgacacttctgagtttgcaagccagtgccctagatagactctggaattcacccaggaagcgcggactaatcagctttctctgaagataactgctcacacacccagccaactattttaaactagaactgatgttcctattggattaaagcctgacacgaagtatgtatttttcagtttaagcacaggacagttagttttatgaagtattttgaaaatgcatgaacttaatgatttaatattaaaagcttatggagatatcctaaacggcaacttaaattactcttccagataaaacatatatggtacttacatatactctttattaaataaacaaaaacaatccaacaactgcttgtcacctttttaagtatatttttatacttacagcatatatgtaaacaatatatttttctttcaaaagttagttattacaggatgcattaacaagatgccctctgggaaaatttcagctttcttttaatgaaacttatttcaaggttaagttaaaagaagtcacactaaagggaaatctgttgtcttcttcgggaaaatgatataagaatattaataatctaatagaataaatatgctttcaataatgaaacaaaaaaacacaacttcgcagctggctatttttattgtcctttgaagaattctctcccaagctactgaaacttaaagtatcacactgtgacagactttaatcccatcttacctggtgtccacatttctaaagaagctgcttattgcctcatcataaattcctttctaaaaagaaaaacatatgttaatagcatttaggttttgcttctcgcccaaatcaagttctttcaattttaattacataatactgtaatggctaggatgagactctgataagaaaaaccaagtatcacaaaatgcggagcctgactcttcccaatctccttagaagagtaaatgccagatctacagataaaaagttcagcagggggtgctaaagaaaggatttcacccataggactgtaggacaggtccatcaaatgagcgttctctggattcttcgtaatctttttaaaagctgactggttaaattaaggaatacaataaccacacgtgttatctattttacaaagtactttcccatatacaaatctcactgttctgcacacgaacaccaataaagaggagaccctgagaatcaggaaaaacgttaagactaaggtcgctggccagtgttcttttagtttagtgtgtgtctgacgcaacatgtttaaaaaccagtacgttctttactgggaagatcccatgcatcttaaacgggtcagatgaaagctcaagtcgattatttcctgcgtatgggctggaagacctagctgacaggcgagggggctcgcggcggcgggcgggtacctggttgaccgcggcgtgctcccttagtgccaggtcccagaagcagcagccgatctggtttccgcactggccgactgcgaccggaggagaggaaggaaagagaataggacattaagcaggaaacatggccgctggattccgcggcgaccaggtctctacccgcccggcgtagcttaccctgtacgaccaccgactgggtcatggtggtgcgccgccggctccgggagcttgctagcccgcggccgcttctgcattcccccagcaacggcgctctgctagagagctgccgtaagtcacgctactgccgcaagcctctgccgtcgctaagcacgtctgtaggttcaggctaaggttttccgtcagaaggccgcgcaagtgcacttgcgtgtcaccgttaccgtagcgactgggcttctggactgtatatcctagctgccttgtcaacatcttcgagcatcggcagctccggaggccggggtaactggcaggtaactaggctttggagtggtattttaaaatatgtgtcgttaagctgttcgtgggctatcagaggtttaatttttgttcacag

SEQ ID NO: 36872 - DNA, 2300 bp, Homo sapien
ccttagttcttttatctccattttatttcatttattcatcaaatatttatttactatctactatatgcaaggtactatccctagtagtggataaaacaacaagactcagccctcatagagcttgagtcttattattttagtatcttgtctttaagttcctgttttattgcattcatattcttaagttcttcttcagcacaaagtagatatgatgaattttcttttctcccctcttaggctaggttttaccccaaggtcttgtactttatccatcttttacatcgttccttccttcctctcccccttccctccctctctcccttccatccttgtcttccttccttcaattttaggagtccataggattcccaataatttttttctttttcattttcagcatgtggaattctgttcactctatttgctctgtatgttggtcagctatcactacaataaaactgcaccccaaaatttcagtaatttcaaccaaaaacatttctcttgcttataatattctgaatagcccgctgcggttcaaccgatctcaacttggctcacccgggtttgcatatacggaagttttggagtggctggcatgtgaggctctaccttgcttggctcttaagcagaactgtctctcagtctgattctctagagactgaagttattaataagatgtgttaggacttttctttcctgtgtggggaataatgactgggactgcatgaagggtagggctctgcaaaggccagtgtatcatctcacctagcactgataacacactgatacagacctattcacatcactgcctacaaactggaccaagacttgcaaattttggaagccccagacgttgggactttagcatcaagacctaaaatgcccaactttacctctaccactgaccccatactcagtaagaagttaagaataaatccagcctacaaaaatttactgaccgaaagctgcctattaccaaaagatataaaatccattgcaactttaaacctaccggctaccagagaaatttaatagtaactactacgtgtcttggtgggacaataaagtgttctaatccattgaatattacagttcatattagcacatattcatagcacataccatataactttttattaaacaaagaagacttcttagagtttcgtagttcttcagaatttttgtggaaaatattaatttcattaaagaagtacttgagttcttaattaaaatctggtctaatttgatcaatagaagtttacatattttaatgtttgacaattttaagtagttggtaattgtcataatgcctaactttttaatcttctcctgcctatcccatctaaatacccatctaaatgcctagtgttaatctcgtgtcttctatcagacttctacatactcatctacatcctcaaccactgaatcctattgcacttatagtcaacgccacacaattctttaagtatttcgcgtgtatgtcttcaattagattgtaagcttcttggaactggatctatgccttaatttctttctaatcttcccagcgagcctacaagttaatttggggagtatacagcgttcaacaaatactggttgggtctgtgaccttagctttgccatttttgtcaaagcgtataaccatctagtttcaattgtgccctgacatgactatttctctggggtttctctttgctcaacgccattgttcattttctattagaataaagggcttgttgaacagagatgccaacgcagcgtcccgtggaatctgaataaacggactgatccaccgccccgggtgttgaggctgtgaacaaaaattaaacctctgatagcccacgaacagcttaacgacacatattttaaaataccactccaaagcctagttacctgccagttaccccggcctccggagctgccgatgctcgaagatgttgacaaggcagctaggatatacagtccagaagcccagtcgctacggtaacggtgacacgcaagtgcacttgcgcggccttctgacggaaaaccttagcctgaacctacagacgtgcttagcgacggcagaggcttgcggcagtagcgtgacttacggcagctctctagcagagcgccgttgctgggggaatgcagaagcggccgcgggctagcaagctcccggagccggcggcgcaccaccatgacccagtcggtggtcgtacagggtaagctacgccgggcgggtagagacctggtcgccgcggaatccagcggccatgtttcctgcttaatgtcctattctctttccttcctctcctccg

SEQ ID NO: 36873 - DNA, 2300 bp, Homo sapien
gtgagtattggcctgtatattgagaatgagtaggagtttatcagatactcccaagcaaggggtaagtactatgagaacagatagatgtgaagcagcgtgctaagttcttgggactggaactgtggccttgtggaagattcattgtaaggcagagagaggaggagataatgctgaagaagctgtcagaggcccaattgtgaagaaccttcccaaacacgctcgtgaacatggggacttcagcctgtggactctggaagtcattcaggtatttacccagaacaatgagctgattagatttgcactttagaaacgtccctctgcagtgtggatgatagactagccagtgaagactgacaataggggcactgcttaggagaccgccacagtggtctagagaagagagcagtgggttgctgtcttgccttcatttgaaaagaatttgcacagaacaaggatgaactgagactgtggtcatggaaaagaggaagagaggccagagtggcaggtggaatgaaacagacttggtgaccagttggaggtgagaaatggcaaagagagaagctccatcctgagacgtggatgactaagactacgaacacgaatggattactctggacattttaaaagtgaaatatctgtgatggcacagagggcagatagagatgtgaatctgcaattcagagggtaatcagggctggaaaggaatttagggtcattaatgtttaggaggtaggcagaagtagatattactgtacaaattctgaagtagcacaccaatattcctactattggtttgtccaggactgttgctgtttatgcttgtgtcccagaataattactaaaagttctccctttcatgtgcaaaaatgccccaggttgaaccataaaatatatgatcaccctagatattggttatcatcctcacgtcatctaccttttatgtactatattaccaagacatccttgccacttttatgtcaaatatgtacaagaagaattttctgttgagatgagcaaatgactaatacatttgtaatgtaaaccaccaactagtttacagttacaaggtaattttttaatttcagcttttcttaaaccgaggcgcacctgttttcccacgtgcctatatcattattttccttccacaggcaaagttacaggaaaaataaacattcatataagccatcactataggttcaattcagtcatcttacaatgtaaaggaatagatgttcctctttgccactgatccagtcatatatacagtatatcaatagctatatatctctatctacctgtatcttagcgccctctggcgtttgtcaaaaagaagaggttttcttataggcatgacatttttcagctgtctctcatcacttcaactgaagtttccatatcaaaaaataataagtttaatgacataggaataacaatagagctttactctgaagtatcaagccaaagtaaaaactaggggtgttgtgctttgcaaatataacttaaactggatcaaagatcaactcattaaaaattctaaaattttaaatgcttgtgtccgtattttttaaaagcagggaggagtaatattaagatttattatagtttctgcatatttaattttaaaatgaccacaaatactgtttttctggaaagcactggaacaagccaagaagaagactggaattgcaggaaggagtataatgactcagaagacagtgtccattcagagagcccacagtttatgaagggactgatgaccacattgccgctgcacagtgggctctgtgactacaggagccttgctctgtagggaggggattacccttctccaataaaaagcctctgggcatgtgtttgttataataccatttctgcattctcttccttgaccatctgagagggccacttgcttgggttattcctggagagtgtaaaaacgttcccggtaaaatcatggcataatcctctgggtagaatactggatgaaaggagagaagtttaaaacaaccacttccctatcctcaggaaactctgtataatgggtctaccagcgctctgtgtggcagatcaccccacagctccttcacgtattgtagcagtttttaaagagctgagccaaaaaagcaacagacaaggcaagtgggcattcgaccaaatgccagactaaagaacttctcttcctcttaaatataacccatagatcagtccttcaaatcccaaaagtaagtacatgtcgcccatgctgtgcatacagggtggtgtcctagccttgaatcatttctgtgctcttagatcacatt

SEQ ID NO: 36874 - DNA, 2300 bp, Homo sapien
agagggcccagattaaattaaaaagtgtgtgattaattggcagctagtaaagaacaagatgaaatccttcagaaaacaaatatatgagttttggtgagctgaagagatctgtatctgaagtcagaatatttaatatacatcatatataattaatattattattatttaatgttcttttaaagggtgactgggtcagtataactgagcataatctgttttgtctcagagtctggctatcttttttcccaatatcagtctctcaactaaaccaaacatgtttttaacttctcccacttaatttagtaggttaacaagtctatgtaaaagaagagtatcataatttagcttaatagtcccttgcaatactattttaatattttaaaatcaaaatatcactttaaaacctataggaattatttttgcttcctttggctttggttcttttgtatcatacaattttatcatttaaaatcaaagatcttaccatcagatttacctgggctatagtagtaattttaccacttacccatggccaaatgtgtatgacaatccctacttcatgagattatcataaagatgaaattaaatgagacaatttttttttttttttttttttttttttttgagctggagtctttctctgtcacccaggctggagtcagtggtaaaatctctgctcactgcaacctccacctcccgggttcaagcaattctcctgcctcagcctcccgagtagctgggactacaggcgcctcccaccatgcctggctaaattttgtatttttagtagagacggggtttcaccatgttggccaggctggtatcgaactcctgacctcatgatccacccaccttggcctcccaaagtgctgggattacaggcatgagccaccacgcccagccctaaatgagacaatttatgtgatttttttgcacatgggaggcactcaaaaaataaaagtgtccatttccttcacctctgaattcatactctttattttaaagttgcagtgtcgtgtatacagatgtaaaagagagctttggaatcagtgaggcctggatccaaaccccatctctgctttccaccagctgtgcgaccttgggcaaatgtcctagtctctctgaacctcactttcttcttctgtaaaaggaaaataatggtactactttgcaggaatgctgaggtttacaaatagcatatgccaagtatctggcacatgttaggtgcaaaataaatggttttgcttacacttagataaaatgacttttgttctatgaaatggagctaatgattaggttttatggaaaggctttatttatttattttatgattaggttatacaaaaatgctttatttcacctggaagcttacctgggtgtcattttatggttgtctcatctgaccatttttaaaccatggttggatcttgtggaaatgtttagagctcgttatgaagccaatgtaaacaaaggtacctatcagctgttgcagacactatcccatccacaggggcacccctgacatagctgtagcccaacttcaccctgaagtcttggaaaggttacatgattcagacagatgtagtaggcatgagattacaggccaagaggaagaggccggggctgtaggcagtatacttgacaggctcatacactgcaagccttgttccgggccccttacaaagcacctctttaggatgaaaacaagatggtctttgtaaataaaagttcatgcatttgggtaatgaagtcattttccagcgctgcagtgaaagatattcttctcccaagccctctgggtgaggactggagggaggaagaggggtggccagtgaatctgaagagaagatattagcacaaagagtgcaacagtctatcccccagaaaaaacccgagaaaccttgctcaagaaagtgggcaccctgaccctctgccttcagagatcatctacctttggttcctgccctggaatcccttttccacccactttcctgcaaactagcgggggccacataaaatatctatgtaaatatagataagacatccggtaccttgactacataaataagagtggtgaggaagcgtcacaaaagctgaatattcttctggagcccttggaggggctccaaactgagaggggagggaagaccgcagggaaaggcggacctcagtgtctgaaaagccagcttagagtgggagggcctgggagtagaaggtaaaaagggagtggtgagaatgaatgtgagaaggaagccaggacagcgcagtccccagtcccgaacggccagggagaggaggtg

SEQ ID NO: 36875 - DNA, 2300 bp, Homo sapien
atctcttaatttttaaagcattactgtgcttatttagcagatgagtaaactgaagtataaaaattcttatgtctagtcctgcagtaggatatacaagtacaaagactagatgaaaacagtgcctctttgggcatatattttaaaaaatccaaacaatacaggaagatatctgaaaaaattaagtaatgctaaaaggaatataaagaaaaatagcactatatctgccccacccttatcctgccctgctttccaatggcaccagtttttattcttttaactattttttctaatattcaccttcacatttttaaacattctacacatgctgctattcattgtttataaagtttacactgtactctattgatttcctatgtgaaagttggagattctactgacttttgagcccattgacaagatcaaatttacacaaagaactcagaatacgaagaggaaagaaaatttcaggagcattctttggagaaattggtgctgtgactactagcccccttttcacctcaaggacaggaatgctatgtcagtttcaacttgctttgcctcaagtctaaaaacagtaggctccaaagtgaccatcagagggatccacaggaccctgcagcgggaacacaatagacatgtgctgcacttctggaaatccagaaggagagagagaggtcagcaggcggctttcatggcagaacaggcagaaagttgaggctctgtgggaagaaactggctcccctctgacagatgatcacaggtctgtgaaattcaaggaccagatgtagtaggtatggtgggcatacccaaagatgacctccaatgagtcatgattcttctgtacaatcccctcctgtttaatgtaggcagagcctgtatcttgcttctggtcaatagcatatgacaaaggtagttggatgtcactcccttgattatgttacatggtgtggaaaaggaacgggatgtctctaccttggttaggcaaaggtgataggatagtcactcccatcattacattacatccatataggtaaaccagttagattatctttctgtctttgcaagacatctgatcaaaggacctaagagaggaagctaagagagcaaagaactgcaagtggcctccaggagctgagagaagaccccagctgacaaccagcaagaaaacaaggacctcagtcctacaactgcccagaactgaattccaacaagaaccacaagcacttggaagaggaccccaagctccagagaggatgcagcccatcagacatcttgattgcagcattgtgaggacttgagtagaggagcctgcttaagccaggcccagactcatgacccacagaaactgagattaaaaaatatatatgtgttgttttaatccactgagattgtagtcactttttatacagcaatagaaaactaatataaaaggaatgttgctctgggatagtatcaaagtgaatcctgcccagagcccaaaggggtcccaacagcaggaaatgtgtggggctggtcatcttctacaagcagaagctgactgagaattggaagcagcctgcccaaggacaacatgaacagcccatagtatcccaggggctggagagaggtacctgatgatagtggtctccaaagaactcacacgtagggaaagactcaggtgaactgtctgccaagactatagcactcaaagccacctaaaccccggaagaatttcctattccctaagccagtgatgtgttaataaaacagctctccaagggcagggatggggaagccttgatctgaaatatttgctagtctctgtggtgtagatacacccaccatgactaatctcaagctaccagcagtttaacaaccagcttataacattcctgatatttaagtggctctcaggaggcaatactttcacacatcacaaccacctccacttccccataccttcccttccaccttccaccctgaggaatcagccagcctgaaggagtggggcagagagcagaagcctgcccttccataacagatctgcggctgggagggagaggagaagggacttctcctagaatggaaatggtgtgctgattcataccttggactagacatttagaaatttgagacttcttgtgacttaaactgcctgttctaccagagtaagtaaaagttcatgggatcttcccagatttacacacacacacacgcacacacacacacagagagagagagagagagagagagagaaatataatgtggtaagaaattaattttctctgtaggttaactatccaagacacagataaaaattg

SEQ ID NO: 36876 - DNA, 2300 bp, Homo sapien
ttgtcttgaactcctaacctcgcgattcacccgccttggcctcccaaagtgctgggattacaggcatgagaaaaaagtaaataaataaaaaagagaagagataacaaatgctggcaaagatatgaagaaaagagaaacctcgtacaccattggtgggaatgtaaattagcacagctattatgaaaactagtatgggggttcttcaaagaactaaaaatagagctactatgtgatctagcaattctacttctgaatatatatccaaagaaaataaaatcagtacattgaagagatatctgctctcctatgttcataacagcattattcacagtagccaagatagagaatcaacttatattcatcaactgatgaatgcataaagaatcaggatattcctcaatagatgaatacataaagaaaacatggtacatgtacatgatggaatactatcgagtcttaagaaattctatcattttcaacaacatggaacctggaggacattatgttgagtgaaataagctggtaccgaaaggcaaatgctgcatgatttcacctatacgtggaatggaaaaaagtaaaaaaaaatgaactcatggaagcatggagtagaatggtggctaccaggcactgggatgaaaagaagactgaaatggggagatattggttaaaaggtacaaaattttcaggtagatagaaggaatactctttggagatccattgtacatcatggtggatataactaatgataatgtatagcacacctaaaaattgctaagatagtagattttgaacattttcatgacaaaatgataagtatgtgaagtgacagatatgttaattggcttgatttaatcagttcacagtgtatacatacatcagacaattaaaaaacaaatagtaaatctgggtaaagaatatatctctttttactattcctacaaattttctgtgtctaaaattatttcaaaataaaatgaaagaaaaaataaaatgacatttttgaataattaaaaaagagagtgtaaggattcttgagattaaaatctcaagtttaaagggtcttgagattacaatttaaaaagtttgagctcctaaacttatgtgatctgcccaccttggcctcctgtaatcccagctactagggaggctgaggcacaagaatcacttgaacctgggaggtggaggttgcaatgagccgagactgagccactgcactccaacctgggagacagagcaagattgtgtcaaaaatcaaaacaaaaaaaaaccccagcaacgcttgagacctgctcctgcaagtatttaactcacagaaaaggagatagcaccaggtaaaaatgaagtaaaagctgtgtaagctgtgtgttgggccttgcagaacaggaagcctgagaaaggagaggttatttagaatgcagcctctcttggggaaaacgtatattccagcgatcctctctacaatgggacttcattcaccctccaaatccttttttggaagtttgtgtcttagctttcctctgttgtgacttttactgctccttctgctctcgatacagacaccataaaatttaccgttcatccaagaacacttttgagagtaaaaaatggaattattaataattacaggacaatagccttgcctagctgccatctttcttatcctgtccagtaagtacccctaagagtagaattgttgagtcaaaggacatgaaaactgttgtagatcctgtccgctcatgattctatcaggaataggaacaccaatgattacattagccacgaggtgattaggtttcagcagtgcatttctgtatttgatctccaacacattttgctttttaaagttgagttctgaaattagagacaagagcagatggcagtagattcactctaattcagggagttattaagaaattttgaatttttttactatataatttgaagcctgctttaatgtcatcatcataaacggaagggtgggttgatgagtttactcagattagagtggtacaacctttggggcggagcctctgactctgattggttggacaatgttttccaggcagtataaaaacgctggtgtctctccgcggaaactccgagaggagcagaggtctgtagaggtagagacgtaggcttcggatcttttagaattctgctggaagtctccaagtcaaggtaagttataccttctgtttaagctatttccaatgtcctattctgtctttggctacaaactggtgttttcgaatgcctttaactatttattttagaggagaaagaactagttttttcctgtg

SEQ ID NO: 36877 - DNA, 2300 bp, Homo sapien
tattggtgtaaaagcaatagattcagtcaaatttggcccatgttatttttctgttcttgaccaaaagttgtaaaatttggaaaaatcaaaggaaacagtttttattcagacttagtgatatcaggactaataagaggactaatataattgaatgtttctttgctcattctttcctgagaattgttgaaatgagaaattatctataactgtggttttagtgaatgcatgaatgtgtgtgtgtgtgttgtgtgtgtgttcataagagaaagagagttttaattctttttctcttctttataatgttaacctgaatttttgtatttaaagttttttcccttcaaatgtctgcattttggcatctaacttcagagacccaggatgagttacatatgatagatccttataacgaaccattagtctcacttcttggaaagaatattggagtttgtgctaggctcaccatgagaggtaaatgcttaccagctgattaacctattgataaaagtggtggtagatgtggctacatggctattgcgcagaagcacaagggaaatcttcatggtaatgggatagatctacatcttgattgtgatgctgtctgcacaaatctatatgtgtgataaattagtatagagctatccatataaattttacatgtatcaatggcctggttttgatattgtactatagttatgcaaatataaccattgggagaaacttggtgatgagtacataagacctttgtaactatctttcaaactttttgagaatctataattattttaaaataaaatgttaaaaaacgttcttttctgcatgacaaatgtgctagtcatgccactgtacattctccttggatcattgtacccactctgatgacttaaactactgcaggcatattgaagacctaagaatctttattttattcagatatcccccctgagttccagactacataactctcaggctgtccccatgggtacctcaaattcaagatgtccaatgtgcatccccccaaacgacaaaataaatttcatcttaaaaataatattggttatatatatcttattttctcaaaatacttttaaaagtcttatttaattctcacaacatccttcctaattggttaacagaaatactattatcctaatctaagagttaaagaaatcaaagagagttgttaaatgacttgtctgaggactctggttaatatagtagaagagtaaatattaaacccacatatcttgatttatattccagtactcttttcaaaatactattattgccatctgaagtcaaatgctagtgcatctttaatatattataacacatgcaagtaacttaaaagtagtgtgtttatactttttttctaaagtacctgattaaatagttctctagagaaacccacatgaagtaggtctatatttttgggcattttaaatagggcactgaatgtagtatttctcgtcagccattcagcatatattactctcatttttaactctgtttctttgtgttttaattctgggtgataggggcacttaatataacaggacacagcatgaagctttttgctttcttagggctttaagaccaatagaaaaaattaacattcttatagaggaaaaaattctgaaatacaaagtctctgacatctgtttccctcatttatttggatcttttaagattagcttatctcttctgggctcttggagtcttaaattgaaaacactgctttgatatatgtgtgtcgctatgatttgcacactgttaaaatgaatatcagatggttttatatttttgcaaaggcaatagctcaagcaggtaaactttatcttatgatctgaaaaccaagatgttgagacatggatatcaaagaatattgcttaattactttaaatatcttaatattttaaagacttgaccttaacaaaaattaatttaaattatgttgtacgttataagatgtatatccagcacacacttattaagtatctggacacagacaggaaagtaagaaaggcctttcaccaaggaagttaaacaaagctacagatacgttccattttaaagagaagcaggaggaggagccaagatggccgaataggaacagctccggtctacagctcccagcgtgagcgacgcagaagacaggtgatttctgcatttccatctgaggtaccgggttcatctcactagggagtgccagacagtgggcgcaggccagtgtgtgtgcgcaccgtgcgcgagccgaagcagggcgaggcattgcctcacctgggaagcgcaaggggtcaggg

SEQ ID NO: 36878 - DNA, 2300 bp, Homo sapien
tccgcctcttccccctccccggcccagtgctccgaatcttccccggccgttgccagggagaccagccgataccaggcaaataggcgtaccagaaagaaaaggggggaaagctacacggcagcctggtaacaaaggagcaataaaagcagcccccaaatggagggctaaggacgcgtctgggagaaaatctgaaagcgagctagcagtcaccccaatttaaaataggagggggatgcggaggaaggggcatgattcacgttgggggtggggggaaatcaagagccttaaatgggcttttgggaatcgcctggatggtggtgtcggatcagcccagttggcttttcaagttggaactgctaatacaagggatttgcgtccatcctggcggctggggtcgtgggccaggccagcgggctctcttaagggtaataacacgtttgctggcaagatgcatttctacggaaacgtctttacatcagctctggggaatatgaccatggtcgaataatgcatctgaaggaactggacagtgagaagacgaagcttcacgtaacaatgttcagcttggtgatttttaaagcaacgcttgaacaaagagttactggcttgaaccaaccgtctttttcactcagagtgtgacctatttccctacaatgagcagaaaataaaactgtttgagaattcagagccagcaccaggagaaatgaaccattccctcgactgcttctcaccttcataagcgaaagattattccttgcaagatcaccaaatgtaaacgagaaaaggtggtctgattttgccacgagtgaaaactttgggaagaaaatgcttattaagctgtttccttggttcccctcacccctcatactttaagtcagtgccttgtctctcacgcacaaaaagcgtctggtacttcggtggcaaggagtgcagtgacagatggaggtatcctgtgtaccattatagaagcttttcctctaacccaagttagacttggagagctcagggatcttgctatctctcaacatacagaacatttctccttagaactgcaatccggtttagaatgtcatcgttgctgctgcctcccttcctttcaggagcacattcgcctgcgtgcgcactcacacacacgttcaaaaagagtccattcgattctggcagtaggctgaaaacgatccatattgacgcgaataacatcccaactgtaaatatggattcgtctactcgaggctgtgtctcatttcaccatagaggaaaattatgtcatttaaaacagtgataaaacgcgaagagtttcgatcttctgtaaatggctctcactttgaattgtgggggaaaaaaatcactaattgggaatagccagagaagggggaatttgttgagcgcccaaggccaatctcaaaatattttatttcatgccaatgtgggagagggaagggagtgtggcttcgctgtttgccgcttttgcattttccacatctggcctacagacctaattctaacttgcgatctcgcttgatgaaattcgatcttcgtggtttaaatacctttcaatttgggacgatttaaccattgcagcagttcaaaaaacaaaccctgagcattatctgtaaaaccaatatggaaaaaagaaagaaaacatgctgcaaacacacaaatcgcaaccattgtctttaacactcgcatacacacacatacacataaacacacggaaagatgggggaggggagcgagtggagagagagagacacacggatatagaccgacgagagtcaatgcgagtcaagttaacgctttctccgccccgatgcacaagtacccccctcccgtgttaattaattccaaacaaagcaagccaatcaagaaatgcattattattttcaagcagagagagacgagtgccatgtattttttaattgatttatttatttggaggacattaattctcggtctgaggctgattttcaaaccgtttgcaaagcgcggctccattgttcgccaggcgcgcagaccccgccccctgctttgtgtgcggcgcgcggattggccgacgcgcgcgggggccgcgtcagcgcccgcgagcccattcatctgtgcacttgggcgttggaccccgcatcttattagcaaccagggagatttctccattttcctcttgtctacagtgcggctacaaatctgggatttttttattacttctttttttttcgaactacacttgggctcctttttttgtgctcgacttttccaccctttttccctccctcctgtgctgctgctttttgatctcttcgact

SEQ ID NO: 36879 - DNA, 2300 bp, Homo sapien
gaagtctggaatgttgatggttgggtaggtattttaacctagcttaacctctatcacaataattaattttaattgcttttcaccttggttacgtgatcccccaactccatggaaatgatataaccttgtaaaaaataaaaaataataataaaaatcttgacatgagcttcttaaagaaacagacgtgagatttgactttagcattcagtaaccaaaggtataagatacccaaaacaaaggaaatgtggtgctttcactgcttgtttttagtgctgccacttctctcccaaggaatgtcgctgccttaaactctgttctgtggcagatacttcctgcccctatacatcaccttcagatgtactatatgatcaagatctttaccatctggccactcctctagctctagtgttccaaatggcttacatttttaatggttctttgtgatctccctgatatagaaatacaggtatgcaaggacatgtgcactcataaagagtctatcttccttctttgcattcctgtgtgctttagccagaagagatgttttaggatggtggtacagtgagaaatttatgaaacaagggccactgggccaccaagatgactatttatggttaagtggaatccaaaaggatgatatggggtatctctttctttacaagtagtagccactgccattgaacaaatatttaaataatacaaacaattgttaataattatttagctcctcttaaatgagtcacgtgtcccctttccatgtataaaaaccgtatttatactttgtgtttcccttgtgctactcaaaagatcacaataaaaacattctcttgaaaaatttacttagtttatttcactgacttaaaaaaaatttttttttactgcattttatgctagattcacacatttcacatggtggttgaacatataaggaaagatatatttttaccacggcttgataacatttcttcaagatgctatcctcacaacagattatatttattcagaaaatttgaagtgatctatttgaaattacctctagtagtttgttaaaatgtaacagatccatttatagacttttaaaagatggaatttttataaaggtacagttgtttgtttgttttttagacaaagtcttgttctgtcaccaggctggagtgcaatggcacgatcttggctcactgtaatctccacctcctgggttcaagcgattctcctgcttcagccttccgagtagctgggattacaggcgtgtgccaccacacccagctaatttttgtaaagatgggatttcaccatgttggccaggatggtcttgatctcctgacccattgatccacccacctcagcctctcaaagtgctgggattacaggcgtgagccaacacgcctggccaaaggtacagttatatgtgagttatacaatagattcccaatagggtaagaccctgggggagtaacatcactagaatccgatgtgtccatctcaaatagttttttactgaattgattatgtctcaataatattttggaatcttgataaaaacttacttggctaaagtataccattaatataaataaacaatataaatataatataaataatataaataaacaatggtatttaccatattacctttaccatgtgtatttgtatccaaaacacactcatttataccatatcaaggcatagcaactccagtttgtttgaagaacattacttgataaacagcaacgaagacagaagagttgatggaaattctgatattactaccacctcctttccctactattgcccttgtaaaacacagaaatagtttgttcatgtgaccaaattgaagtcttctttcactcaggaatatagaatatccaacatgcgttgtggtgctttaaagatggtcaaaattctttgacattatctcatcaagaggtggtgtcaatgtccttctttcccagaatctgggtgggctcagagactgctttgaccaataaagcatagtggaagtaaaactgtgccagtgtctcgggctcaggctgaaagagactggcagctttcacttcctgtcttttgaaagtctcttgaacttcggacctgggggaagccagctgccgagtgagaagtctgactatccggagatggcggtgagtatagagaatttctgctaggtctcctgtgtttcagccatcccagcccaggcaccacgacacattatcaaaggactatcttggaccttctcatcccagcaaacatccaatggagaagaatgaagactccaggcatatgatcccactctagccatccca

SEQ ID NO: 36880 - DNA, 2300 bp, Homo sapien
ttctcggggtgacagacttcaatttccttaatgctaacataaaatttcctgggtcatagcaccaggaaggcaacaacgtggaggtgaatgtaatagtgagacctccctgtagattgcagtctccatcggtcttccctggacctcagtcccacttgtgcccttctcggccttcctgtccactggccaggccccagcatcatgcacccattctcctcaaggccttcaggctcctgttgccacagctacaccagtgtcaatccctgaatcctgctctgctgccttactgctggtattgctgtggtcacactattactctggacttatcattgcgatttgtcactgacacacggatatcatgtcccagggaacttctttttttataaactcattataaacccataaatttacatttaattgatgtgctttaacttattgcagttattatttccgatattcaaatgggaatccctgaaaattggctcttgactctttgtgacacaaccatggtagtcttcaacagtatacttgttttcaggtaggaccacgtgttaaaggtgcatcttgcacatctttcactaagacctgcagctcggtatttctctaaggagccccgactcgtaggggagcattatctgtgtgttagggatgatcattgctaacaggttgttctttgtttctaggccttttcagggaacaaagctaggagattaggggtaggttaatgaatggatctgtagatagatagatagatagatagatagatagatagatagatagatagatagataatgtagataaaacatcatatttataattgaatgtttccaattcaaagtctgattcaggactatagggcttttatttgaccccacttaaatttacatctcttttcaacctaaatttctggttcccaacaacacctacatattactcacttgttttatactgggaaacatatacaatagtctcagaataataataggaaaactttccatgacgatgtaattactggaaacatttgaagtttgtgtctgtgtgtgtgtgtgtgtgtgtgtttttgcagttccttttgttctaagggtatatcccacttgaggtctacagtcaattcccaggttttaatgtcacttgaaatactttctcccaagaggatgtgccaccaactcaatatctagttaggtttgacttttttcattttgttttgagttttaacgattatatcttaatatttatcaactatatattttggaaatcttttcatacttgcatgtagagatattcttcttcttttttttacagctgtgtactactgcattgtgtgaatgtaccatagttgagggtcccctattgatggacatttgagttttttctaatacacaaattgtgctgtgataggtggccttgtgaatacatctttccatttctgtcagtgcatctttgggataaattagaaactgtaatgctaaatcaaaagtagccagtagaatgtctttttgcttgaataatcataatatttatcctgtgctctaagggtgaaatgatgccacctcttccccaagtgcagggaatgaagagatgagcctttggcccctgatatgtcaacaattatctctcctagaagaccaactgagctctcttaccagtagactttctggaagaacatccaaacatgtcctgatagaaacaaagccagatcttgtctcagaagaaaaaaaaaaaaataggggcaaaaatattctacacagatcacaaaagttttcttaggaaaccatgctccccctggacagctccccaggaaggtaacccttggcgttgatcttgcgattggaagggtgttcattttttaattatgctgacagacattcagtgagaactgtacttcccgagggctagtgagcagggggaggttttccctgttgtgctcaggcaggacgttccagggatctggggaggccctgacataactgcacgttcacacggctgcccctccctcctcctccctctgtcttctccaaaacaaatgacctcgctgggatcctgtttgccttttactgacttcctggaccaaagcagtgtgcctgtgagtgcaacagctgatccctttcggagtggagtttcctagctggtgcctgtcctctcttgagcctttgtttcttgagtgagcactcactggggctgtggctccatgaactggatttcaggaaaccagccaaggcattctctctctctctccattcctagaaaggcagaaagcctgggaatgggttcggcaggaagatctctgtacctcaatctccatt

SEQ ID NO: 36881 - DNA, 2300 bp, Homo sapien
tactgtatacaccataaaaacaagcactaaatatgtttggcctcaagattaattcaaaacaaagcataaacatgtctagatacagtattaaaaatgtgagtggtataactagagcctaacacagcttagctgctaattatatttaagtagagaaaaatcacatcgttttaaggcccagaagggatcttagtgactatctaattagctgtatcattttacagattcttgatgatcttctagtgtataaagaaggaacatgattcagaagtatgtttttgggaatttggaggcatggatcaatagctacagtcagagaagtaataacttctcttacttttcttcaaaggtttaaggatacctaatccatcaatgtctgaaggttcccttgggaccaacgtttcagtgacctaaagggttacctgaagattacataacgtgcagagaacaatatgtatatatttaaaagttctttcattaagatgcaaacagcctcagtggcagacattctgtgtggccaagaggctccgtgtgcctaacagccccaggaagcctaaaggtaggattcctatggttatagaatttgctacttccgtccttttctttttcactcactttcttccttctacttcctttaccaagaagttaaaaccatctaacctaggctagcagataattcagaccctattactacagatataacccattcccaatccaatccatgttatataccttaaagtcacgattctttgatacagaagctcctttccttgcattctcttctcacaataaaaaaagaattagtattgctacttttgtaagctgacaaaacaatgttctctggtaataaaaatataagtttttggatgaggtcagcacactatcacatattaataattagcataatataaacattaataatctctgcaaaatattttaattccctcccacaaaaattaaaagagtatgtgaaacataagcaactaggaactccactttaacaaacgagtcacagacaaaagacaaaataacccaccagagatttccaaactatcagctattcacttgttgctggccatcacgtaagcaggtgaatgggctacaataaagtatcatattaagtcacaatcacaagacaaatatttccaccctacttatcaagcttgcatcctttcccgggtacccgtgcctgctcccattcccacaacgaaggttatcataaatgggcccaggacaagagcgctgttcagaaactgctactcaagtgtaccctcctggttctagggttccattgtggtgacaacaaattacaagcagcttacttcctcagagcccatcactaccaacaccaactgacagcttcgagaaggacctcagtaccactttccctaaccaaaattttcctctttactccaagccctgacaaggataaatctctaaactttagaaacaatgtaattttacaaattaacttatacgcagggttacttcctttccaatttgatcagggaatgcagggcaagaataacccaaaatatgcaatgtaaatcatgttgaaattaaaatgtatttccatctccacccctccacgatggcataatttcaaatcaacttatataatgcatatctagtcctctgaaaaatcatttttaaaagtagggctgttattattctgtcctagctatcgcagatcaatttagatttgttctgtaagatttcagattttccccaaatgacacaggtggttattttatatgtatcagtcattaaaagattaatcctttttaactaaaaagagacagtacggtcatttacaagttaaagtagatttattctgagctggtgctctggggtcttacttctctaaaattttgtgatttacaatacaccacatgtaggaaacagcttccaaaatttgtattgcttcctacaaatcagacaggactttcaggagaaggagcctaggatagattctctgttaaattttggaatcccttctctcaagagtaacctactataaactatttaccaagcctttgtgaaatctgtataacaggttactactccattgagcaagaaaacacaggaaacaggattcgaagatttaatgttactgctcatactccaaattatagaatgcttaagataattaaattatctgacttttataattcactacacggtgacctcaaatttacctcattagaatatttagtacttctgcacttctcccacttctcaaagttttcccataccaggattccccaccacctaggaacagcctttgcaagataccaatgctc

SEQ ID NO: 36882 - DNA, 2300 bp, Homo sapien
gcactagagaaactattacatgcaagataaacctggtcccttcatttatgacactccattcatagtgggacattcagacgagttgtgggcaactgcaacatggttaagtgttgagctacagcatacaacgtacatggcatggagaacagtcttggcgggagaggggtcagggaagtcttcccaaaagaaacaaagtgtcatttcagacttcattgtgttggccctggggaagaacattcacttctactaaattcacttattctgttctcagaatcttccaagttgattttgtacttgatagagcacaacttagaaggtcaattaactttacctctaggccagtgtttcactcaccgtaatttctctagcaacttcatcagtcacctggggtcttgttaaaaatacagaggagggggcggagggagggcaggggccaccctggacttaactttttctaaatctcttgggggtgaggttggggaaaattgctgctttaagcatgaacactttcgggattttgaagtcaaacagcaaattaaaaggggtatttttggtagtggctcttaaattccagcatcaatacagcctttttttttttttaataggggtgtatttggggggtagggatagcaattttatataactgggattgggtgctataaaacaggctgttagcctccagccctcacctgcaaggtggctggcttaaggtaggtacttgataaatgtggatttatttaacagaggaacacttgtattcataacctccaagagtttcgaaagtctttctgctccaatcttccagtgtctagccagcagcattgctgcagagtggaacagctagggtgcgtggagtttgcagaatgagttcaaacctccagacttatcagttagcagtaagaacaagttccttaatctgcctccacctataaagaaggagtacaattgccacttacctcctagagttgttgagagtcttaaatgagattaaatattataaatagattatcaatggaatatattataaatgcaagtgcttagaactgtaccttataaatgagctccacagatgcttattaaaacccgagcggtgccctctccccttaacatccgtaataggcccccttacacctcatacccattacgagtcaaaataataataataataataaataagtgaacaaacgacaaacgagaaaactaggctaccaggcactggggcgatgggccacagcccggcggggtagtgggcccggaaggggcgcgggagtgggctctccccgccgggctcgcggcacgtggtcggcttgggcgggagcttcgcgacagtgggggaggggagcagcgtgggacgccgaggaggggtccagaccgccaaggctacgaggcgccgactgcgcaggctcggggacaggcgcaaccactgcgcgcagacctgagggggagaacgtccacccggctgcacgctccctggatctacttgcgcagcgaaagcttgtcttcttcctcattttaacactgtgtatggcgccgccttgcgcaggttgttcaccctaacagggcctctaacctcgagcccgaaacggcctccttctccagccgtgccccttcctcccccgtggaggccgcagtggatgcgctcacctccctgcggcctcctgaggtggtttggtggccccctcctcgcgagttggtgccgctgccacctccgattccgagctttcggcacctctgccgggtggtaccgagccttcccggcgccccctcctctcctcccaccggcctgcccttccccgcgggactatcgcccccacgtttccctcagcccttttctctcccggccgagccgcggcggcagcagcagcagcagcagcagcaggaggaggagcccggtggcggcggtggccggggagcccatggcgtacagtcaaggaggcggcaaaaaaaaagtctgctactactacgacggtgagcggccgggccggtgtcggggtgggcgcgcggggccgggcgctgggttccgcggctgccgtcgcgagtgggcgccggggctgaggggtgggaaggaggagggaccgacatttggccgcatcttaacccgttcccggcccggcacagttagaacgagaccctcttcctggcgcagcccccgcggttcctgcgggcgggaatcagggggcccgcccgtcttgtctcctgcctctcccccttcggccgtgcagtccgcagcctcgaaggtggccgccgctggggacggcgccggcctaccccgccttggtggtggcggcggcgaagggggc

SEQ ID NO: 36883 - DNA, 2300 bp, Homo sapien
aaatctggagcttgtcaatgggtttcaataactgatgccacttttagctctgctaacatagtagagattatagacagaattctcttggccaactcctatcatgggataaaactcctcccacaccagtttctaaaggtaatgtaacttgcttctattggtttaaaattattaaataataaatacgtttctcagctagtcaaaagatatgtccaggctcttctcacaagttcaatgttaggtgctgtgggtgcaaacagtaatttagtaattgtcactgttattatagtaatcctaataatcccttattcacataattcttcattttttaaaagtattccatattaattttcttatttgagattctgaatattactctccaagtaatactgccccattttacagataaggcaattcaaaaaacgtttaagtgacttgccctaagtcacaggcactagagaaactattacatgcaagataaacctggtcccttcatttatgacactccattcatagtgggacattcagacgagttgtgggcaactgcaacatggttaagtgttgagctacagcatacaacgtacatggcatggagaacagtcttggcgggagaggggtcagggaagtcttcccaaaagaaacaaagtgtcatttcagacttcattgtgttggccctggggaagaacattcacttctactaaattcacttattctgttctcagaatcttccaagttgattttgtacttgatagagcacaacttagaaggtcaattaactttacctctaggccagtgtttcactcaccgtaatttctctagcaacttcatcagtcacctggggtcttgttaaaaatacagaggagggggcggagggagggcaggggccaccctggacttaactttttctaaatctcttgggggtgaggttggggaaaattgctgctttaagcatgaacactttcgggattttgaagtcaaacagcaaattaaaaggggtatttttggtagtggctcttaaattccagcatcaatacagcctttttttttttttaataggggtgtatttggggggtagggatagcaattttatataactgggattgggtgctataaaacaggctgttagcctccagccctcacctgcaaggtggctggcttaaggtaggtacttgataaatgtggatttatttaacagaggaacacttgtattcataacctccaagagtttcgaaagtctttctgctccaatcttccagtgtctagccagcagcattgctgcagagtggaacagctagggtgcgtggagtttgcagaatgagttcaaacctccagacttatcagttagcagtaagaacaagttccttaatctgcctccacctataaagaaggagtacaattgccacttacctcctagagttgttgagagtcttaaatgagattaaatattataaatagattatcaatggaatatattataaatgcaagtgcttagaactgtaccttataaatgagctccacagatgcttattaaaacccgagcggtgccctctccccttaacatccgtaataggcccccttacacctcatacccattacgagtcaaaataataataataataataaataagtgaacaaacgacaaacgagaaaactaggctaccaggcactggggcgatgggccacagcccggcggggtagtgggcccggaaggggcgcgggagtgggctctccccgccgggctcgcggcacgtggtcggcttgggcgggagcttcgcgacagtgggggaggggagcagcgtgggacgccgaggaggggtccagaccgccaaggctacgaggcgccgactgcgcaggctcggggacaggcgcaaccactgcgcgcagacctgagggggagaacgtccacccggctgcacgctccctggatctacttgcgcagcgaaagcttgtcttcttcctcattttaacactgtgtatggcgccgccttgcgcaggttgttcaccctaacagggcctctaacctcgagcccgaaacggcctccttctccagccgtgccccttcctcccccgtggaggccgcagtggatgcgctcacctccctgcggcctcctgaggtggtttggtggccccctcctcgcgagttggtgccgctgccacctccgattccgagctttcggcacctctgccgggtggtaccgagccttcccggcgccccctcctctcctcccaccggcctgcccttccccgcgggactatcgcccccacgtttccctcagcccttttctctcccggccgagccgcgg

SEQ ID NO: 36884 - DNA, 2300 bp, Homo sapien
ttccctctacctttgtccaaccacacctgcctgccttcacttcttaaacaagccgagccttttccctcctcagtccctcatgtgagctggttcctctgctcgctcatgcctccttgctcctcctcctccaggtgtcaccccaagtgttacttcttcaggaaggactgaagtaggttcctcctattactctttctcactagatcctgtaactttcctttgtcatattgaatacaatttgtaagtatgcattaatcctgtatgtaggcttaatgcctgtcttctccactagactgtggactcccacagggcaagaacatgtctatttaattggccactattctccatagtacccaatacagaatctagcacataagacatgttccataagtatttgtcaactgtgtgttggatgactgctggtcttatctctccctcttaggatgccctcctaccgtctcctcagcaattcacatagtacattccacacacacaaaaaaattttaccatgcccacattctctgaccttttccttaattttcttttcccaacacttattcatacattatcataattgggtaatgttctctggttatttcatgattccctaatcacattatcagttttctaaggaataaaactctttggggatctgttttgaaatctctgataaacctagtataatagttgaaaatgctttgggaattcagtgatttcttgaataatgaatgaatagatcaatcactcaatcctagtatatcccttttgcacaaagaaaaacttcacatagcaatacagagatatcattgcagcaaaacaatttctaaccatgactcattgctatctatatagcttccttcttgggttactattttgagtttcaataagaggcaaacaatcttatcttgaaagagggattggatttatttttaataagaaaggctgaattgggaacttgcatttttccccaaaatttaataacagcactagtaaagccctacgctcctcagctggccttatttcaggtatatgagaacagagcttccaggtaagcttctttcatgatctaagagtgagaccaatatcaccaaacctgtctaaattcattgacagccaggggaggtcacatagcaaaagcatctagtccgaacatgtttcagaacccaggactgagcagaggacatggagggaaacatcaggttccccaaggccattgtcctcaaacatgtgacatcctgatagtcaccactgataacttcagtaagtatcacttcgatttcacccccttcttctactcacaactaaaacaaaacaaaaacatatgtaattaaaatatgtcattgctatgctcaaaatgataacttatgaactgggatttcaaattcaccttgttattctgaagcagagccttcagtttatggttgccctgctgttaagcctcaagttgctctttttttttttttttttctgagacaggtcttctctgtcacccaggccagagtggagtggcatgatcgcagctcactgcaacctccacctcttgggttcaagtgattctcctgactcagcctccctagcagctgggattacaggggcccaccactgtgcccagctaatttttgcatttttagtagagacgaggtttcaccatcttggccagggtggtcttgaactcctgacctcaggtgatccacccgccttggcctcccaaagtaatgggattacaggcttgagccaccgtacccggccaagttgctcattctatccatattctttgaatcattttatatatacacacacacacacaaacacactatatgttacatgcattttaatttactttgacaattatctcacaggttctgtctagttagtactagttagtatccttccccattgagttagtatttgatcttataacatggtccaggaaaagaaaggtaagttttgctaagtacctgttacatcatgacacttgtgagagttggtatgggatctgctctttgtgcagtgtcacttatcacctgtcttccacctctgcttagctctgtgacaaccaacagagcctctaagagatggctgctgatgagtccttctatcgcaggctgcagcagtcctgaaggttgatggagggccatgctattcaaacagcaggcgtggctgagacagaagctcctggtgctgggaagccttgccgttgggagtctcctgtatctagtcgccagagttgggagcttggataggtgggtgcttaaaacacatgcttatacccctgtgacattaaggcttgatttaaacttcct

SEQ ID NO: 36885 - DNA, 2300 bp, Homo sapien
cactaaattcagtcatgctaagaaacaaatgacacataatcctttgcattagtctggcaagctaataaacctttatatagtaatatcacctgtagaaaactcatttcattcttactacagcactatggaatggggaagccagaagtggtcctcatattgtagataagaaaaggaaaccccagagaatccaacctcaaaaccatagagctactaaggggagtatttaattgggggacttgaacacagttttctttctgccaccctgttctgcaacttgctgcagtatttgcatttcaacaaggatcagagcccaaagcacgcaggtctaactgaggacttcagacatcaacctgtagacaggagattggttctttcagtgaagctctgaatcacattacataggtaactgtctttgtcttcacattatctgtcagttgtgtgatcacaggcaagttggagaaaattgtgagcttcacttgacctatgaaatggaaataactccatctactttatagggtttttgagaatttcctgaaataccacctggacaatgtccttgctacacagtaagcctcaagaaacctcactctctttctcttccccattttatttacacacaaggcaagccctgctatgttaaaaccacaggctcatccagcctacctgtttttgctctctctttgcttatgctcttaatcctttctctctttccctctacctttgtccaaccacacctgcctgccttcacttcttaaacaagccgagccttttccctcctcagtccctcatgtgagctggttcctctgctcgctcatgcctccttgctcctcctcctccaggtgtcaccccaagtgttacttcttcaggaaggactgaagtaggttcctcctattactctttctcactagatcctgtaactttcctttgtcatattgaatacaatttgtaagtatgcattaatcctgtatgtaggcttaatgcctgtcttctccactagactgtggactcccacagggcaagaacatgtctatttaattggccactattctccatagtacccaatacagaatctagcacataagacatgttccataagtatttgtcaactgtgtgttggatgactgctggtcttatctctccctcttaggatgccctcctaccgtctcctcagcaattcacatagtacattccacacacacaaaaaaattttaccatgcccacattctctgaccttttccttaattttcttttcccaacacttattcatacattatcataattgggtaatgttctctggttatttcatgattccctaatcacattatcagttttctaaggaataaaactctttggggatctgttttgaaatctctgataaacctagtataatagttgaaaatgctttgggaattcagtgatttcttgaataatgaatgaatagatcaatcactcaatcctagtatatcccttttgcacaaagaaaaacttcacatagcaatacagagatatcattgcagcaaaacaatttctaaccatgactcattgctatctatatagcttccttcttgggttactattttgagtttcaataagaggcaaacaatcttatcttgaaagagggattggatttatttttaataagaaaggctgaattgggaacttgcatttttccccaaaatttaataacagcactagtaaagccctacgctcctcagctggccttatttcaggtatatgagaacagagcttccaggtaagcttctttcatgatctaagagtgagaccaatatcaccaaacctgtctaaattcattgacagccaggggaggtcacatagcaaaagcatctagtccgaacatgtttcagaacccaggactgagcagaggacatggagggaaacatcaggttccccaaggccattgtcctcaaacatgtgacatcctgatagtcaccactgataacttcagtaagtatcacttcgatttcacccccttcttctactcacaactaaaacaaaacaaaaacatatgtaattaaaatatgtcattgctatgctcaaaatgataacttatgaactgggatttcaaattcaccttgttattctgaagcagagccttcagtttatggttgccctgctgttaagcctcaagttgctctttttttttttttttttctgagacaggtcttctctgtcacccaggccagagtggagtggcatgatcgcagctcactgcaacctccacctcttgggttcaagtgattctcctgactcagcctccctagcagctgggattacagggg

SEQ ID NO: 36886 - DNA, 2300 bp, Homo sapien
aattcagtgattgattagctcaaagaaaccagggagcaaacgaaagataactgcaagacttggagattgagtgactggagaattctggtactatggacacaaagaaaccttctctctttccacccctcagctctgcgttctcaggccattgctcacctgacatctttggatggttggccgctttttgaatttcactcacttgctcaatgactgtggtgtgcaggtctgctgctttgtctttttccagaatgccttgtcataactatagtaaaggtatatctgaatttagaaccccgacaattcaaaaatctaaaaccccacttacaaattgggtttgaatacatctctcaggttgcttccaaatctttctttcttttcttttctttttttttttttcatttttagatcatgtagatgtctcagggaagacttcagcatctgtgcctctgttggggcattaatagaatcctatgcttttacatccattattgtatttggaacaaaatatcctttatggtcatttggtattatatattttctgttttgtatataatatgaaattacatatacagtctattttaggtctcatatcattataaaacaaaacaacaacagcaacaacaaaaatttggctcagcttttggcttttatacttctgtcaacttgttatttgtactctgactccaaagacaattggagaaacttgggagcataacacaagattttattttaaccaattgatctgtccactgctatggactgatttttgcacaaagtaatagcaggttgggctgatgccatggttctctgattttctttttcttttcttttcttttctttctttctttctttccttctttctttcttttctttctttttctttcttttctttcttctttctttctttcttcctttctttcttcctttttcttgagtttgattattctgattactaaatgccttgcaatttgaaaaagaacagaagttatgagcttgtactaggaataggttagccaggttcaagggtctcacaacatttagaaagattgtttttaagaaagaaataaaaaaaaagtcttatagagagatcagtgacacttcataaacaagtttgcaatgctgtctactagtataaatgaccgtacgttgatctgccagactcattgcccggctgtttttgccagggcacatatttgtgagacagctgctccgaactagggaaggtcaagcaaaaaccactgcctgtctagagatggctgtcctgatgtcagtctcattagttcctgagttcttgccaagttagtaagaactagcatagatctggaggtcaaagtttagcagaaagagcccccacagcagtgtgcaaagagctctttttctgttctactctttttttctctactggtcacctagttggtgtgtagcgtgtgtgtgtgtgtgtgtgtgtgtgtgtgtgtgtttcccaaatagtacttgaaggataggaaattaaatgtctgtgggaaaaagcaacattttgggttctcagcattttagtcagctgctttcttacttttccagactgtgactattctttgaagctattaaaatctattcttggtaatgagaaaagggagtgacttgatggttcttttccaattgctctgtgtctgacaagaaatacctaaatactttaatttgcctttttaaatttcccctagtggtggcaaaacaattctactcctatttgtcagggaaaaaaatctctgccgtgaatttcagtgctgggaacataacaagacaaaaagctacctgggctagcctgtttctccaggatgaaacaaaaggaatatagattttagcggctgctttaacagtttggtaaaggatctggtctatcttgggtgtgggagatgggaggggtaaagaggtcagaataccatttagatcacagacagaaagaaaccaggaagtaaggggaaattattacagtctgttcatagctcagaatgttaaaggcaacagcctctgctggttggttattcattagcaaaaaggagagagccgtccagatccggactggtcgaaagacaggaacagacttgaaacagggggagagctcctggcgaaagcaagacgtggaggttttaccaggggttagtagcttcctcttgctaactttttattgggacaaaaggcaagatggcaccattctgttctcagatatttgtctaaataaagcccttttaattttattttatttttgttgtgggattcttaagcagataagaagaaaagacaccttcctagtgagcagctgc

SEQ ID NO: 36887 - DNA, 2300 bp, Homo sapien
gtttaatgtgcagggaaaatgaaatatctttatccaaaaataagccttatgaaacaattaaactgagtgtttgtatttaaactcagggttatgtagggaatgggagaagagaagggaaccatcccctatatttctggaagagtcagactgaggtttgaggtacaaaggaaaggtgagtggggctcaagaaagagtacaagcctctaggattggatcatttgcaaaattctcccacaaagtttaaatgatgtggactctctagcacaagaactgtttgtgcaaacatgcagaatatatataatttgttaatcagcaagtacataagattgttgatgtgcatgtaatagccagatccagtcccaggaccacttggttatcgacccaggggtctttttctctttaagagtgccctggttccctctctccccttaccccaagtcaatttcctgttcacaattcagcacactcaagaggttttgtaaggagaagtttttgctaagtcaacaaaaaacaatccttttatactcttccctcttacaatgaatgtactagtacatttgtattactaagggaagtccctaaagtacctaaagcacctactcccacatgaaacaagatattccccaaggaaacatgtgcccttcaatgtggcatgcacctggaagtttgactttggtagcattctattgcaaggtgcagaggagaatgccaaggtcaatgctccagggccaacaagctttttccagcctctccaacaatccagccttttctcttttggttcacagacattgaaaacatgattgttggactcatcagtgaacagcttaatcttcttgaagattctttacttttcctattccagagagatttgtttggggcttttaagtgttataatggaacaagttatcaattttattcaaatgggtctactaggtataagtgtcctcctactcaattgtactatctattgcactaaattaatcctctgattggtctattagcctcagaaggattagtatttgaaagggttaaatgcagttctcaatcaattatattttcattatgtcacgactattgatttgtcccattagacacattgttcctttaaattgagaactgaagcagtgtaaacataatagatttgtattttctttttaaaatgaggtactatgtaataaagatctcaaagtgctagtccttcacatccggaaatcaggaagagaattaaatgccctaaggcatacattgtatgtaatggattaactttctctgcatctaaaatggtagtagttatacagttcttgagagaattaagcaaatgtcactcaaaacattttgtgctctataaaccttaaacccggtttgcaaaagttttttgtagtatgctctatatatttctatgaagtttctgatgccctttcataaaaaattcattacaataacaaaataggattatcaagtaataaccaatattggtttccataacaagtatcatcttgcaaaatggttcttcacgatgtctgatacatttattttctaacgcactccagggtatgaaatagtgaaaggtctgtcttccacttaaccacttaggaaaccaaggaatataaagtttttggtttaaaccactatcaaagatcacgtgggtgaaaagaccttccaaattgtaggctaactgggtcagagggatattagcggatgaattttttctatgatcttactattcctcacacaggggtaaaaggtcaggtctaacctcatgatctcctggtttccgaggcgccctgaggcgatggagtgtcccggttaattttgtggtagccctcgggaaaggctacgtgcctacaggtctcagctgtgcagcagcggcaccgctcctggacccctactgccttctgggctcctaggcttgcggaacagatcaggagtcgccggcattggggtaccaggaggacgcgagctgactacctgactccgggcggcgcaggacgcccgccgcgcgaggggcgggggctaagcgtatcgaggggcggtgctcgagggcgcgggaggcgggagaggctgccgcgccgtgtgccctggcagccgcagccccgccccgccgcgtccggcccggtcctgtcccgcagcgtcccgccagccagctccttgcacccttcgcggccgaggcgctccctggtgctccccgcgcagccatggctcagcacttctccctggccgcctgcgacgtggtcggattcgacctggaccacactctgtgtcgctacaacctgcccgagagcgccccggtgagtggcgcg

SEQ ID NO: 36888 - DNA, 2300 bp, Homo sapien
atcactgttaagtgattaaacagtggtgataatatctacctcacagggacgttgtaaggattaaatccattcatataagcagcatgcttattagaatcatggctgtatcatattctgttattaaaatacctattatctattcagtctatttattgagtccagtatgtgcccagcactaagctcggcacacagaacacacaagaaactgtcacagatactgatggagtcatcacgctgggctctaggggaagtccaacaagtaaacaggaagtgttaatatcatgcagcatgtgctatgaggaatgaagggttttgtggaaaactgaaggtgggcttagaatggaagggcaaactttaagggccaaaaagacttcctaaggggaacgatgtttaagatgaggcctgatgggatgaagagcttctgtgcagagcaaagaggccctccaggcactgttggcagcgtgaagcaagacccaggtcatactacccaccacaagggaccaagactaactcttcagcatttttgcctactgtgtaaggctgcctggaggcctgcgtgttgatctctgtatcctcagctctagcatggtgctcagcacactgtgggacttaaaataaaaaagatttccacaccaaacatgatccaaaactcaataggttactgttttcaagctttaaacatcacttattctccaggtttgcagtaaaaaaacctcttgtctttgagaatcttatattctgaaattttatgatcacctatggacaacactagctctaacatgacagtggtttaacaatattacctccaaatgaaggtaactaaagaggagacacacaaaactgtgaaccaggaaggattcgaaagacacagagggaaggaaaacatgtatcaaagacctaggggaagcagtggccaaagaatcaagcagtaaaaaagccttcttaattctcaatgtgactaaggaaaccagacctgtaaggtaagaaagcaggaaagtgtaacagcagaaaaaggacatttaaaaaaaaatttagcatctgggcatagaaaacacacgagaaattcgggcagccactcttttttgacctttaacgtgtacctgaactggtgggtgcaggaactggcgggtgcccataatggggcacaaccctggctgatgtctgcaccagtgatctagagttctacccataaactgtgaggtttccaaatagtttgggtggtaaccataaaagcaaacacttgtctttgccaaggtactattctaagcattatacatctcttactcatttaatccttgcaacaatcttgtgaggtaaatccaattattagctccattttacagatggggaaactgagaagcagcacaggttaagtaacttcctcgaagtcacagagctagtaacagtggagctggtgtcctaagctaggcagtctggctgaggagtcctcgctttcaccactgtactcataaccagctctttttctgtctggatgcttagatcttggactaaaaaaatctggtaacttttcaaaattagtttccttgggaattgggaaaccaaaggaatagtggagggagggcaattaatttgagtgtacaggtctggaagcatgcatactccatgtccccctccctcagggcacagtgaggacccaaacttcgcagactgttggtaggactggaatgtattcaaagtgcacggagcacgtagtcgatgcgcaataaatatgtattttcttctcttgatagaaggtaaaactagggctaagatcttaatgacttttcaactagtgttcctttcaatacactacactatatactacgcatctctcccagattgcagtttaaacactgatgggtggttgatcgtgcaaacagaaaaatgcagccaaaaaaaatgcaagtaccaaatcaagtggctgtgtccacaatcagctggtgtccagaaagacatgcagagaaagttccacgacgtgagatcttcaaggacagccctagtccccctgaccccgcccctcctcggccctagaaatcaccgattccccagcccggtcttgcgcagtttgcccctccttcgttcttccctatccctctcaacattagctaatggctgaggtaaatgtgccggtccccacggcaccggcgcggagcggaggctgcacacttccgccccttctcgccgctggaggccgcgctctgcggcaagactcggccgccgcaggccccgggcagcgtccgccgttgcccaaacctggaggaaactcaagccccagccgccatggaggttgcgcgcagtgc

SEQ ID NO: 36889 - DNA, 2300 bp, Homo sapien
ctagaccaggggtttcagagtacagatgcccctgcttttcttcacactgcttttctctgcttcttttccttgtccattggcccccttctctcctgttacagaaaaatctcctccacaaggtaaggaacacagctgttgctgtccctgttggcgtctctgatggaaagggctcctttcttccaggagaattcaagtgttttagaattacatgcccatatcttagactaatcacttgaataactggagaaactcaaaagtgcctcaatgagaggcaaatctaaggtgtacaatagctggctcttaggggcttgtgaaagccaattgttaactattcaggaattgtgcaagcaggtaaactgctgttggtgacttgaaacaggccatggtgggaatatttacaccgtggagatgggcaagcgctacctgtcagggcagtgtttttgttttctgtttttttgttttgttttgttttgtttttagcagcatacaacataataatagcaaatacttaaattggatttgctggtgtgccaggctctgctctaagcattttacatctgttagccctgcagcactggtttcttataagcaggatcgtgatgtggactttttattgtccatagtactttgtaccacagggtgactcagtgtattttttgttgcttttttccttttaatgattgaataaaaatctgtaaaacatgcaggtcagtgattttcagtgttctctgtgcttcagagagggccctctctaccctgtatgcttggaagctctgggtagttttaagaagtgtcacctatggttctgaatcaccaccagggttaagaactgttgatatatagtgttaacataatgtggttcaattaacagttgacctggataaggtcacattgcactggatggaagtacatgtgtagtgattttaattagctttatgacagggagcaactcgatttgacatttcacaaggagcctttgctttctccatgctcatatcctgacactcagaccccgacacccctactccagctgtgtgcaggcccctcagtttctgaacctgagttgccccccattccctctgcattcacccagcgaactgctgcatctaagtatcagtgtaaacctcactacccaggagagatttcccctgctcctctgcctccctcttctccctaaaagtatgacatgttatcgaaacctgttgtgggttaatatctgtagaagaagggtcagattgttcagtgtgtccttttggacactgtgcaggttgactcagacaactgttctgctcaggctcaagtttacccaacactggccaaagaacacttcgaggtagaataaggttggaccatctaccttttgtgcactttttgtttggtatgtacagttcttttaaagttagccagcacttaaaaaccagatattttactcaaaaacctagcattttttgttgttgagaaataagatctgtcagcaatcaacagagtatttattattgtaattattgtacttgcttccagaggctttctttgtcctttgtctttagattttttttttttaatggtttttgtgtatgtgtgtgtggagaaacaagagtgattacctgtatctgatagaggcatcatgacttgtttagatcaccttcctggtccccatatgtatttccctgacatggggcctttctggccagaatggaccaaggatggatggatagagtggtcatcatctttatcatcttagtgatgtattaaataagtttaaaaagctttgtcaagtcttaaattatgatctccaacccattagaattcaggagtagggttaataattgtctttggttgtataattgtatgctgacggtataattttgaatgggacagctacctggggcatgcaggggatgataaattgcttgtgaaggagaattatactgcagaacttcacaattacagatatttccttcctcctacctgcccccatcagcaattccattagggttttaggtctgtgacattaagaatgaatagtgggtgttatatttaatctgtttttcttccccttatttgcagctcatttataatagctttgcccagttcctagttaaggagaaagggtacgataaggaattgctcaatgtgaccccagaggattgggatttctggtaagttctttttttttttttttttttaagtctgtacatttcctgtggttctaattgttactgataaaactgtaatgctttctcttctaagaagatggaatgtgaaatgtgagattgagtcaaaggacaaatgccttctat

SEQ ID NO: 36890 - DNA, 2300 bp, Homo sapien
gttcatgccattctcctgcctcagcctcctgagtagctgggactacaggcgcccgccactacgcccggctaattttttgtatttttaatagagatggggtttcaccgtgttagccaggatggtctcgatctcctgacctcgtgatccgcccgtctcggcctcccaaagtgctgggattacaggcatgagccaccgcgcctggccatagtggttttcaatgatatgccttgtccagatggcaagttcttgtaacctgacctaaattgagacgaattctagagtgtaggaaagactggctaagtgcttaacttgtagaatataaatgtgtgtgtgtgtgtgtgtatgtgtgttttatttagtggaaaacatttgtacattttaacaaagtcatgggatgatgttcaggttctttttttctcttttgagttttagatttatcttttgaaaagcctaaagattttacaaactaaatatgctgtccttgtttacctatataacaattttccttttatacctgctcagtgatagatatttaattttacagttcttagatattcttaattgtgtgattaacatatcattcccctgggtggcagaatccctttttagcattatgatgtttggaaaatataggttgttatttcttaggttagctaaatataggaattgattaataatcaaactttcctatttcagttgcaaaggtttggcattggatctagaagatgggaacttccttaaacttgcaaataatggcactgttctcaggtaataaaacttagttgtgaagtctaaactttaccttctctgagacactttattactgagtggcatatgacccttacagtatgggttaaatatgattattttaattaatcagatgacagattgtctgtctacatgtctttgtatgaattgtttaagccatttaaatatgaatttgtgagcattagatttaaaggtctagttcctttaagtttacatcattagaaatatttgtaggacatacaatagaaagtttataacctgctacgtctcattgaccactccttctggcaaaagagcccaggaattttactgttttagctgactgtgtggctgcctaaaataaaattgggattctttttgttaagaaagaaagaatgggtattgggtaggggttggtggtctatacccaccaccctctctttcttcatttatccaaatttggccctgtcatgcagggatcatgttgtgtcctagctccttttggaagtttttctggactgttccaagtctcatcaacctcttcctcctcccacactccaggctgactttctttacttctctcctctctgagtgggcccagcctctcaacggttgctaagggtatgacaagcagtccagaagcagctgctgtcactgctctgtctctcacagggcaccagggagggagcatctgttttttctccagtactaatagtacaggcaagtcaacatggctatgaagctataccatttattacatacacaaacaggatcagaatcaaaggagagaactcccagacccctgatatgtactctcttttgttgcatcattctttttgcatgatgcaaactcccttcacactttcccccgaccttcccctaaggtgcatctacctagagcaggtgtagccccacctttggtattttgtagtttgtttccatgtttatttctcaggcattgagagatagggtatgtgtaaatgcagctttgtctatgacctttaactcttctgtcagattctcacagtgttcttggctatcttcaaccacagttaaaagaatgaaaagctttctacaattttgtttctttctctctttgttctatctgtctgtccttgtcccagtacccctcctacaaggtctgtctctctccatccaagtcctggctaacctttagtttctcctgaatttattagcatacctccttgatgctttctttcaaccagtgtagtagattccttttctgatcatatttcccattcaggattctttgatctttacatatagctttctaaaatgttaacccctttataaaaaggagcccatttgtgattttcccccatttgcttttcttattttatttcttttttccttcatattattttgttgccacattataataccaagagaataatactctcaatcattataatttctcataataaactacattaacatttcaactagttcctataatgaactacattaacatttcaactacagtagtccctccttatcctcggaggttagcttccaaaacccccagtggttcc

SEQ ID NO: 36891 - DNA, 2300 bp, Homo sapien
actatttgcaaaaagggttgaatgtccaaggcttattcaataaggacaccacattttccaaaactaaaggggagtatagaatgacaaatacccacatatatttacatatccctaaaagaagacatacaacctcctggtatggatttttttgtgtctctaataagtactaactggagccaagtctaccatctgaccatggagaacagcagaatacctcaagcacaggaataatctaattttaaaactgggaggagcttagaaaccacctagtccaaacttttcattgtgttgataaaaaacagacacccagagaggttaaagtgaaaggctctgaaaattgttgcaatagccacagatgaacaaatggtatacacaggggcatagcactatgtattaagagctgagaattagtcttctgaacgttcacgagtgataactaacagggtatcagtctcaattataagcaaatagcagtatgtgtgtgcatgtgtatcaccatatatacacacaaaatattaaaatatatattttaataattcctttcaaaacaaattcaacctagcattcaaaagcatccataaagttacctcacctactttttcaaaattgtgtccaaatgggccataagccaaaaggcaggtgttttctctcacttatcttttgtagtctcctacagatgtagcagagtacatattataattacaaaagctattccatatataatttccaaatgatgaattataaactttcctattttgttattctaaactgctataagaaacatattttatatgtatctatgagtattatacagagatatatacaacaatgtaaatttttttaatatggcaatcaacaaaatgcttacaagcaagaggagagaggcaatgagatgccttatccatttacatttccataaagggctatacaaggctttgtttaaaatacagaaaattgcttgaaggggagagaaagggaaaagaaaaaggacaaatctttagttcattcactggtcaaactttcaattatttcaattattgattagtcctgaatccatactactttaattctgtggaggtagaaaaatgatgtgtctatgcctgtgtatggaattgtcctcctcaaccagttcacctgcatagtcaatttgattttgattcaaaacgatgaaattaaataagatgaaaaatttggactctcaacttcccacctttattagattttttaggatcctaaaaactgattttaaaggcttcctaatattgttaaacagagtctaactaccaaaattgacaacaatagtgtttacttccacctttgagggaaagtgtttctaattgggatgattcctaactgcaagttaagccaataatattttttttaagctgaaagcaaagtttgaaaatttttttctcctgaaataaacacagcaatcttatgtaaattaacataatatgagattatcaaattaaggggtttttgcaaactctactgcaactctaaagtaaacccaaatttaagcaagaaaatctgaagtcatttactgaatatagcgtagtgttgtgaataagggatctaaatcctaaaagcctaaaagtaattaagaattggggtcagctattttcacaaaaatttatgaatattaatagacacattgataactttatgtaataactcaataatttagatgatggtctaaatccagtacccccttcaaggaattttatccgcttttatgtactaccacatattatataatatcaaccaattaacataagaatgtgcttttcaaaaataaaaagggggtatcatcattccaccgtgaaccagcctgaacactagagtattaattaataaaatagaatcacagacaaagacggtccttggttaaaactattaatatatatttaagacaatgggtttatttttaaataagaaaacaaggaaaaggagagcccagcccgatcttgtgtgcctacccaatagaactttccaccataattagtgcttaccaactttgaggggaggagcttaagctcagggtaacctcatgtagtaagggaaaaacagtataaataccactgaacagctcttgagaggcaccttctgcactgctcatctgggcagaggaagcttcagaaagctgccaaggcaccatctccaggaactcccagcacgcaggtaagcgtacgcttactggtggacttccatgttaacttgcttggaaagaaactttaaagatttaaatacttgagttttctcaagtattagaagtattaaagtgatttaaaaaatgggtt

SEQ ID NO: 36892 - DNA, 2300 bp, Homo sapien
tatcagataaccagtagggtggatggcacaagcccaggaaggcagctgggatccagttggtggtagtctggaatgtccaatttgggttgatggccgggttaagatatcagttttgtcttgcagtggtaatacccaaatagcttaccataagtacatgggtatcaggacacagccagcataaagtatgaagcccaatcagttatttgtgaaaatgtatcaagattctttgtggtacagaaccacttaaattgggagaagagcatggtcacagatagggtccaagccatgcaaagaaaggcagtatggtacactatatctatagtatcatacgcttggcatagaagccgtagaaggccatgcacttgaaacatgttaacacaatgcagaaaagcatgaaggcccagaggaagaatggcacaggcaggtaagccaacaatcttgcaaccgattactgaagatttagaaccaaaggaaaagataatccacagtatgaagagaaagcagatggaagactgcatgctgttggccaagcataggtccaagaggaggtggtaaggaaacttgtgcagaagcttctcacaggacagagattagccagactggaacctgaaggatctggcgctctccactggctgccttggtgggcctcgaattcctctacggggcccttcacccatcaggtagtattgtaggggattgggccacagttctcctttgataatctctgcaattctgtcgaattctagaaggctgtggtctgaaaaccagttgaagaaactagggatagtgttcccttcccggtttctgtggatatgagcctgggggtcttggcctcggtgccagcggattggagtggaaagagacaccacccggccagaggatctgcgttcatattccttgacaagcccctcatttcggaagtaggggttgccctgaaagatgaacttgaatttgcagcctgctctggggtgtttaagctcctccacctccaaattgatcatgtacctcagcatgtcttcatcttggccactgatcataggtgacagctgggggtggtttcgaaaggcagtaacccagaaacctgggatattctggataatgaaacttctgcgctgcatgtggagccttcgcatgcggccaaacttgcgctcaagctgaaggaaggccctgtcagcctgggcatttacgtttgacaactcttgatcgatggcctccagtgagtccatgcagttattgatcttcggggccctgggccgtgtctcctctttcacccctcctgccacctttttttccttctgcactaccttcttttcctccatcgccgcccctgcttctccctccttttccactgctgccgagatggcgcgttttttagtcgtcacttccttggccttcttccccggtatcatctgagaccccaagccccctgcgccacaggcttctagagccttctgcccagcagggccacggggctctccaagctgacagccatttttctggctgctgtcagcagcctcggcggcagaggctgcttccagacctttcgtagaaggtggagcatcctcctgcccggctttggtcgctgcaccgccgcgactcccggcaactgggacgcggagcgcggggccacagtcgacaggatcctgggatgcacccccctccgcaacggtctccaggctgcccccacctgtgttcgccatcacctgtgtcgcctcggtttcttcacggagcccttggcactggtctcggtccggatctcctgaggcatggtcgggagcagccaggccgccggtttgggcgagagggagcttgttgcccccatccaggccgctcattttggaagaagtcagactagtgggagagggagagttccttgtcctccgcagcggccgagctctgcccgaaacgtctagcaccacccctcctttactctcggcggtgctaccatggcaactggtgatgtcagggcggtagcgtcgtaacatcgcgcgagaactctctgcgcggttgactacgcttatcaatccatcgtattcctttgtcttcttgtcacaaaaagaatttcgtcagtctggaaggggagttttacttacgtaaatggatgtagaccagactcaagcatgtaagaactgtgttaatgtggatttctaagcctctgaatgaatttctaaggcacctaacctattgtttctgaaaatatttactttaaggtgagttactgtctattcaagtcagttcatagggcttctcctgagtaggaaagtggattcacgaactcacaggccttccttcttttaagg

SEQ ID NO: 36893 - DNA, 2300 bp, Homo sapien
agtcataagggctatacagaaatcagaagactgtcaaaatggcaagtaattaaggaaggaggtaaagtaataaggtgggaggaggcaatctgccaattaatacatatgtgaccatgggcatgttaactgctctgtgctcactgggtctttgtttataaaatctaatgtatttaaactgcctagtacaatctacatgaactgagtgttaaagaatggccaggtggttatgagtgaaaaatgattcaggtgacagaactaatacaggctagagatgggaatgctttgagtagtagagatataaatctttaaaaaactttggcacacacaaaaagaaaaagaagttcacatgtaattttatacttttctataaatttgtatagtagcaaacttgttttttcctgctgcatggaaaagtaactttcattcagtattccctgcttctcttcatcttgactcaggttataatggaaaagttactctttcaacagtgcaaaggttctttggaaaagaaacagagcagtgtcaataattcaaagtcacaaagtcaattatagcacgctgtttatgtgtttacaaagacgatacctcaatagattgatttcaccccacaaataaaaaaagagcgtttattaagacaaagaggaaagagggagagaaaaataattgctctctgctgtgtgaatcttgtttgcatatttcttatgggataactgattagctggcaggcagtaaagaggtcattctggacacattgtccttgggtaggctgactaggcatacaaaaaatcctgcaaggcaggctgtttctccgtattgtctgccagtgacctttcatcagtactttatcttagttgaaccagaactacactccttccctcgctagaagtctcagtatatatgatgtattcctctaagaggaatcctttttctctaaatctgtacttctgagcctgtatttgaaagtgatcataatctggggggcttaaaatggagtttcttttacaaagagttataatcataaccgtttatttgaatataaatttgacattaaacataaatatgcaaaatttaaatttccctttggtcttgcatttttctaaggattaacaccattattctcacactccaacaaactaatatattgtactgataatcactatcaaatgaattgtaagagctaactgactcgaatagacaataactaaccttacttttaaagtattttaagagacagtagcatagatgcctgcacatagctgattattgctcctgtgctgcagtgaattaccacatgaacacattttgaaaagatttgttagcttcatgtccacaggcattatgaagcaggaaccacttttagattaagattgtaacctgaggaaaagaacatatgcatcagtttagaaattaaaatcccctgagatatttctttcagtaatgcttaaaagcctaaatttgtgctcgtgtgccagtcacctctacgtaaggaaaaacattttgctactctttgttaaaagtgaagaggaaatattgtccacttgttttgtagatgttggccaaattatataaactttaaaatctgtaagacaaattgaaatattcctttattatgtcttgttaggatgagagaagtttgcctttcagctgctccttaattttaaaaataacaacacagcaacacttctctttaaaatcaaactctgctcatttaaattctttggtaatagccatgaatccacaccttaaaagaaggaaggcctgtgagttcgtgaatccactttcctactcaggagaagccctatgaactgacttgaatagacagtaactcaccttaaagtaaatattttcagaaacaataggttaggtgccttagaaattcattcagaggcttagaaatccacattaacacagttcttacatgcttgagtctggtctacatccatttacgtaagtaaaactccccttccagactgacgaaattctttttgtgacaagaagacaaaggaatacgatggattgataagcgtagtcaaccgcgcagagagttctcgcgcgatgttacgacgctaccgccctgacatcaccagttgccatggtagcaccgccgagagtaaaggaggggtggtgctagacgtttcgggcagagctcggccgctgcggaggacaaggaactctccctctcccactagtctgacttcttccaaaatgagcggcctggatgggggcaacaagctccctctcgcccaaaccggcggcctggctgctcccgaccatgcctcaggagatccggaccgagacca

SEQ ID NO: 36894 - DNA, 2300 bp, Homo sapien
atattgtacaggcaagtaagactgttgttcttccaaatgttcccaattgaaatcaaaagaatatctgtacagctcaattttcacaataagtttagaatcagaaaaaaaaattttactaaatcctaatgaaataacaatcttccacataaattaggtcacaaaacaagtaagaaagcattcaaagttgcgctgtctttctttaaagaacccttgtctaggcaacatatttaacactttaaccccttcaattctccctgaaaagtatttttccattcatcatcattggggagtaagtactccttcctcgaaagctcttaacgacagcacagtcttcactctaggcccaatttttacctggcccatgcctctagccttttgttcagtttctcctgcttagggcacctttcatcccatctagatgtgtctctctttaactattctaggagttgataaaagggctaggaagtaggaagttgggaagaaggggaggggcgtaagagctctagcactctattttacaggccaacttctttgcctctgaaaatgacagagccaaaatgaaataaaaaccttgcttttacaaatgtttctgagctatcacttttttaagagaggattgggaggctaaggagggcggatcacgagatcggggttcgagaccagcctggccagcatggtgaaaccccgtctctactaaaaatataaaaattagccgggcgtggcggcgcgcgcctgtagtcccagctactcgggaggctgaggcaggagaatcgcttgaacccgggaggtggaggttgcagtgagccgagatcgcgccactgcactccaacctgggcgacagagcaagactccgtcctccgtctcaaaaaaaaaaaaaaaaaaaaaaaaaaggaaaacagggagagagagggaccttggcaggagccaatgtagggcaggtagcaatagaaagtgactagaggtgaaggaagagcaatgaagtaccataaatcacacagaacaagtggctcactgcttttctcctctgagttcattaacgtccagtaactgtccacagggcatgtgcccatactgctcaatgcagagctgagtaggtggaacaggctcccaaagctagaaatccaagtgacagcaaccagttcagaggccctgggaataaacagggtccaagcagtgcagataaaggcagtacaatctacagtatcatttgcttggcttacaagtagtgtgaaggatgacctcgtagcatgtgatattccagaacagcatgaaggtcatatggaagtggagaagcatacccaccaccgtctcaatcttgaggttgagagaactgaatatccaaaggaaacagggtgcagaaaagtcagcaaaaacaaagcacaatagaaggcatactcattgctgatgcccaagcacaggtccagcagaaggtggtaggagaccttgtgcaggagtattcccaagggcaaatgttaaccagactggaacccaaagggcctggggatctctacaggctcccttagcgggcgacgtcgggctctacggactccttcacgcaacaggtagtattgcagtggatttggccacagatcctctttaataatctcagcaattttgtcggactctggaaggctgtggtctgaaaaccaagtgaagaagctgcagatgaggtcttggtttctgcgaatgaaggactggggttcatgccccctgcgccatataattggagtagaaagagacaccactcggccggaggatcttacctcatattccttgacaatcagcttgtttctgaagtaggggtttcttctaaagaagaacttgaacttgcaaccggttctagggtgtctgagttccttcacctctaaattggttatgtaccttaacatctctgcatcttggcccctaatcatggcggacaactgggggtggtttcgaaaagcagtcatccagaagcccgggatattctgaatgatgtagttcctccgctccaggtagtgtcgacgcatccgcccaaacttgtgctccagctgttggaaggccctgtcggcctgagcattcacagtgtccagttccagctggatggcctccagagggtccatgcggagagcctcatgcaaaggccagggcccttcttcctccctcgcctcctcctccaatctatcctcctccgccacttctatttcttcaccttctggcggctgctcctctacctccatctgctcctccattacctccttctccgccaggccttccttcaccacctcagcgctctccctctcagccacggctgctgagac

SEQ ID NO: 36895 - DNA, 2300 bp, Homo sapien
atgaagtaccataaatcacacagaacaagtggctcactgcttttctcctctgagttcattaacgtccagtaactgtccacagggcatgtgcccatactgctcaatgcagagctgagtaggtggaacaggctcccaaagctagaaatccaagtgacagcaaccagttcagaggccctgggaataaacagggtccaagcagtgcagataaaggcagtacaatctacagtatcatttgcttggcttacaagtagtgtgaaggatgacctcgtagcatgtgatattccagaacagcatgaaggtcatatggaagtggagaagcatacccaccaccgtctcaatcttgaggttgagagaactgaatatccaaaggaaacagggtgcagaaaagtcagcaaaaacaaagcacaatagaaggcatactcattgctgatgcccaagcacaggtccagcagaaggtggtaggagaccttgtgcaggagtattcccaagggcaaatgttaaccagactggaacccaaagggcctggggatctctacaggctcccttagcgggcgacgtcgggctctacggactccttcacgcaacaggtagtattgcagtggatttggccacagatcctctttaataatctcagcaattttgtcggactctggaaggctgtggtctgaaaaccaagtgaagaagctgcagatgaggtcttggtttctgcgaatgaaggactggggttcatgccccctgcgccatataattggagtagaaagagacaccactcggccggaggatcttacctcatattccttgacaatcagcttgtttctgaagtaggggtttcttctaaagaagaacttgaacttgcaaccggttctagggtgtctgagttccttcacctctaaattggttatgtaccttaacatctctgcatcttggcccctaatcatggcggacaactgggggtggtttcgaaaagcagtcatccagaagcccgggatattctgaatgatgtagttcctccgctccaggtagtgtcgacgcatccgcccaaacttgtgctccagctgttggaaggccctgtcggcctgagcattcacagtgtccagttccagctggatggcctccagagggtccatgcggagagcctcatgcaaaggccagggcccttcttcctccctcgcctcctcctccaatctatcctcctccgccacttctatttcttcaccttctggcggctgctcctctacctccatctgctcctccattacctccttctccgccaggccttccttcaccacctcagcgctctccctctcagccacggctgctgagacggtggcgcactttcctgtcttcacctcctccgcctcagcctccgcccccgccgtcagctcagacgcggatctctgggcgccacagatttctagggccttctctccaccctgaacgccctttttcaggctgcggtcggctgccatcaccacagaagcggctgccaggccttcggcgggaggctggccctcttcctgcccggctttgatcgccacatgaccgcgacccccaacaactcggatctggggagtaccgccacggcccgcggcatcctggggtacgcccccctcctctgaaggcggtggaggcgggagcgcgacggtctccgagcctccctcacccggctccgccatcacctgtgtcgcctcgctttggtcgcggagcctcaggtactggtgtgcgtcctggtcgctcgggacttggtcagaaataatgatgctgtgggtttggaggggagtggtcctcttgaccccatccaggccgctcatgttgctaacagtcggaccaaccgcaggcgaacgcccgttttcctcagaggccgaactgggagctaaccgccgctcgcaccgcccaccctacagtctcactaacatttcagcggcggtgtcgtcaggactggagatctcacggtatcgcgagaacttgctgagcccgggattggttccgccgctccctgccagccaaccggattctctgggctttatttctgtgaatttacccatagcaacagtaattttacctacgtaaataaatgtcgattgtgctgagtctggaagcgcggacgacccaccttgagatgcatctagcgactgctcccagcatgtaggagcagttgtaaaatcacagccgtaacagtgcctgctctccagtgtctgaaaacaaatgtttttctggtcttcacttttttgaggcaggaaggtaaatctattccctgttactccacgtaactagcagcaaaagacttctctttaagatta

SEQ ID NO: 36896 - DNA, 2300 bp, Homo sapien
tttgatatgtaaactcacctaaatatgctggtcttttcagagttcgtttgtcatacagtgtgaccacacaaacttaaattatttgtaaaataaaattgttttctctgtgtttttcctatccttttagagcctttgaaacatatatagaaattcattctcctgagtaggaaactgttactatatagaatagagcagccctctggtttgccagtggcagataggaaggagagcagagtgacaacccatatgccccttacttctcttccgcaaggagcaagttgcaagcaagagaaactgttttctgctcatttgctcctttatttaacattttaataatctatgggatactgtgtaaggtagtgtgctaggcactcgataaacagagggaaacgaaaccatgatcatgtcctcttgcagtttacagtctcctcagatatcgtttgtggtatgtttaggctttaattttgtctttctgtgcatttgcctaagtatatttctggtcttgatattgaaagacagattcaagctgtaatacatcacagctgttgggcaggaactcacgggaagccatgagcaaggtagaaggggctgctattagaaacaacttgaggcacccatagatgcaaccaaaccttaatccaaggtgtattcatttcatattgcttctgtaacaaattaccacaaatttaatagcttaaaatgcacaaatttattttcttatagtgctggagtttagaggtaataacctcaaggtgttgtcattcctttggaggctctaggattgaatctatttccttacctttcaagcttctagaggctgcctttattcctacgatcctggctccttcctccatcttcaaagccagcaacatagcgatttccctttcctccctcccacacctattctccaccattccttccctctctctgtgctttcgtcctcttatcttctctgactgaccctcctgcctccttcttataagaaatttgtaattccatagggcccacctgtataatccagaatcatcttctcatctccaaatctttaacttaatcatatctgcgaagtccctttggccgcataactaagacaggtacatctttgagggccatcaggctactaccacacaaagcaaattaagtagaaaataacgtttgcctcttttataccttgagtccaccagctgcatgttgccctttgcaagtttgttttctacttcaaggccatcttagttgtccattttaactagcctttcctcacaaaatggtggtatgtggctccccccactgatatttctctgaggccttgtagctctctaagacagcaccagtttaactcacaagtcaacaaactggaacacttcaaccagagacattgacatccccctctaatgaactcagctgattgctaaagacagatgcttcgttagagccaaacattcctatcttacataactaaatatgataataaattaagttcttggggctggaaatagttataatttcctctttcttgcagtgaaaaggcatggaacatttagcaaactgatcctggcttaatttctaccgatactatgcagcacaaactcttatttgatgcagattataaatcgaaaattagcaatgaatactatgcatcgctttagtggtaagaggctgctgagtagctttttttccccagtaaccgtagaggcaagaattgatatttttatgtcacttttactaagaaggggggaaacattttgctattaatcttaaagagaagtcttttgctgctagttacgtggagtaacagggaatagatttaccttcctgcctcaaaaaagtgaagaccagaaaaacatttgttttcagacactggagagcaggcactgttacggctgtgattttacaactgctcctacatgctgggagcagtcgctagatgcatctcaaggtgggtcgtccgcgcttccagactcagcacaatcgacatttatttacgtaggtaaaattactgttgctatgggtaaattcacagaaataaagcccagagaatccggttggctggcagggagcggcggaaccaatcccgggctcagcaagttctcgcgataccgtgagatctccagtcctgacgacaccgccgctgaaatgttagtgagactgtagggtgggcggtgcgagcggcggttagctcccagttcggcctctgaggaaaacgggcgttcgcctgcggttggtccgactgttagcaacatgagcggcctggatggggtcaagaggaccactcccctccaaacccacagcatcattatttc

SEQ ID NO: 36897 - DNA, 2300 bp, Homo sapien
gggcgggggcggggggacggggggggctttgcacaaagtgaatgtcatccagaggccaattcgcaggtcactcaaaagcaaaattgtggggggtgtgagggtaaaggggagcaaatgacagtcagtactacctcctttgaagaattctcaatcctggttgtacattgtgatcatctaggaagagattttaaaatgcagatgctgatgcttagaccctaacctcagagattctgatttgttgttcttgcgtgggggtccccattggaaagaatttattatagctcccctgctgattctaaagttctaggttggagaatcactgaactagactactacttgctgagaggttacgtaaattaaaccagatgttttttctaaagtctctttcaaatttgagaagataaatggaaattaacacttacggattacataatacagctagacactttcacaatttattctaataattgaattagtatatgtaaatctcttagcacagtgaccgtctgatatggtgtagtaaactctcaataaacattagctatttttattatatcctctccataactgttcaaacaaggtattatattgttacactatagatgaggaaactgaggttctgatgttagttttccaaggcccacagtagtaaaagcaaagtttggatttgaaccaaagattagttccagtttccagagccctcttctctcctcgacaggccttccctaaagcatcaagaagtttatgcaaattagtggttcacctgagtgaacatttaaaaaatttaatagtaccacttcctcttgacctgtttgtaaggagttcctcttaaatgcaatttctgaaaaagagaagcataaactgagacatccacattttttccttatttggccaaatagaagtgagaacctctgaggatagaggaattggatggaggtgcccttcagaactcatggagaaaagcactgctcccagtaaaatatctctcattctaatgaatgggtaagtatcctacaaatctttcacttctgtacaatctaggtctggtaggttacttgcacacactgggtggaggtggaaggggcaaagtattcctgaggtgatggccctgatcctacctcacatctccttggggcctggttggacctggctgagcgtgtttgagcagtggctgatttttggaaaacaggaggactcttctccaggaggctgtgactaccaaggttgcaaatgctccacctgaacttgggtgcatgagggatctctctctctcacacacacacacccccccaccgcgtaagataaatttctgtttgtgagctgcctacattaaatgctttgctcctgaccttctgtgattaaaatctgttccgtttgcagggttcggtgcgcttggatttagtgtattttgttggtacagtaaaaaagagaactgcttctctataggtgacccccgccccaaagtcccccctcccactaacttctctttgagaagagagtaaaaccgaattcgagagaaaagaggcagtaactattcgggaggaggcagactggagtgggcaccagtcccggtagtaagagtcttaacgtcttcctcgctttcctctcgcagagtagtatggaagcatcagctcctccccctgggcctccaaaagttacctttcctttgggtgtgattctcgaacccgaagcgtttgagtcctaagaaactagaacaagttagagccaaagaggcctggcgggcgggggtgcgggtggagtccgggccgggtggcgtggaaggccgagcacagctgcgagcggcgagtcccgggagaggaggagcgggagaaagcggggcgggcctgcggtcggggttcggccgggggagggggtccccgtttccctctcctcatcctcgtctcctctggctctggtgacgttgcggtttcctcccccctccagcggagcctcagcgcccgccgcgtccctccctccgcccctttcgcccacacctacccgcccccgccggcccggctctcagtagcgtcgcccgaggctgcagcagcgcatcccggggcatggcgcggcgggggcgcggagggctcggttcggagggggccgggagcccgggcgccctggagtgaggaggaccgggagctggctctggaggctgcggaggcgacgccggagagaacgaagcctcggctgggagcggtaagtggaggggcgcgcaagggacgagctggggcgcgcggcgcaactttcttcgggagtttcgggcgggtagccttcggggctgtcccggcgcgggcgggaga

SEQ ID NO: 36898 - DNA, 2300 bp, Homo sapien
tctcttgccaacataaagttatatgcatttgtgatcttacatgtgatacagtttattaaagactggaaagtgactgatactcatttaagggtttctcttcatttatagagtcaataactttttttttttttgagacggagtctcgctttgtcgccctggctggagtgcagtggcgcgatctccgctcactgcaagctccacctcccgggttcacaccattctccttcctcagccccccaagtagctgggactacaggcatctgccaccacacccggctaattttttgtaattttagtggagacagtgtttcaccatattagccaggaagaacttcctaacttacatcatggactgtcacaacctggattacaagatgttatttatacactgacaagttggagttttacaaaacgcgatttgtaatataaactagttagataactcagagggttttattggccatatttttgtttatgctttgtcacaggctttagtcattgcttccatgtgttttcatccttcaggatatcttcaagaagcctacttatggaccaaacaagttctgaccatcatggagaaatctctggtcttgctcagggaggtgacggatggctccctctatgaaggagttgcgtatggcagctacaccactagatcactcttccaatacatgtttctcgtccagaggcacttcaacatcaaccactttggccatccgtggcttaaacaacactttgcatttatgtatagaaccatcctgccaggtatagtgaggagtcagaagtgtgaaaacattaaactattgtaattttttctgattatgaaaatgagctagactaggcagagaaattaggtccttagagtttgtcatattgaaattaaatagatttttttaatcaaagaaaaattgaattcaagagttgcatatagccagaacattttggaggctaatgtgagtatttatgatttaggtattataaagtttggagggttatggattaaatacaatttctaggcccctcaatactttttttttatatatccaaacttgagtaatatacgaactcatcttcatcattgcaagcaaaatataaacatttgtgattacctgtcagttttcctttatatgtgatccctgatcaatcctattttaatttttggttttcagttttttctttcaaactatacagacatgattcaaaatgaaagattacacctacacatttaagttggagctttagtattgtaatattttattgaagtaaatagtatagaaaagtaaacaaaaaaagtgctgtaaaacttgtaatttctttattgctgtgtcatttagccttctaagagaactagctctaaaaaaaatatatacatgatttaataatgtattcatttccagagaactttgtaacctttttttatttctaaaacaggactaagatgttagaacaagttataaaggaaaattttatcaggatagattcccccccttccccaaggaaatgcaatttttagatggtgattctagacctacaacaaataatatagtatttaaatcttttggctctggtagtatacatacagattaatagaatctccattattggactaattcaaaaatattgcagagcataagaaccattttaagatttagtttagacttacattcaaaaaaatactgctttgttgctttttcttagacatgcaggagaggcctgttttgcaattcatcctagtaaacaaaggctacctgaagcaagggacctttaagaggtttcagtgctttgtaatttaagctgagatctaaaggctaactacatcaggaattgtgtttgctgtgagctgtgtctgtggctacttcctaaagtggaaaagacagtatgaacatgtctaagagcagcatttatatgtttgtgttaattaaacaaacttttattgaacatctgtgtgccaggcactgtagtaggcagaggattcaaagaggaataaaacacatctcctgctttcaaggaattcacagactagtagaagattcagaaaatatcattttaaaataaggtatacttacaagatcatttactaaattattaggaacaaaaacattagctgtaaattacataaatataattgtggtaacattttagaagaggttctatgttaaagcaatctgttttcaacttcatttctctctttttttttttttctacagttgatactctagtagcaatttttttgtctggctgagttttctatcttgctgcttcttttttcatgaacacgtggagcatatccagtcttacct

SEQ ID NO: 36899 - DNA, 2300 bp, Homo sapien
ctcacagaggctctttcaggacactctctaactccaatttatcctgtgcgtaatctttaggacccctcctctccatttcctatatcatctctactgtaagttcaaagacggcaggatacctgtgtcttcttccttgttgtatccagcaataccaggcacttttgataggtacttgacatattctgagtacttattaaacatttaaatgaatgactgaatgaacaaatgaactaattaataactggttaacaaatgaattaatctagttggggaagggggctgatagataaaagtttctgtaagtaaacatatttcaaacaaatccttgactaaataacagaagccagggaagagaaggtgatggacttcattagagtcttaaaaaatgaagggaatgaaaacagaccataggaatgaggtgaaggaggagatggtgctgattagattgagcctcagtggatgataaactattatagcacagtggtaaaaccctggtatggctatcagcaggtaaccaggaaaatgccagccatccctcttggtttgagagatgtgggagaataaattaatctcactcaagaagacagaaggatgcatttttattaggtttcggttaggggagatttggataaagccatctgcacaaaggttgtggatatagtgatgtttctgcatgatggaatatgggaaagggtggacgagagaggacacatcttagagtattatggtagaggtgaagaagagtccagcagtaagaggagagttactcaaggcacaggggaagaaatttatcttgggagatgacaaattacaaagataacagtcagagcagaagtgattcgcttcaaacacgcaactttgctgcaagttgacaggaagcctagcagtatctggtctaatctcagagaagagggccccaactttcctgcatgaccatgaagaccctcatctggggctggcccctaaacacatagaaaaaagatgtctatttaccacatcactatggaatgacagcttttggcactacgctaggcaccctgctggtggtgttggagagggagtagttaagaaggcaagttggactaagaaaagaataatacatttcttgtccattctctaaaaattcacttggttccatgggctacctattctttccagataaaataaggcaagcctggtggatgggcaccaataagaaccatttcattgtgaactgcccacccaagctccatatccagatactctccttgtggtgaagcagacagctaaggtgtacaccaattctcttaaggtagcagagtcattgagtcacttaatactatccactgaattgatcctcgtttaaaattcaaaattcagtattcatcaagattcttaggttatgtacaatgtaattatttgttgtctattccccaaattgcattttaaggggaaaactctcacactgatcattcatttaacagacatatcctatatgtaaaggcactttacatatgctactcaatctactcatgtcagtaatcttgaaaagtgggcactattatccttcttttacaaataaggatgctgtgtctcagaggggcatacttgttaaacacaccacagacaagatgcacttgacttcaaagcccatgttctttcaagcacacctcagctcagtctggagtcacacagagtaaggctcaatatcacaaaagtggttacagtgtttgtgtcagaacaacgctgcttgagaaaactgaaggtggaggaaacaacattagatagatgtagctgcagtttgaaattttgggttcaactagcattctttgaataatcatgtatccccttctgtgcagatcagcttggtggtcagagtcagaattttactctcctccaggcattgacagtgttatgacatatctgaaagaaaagaacattgtattgacgagtaaatcaatacagtatatttggtctaatgtcctgaaggagatcaggcagaggagagaagagtcagtgtgaactaggctggtggctctgtccggtagggagatggaaagggtgccgcccatcatagaagtaccagaacttgagctggactttgctgatttagcttatggaagaggaaccagaaatttgtccttgaataatgtttcccgtaagtaatcagttttttgataattatttggttttactgtgatctggcttagtaactagggtggctgcaatagaggaaaatctggtatttcccagtttttccaactggcggccgtgggtcaagaaggttagtttcctggttcgttgtcagattggtggtaata

SEQ ID NO: 36900 - DNA, 2300 bp, Homo sapien
tgacaaagcatacaaaaacataaactggggaaaggacactgtatccattaaaaggtgcttggaaaacaggatagcaacatgtacaggaatgaaactggatccctgtcactcaccatatacaaaaataaactcaagatggatcaaacgcttatatctaagatgtgaaaccataaaatttctagaagaaaacgtaataaaaactcttctggacattggcctaggcaaggaatttatgactaagacccaaaaagcaaatgcaacaaaaccaaaaataaataaatgggacctaattaaactaaaaagcttctgcacagcaaaagaaataaacatcagagtaaacaggcaacccacaaaatgggagaagatatttgtaaactatgcatctgacaaaggactaatatccagtatctataaggaactcaaacaaatcagcaagaagaaaacaaataatcccatcaaaaagtgagcaaatgacatcaatagacatttctcaaaagaagatatacaaatggacaacaaacatatgaaaaaatgctcaacatactaatcattagggaaatgtaaactaaaaccacaatgagataccaccttattccagtaataatggctattactaaaaaggcaataacaatagatattggtatgaattttgtgaaaacagaatgcttgtagaatgctggtaggaatgtaaattagtacaacctctataaaaaacagtatggagatttctttctttccttctatgtatttatttatgagacagggtcttgctctgtcacccagactggaatgcagtggcatgatttggctcaccacaacctcagcctcctgggctcaagcgatcctcccatctctgcctcctgagtagctgggactacaggtgcatgccaccgagcctggctaatttttttttggtatttttttgtagagagggagattcaccatgttgcctaggctggtctcgtactccttggctcaagcaatccacctgcctcgacctcccaaaatgctaggattacagacatgaaccacggcacctttctttcattcttaaagaaagaactttaagtactaaaagtagatctactattcagtccagcaatcccactactgggtatctatccaaagaaaaagaagtcattatatattaaaaaaaaacacctgcacatgtatatttattgcaacacaattcacaattgcaaagatatgaaaccaatctaagtacccatcaactgatgaatagataaagaaactgtggtgtatatataccatggaatactactcagtcataaaaaagaatgaaataatgtcttttgcagcaacttgatggagctagaggcgttattccaagcgaagtaactcggaaatagaaaaccaaaaactgtagttctcacttataagtggaaattaagctatgggtacgtaaaggcatatggagtggtataatggactttggagactcagaaagagggagagtgggaagggggtgagggataaaaaaatacatattgggtacacatacatatccggtgatgggtgcactaaaatctcatatatatatgtatatatatatatatgtatatttatatgtatatttcatccatgtaaccaaaacccacttgtgctccaaaagctattgatatatatatatatatataattttcatatgtttttatatatatgaaaaaagacagcaaatccctgtcttccaaatctcaagtcataggaagagaaaaacattcataaaattctaggtttggagatttgatttgtcggctgaaacctctttctgttaatgttgattccttacactggaaaattcctagactattatttgtatgagtgagaatttcttttctgattttcaatccaaaccacatggaaagaaggttaaaatggagcccgtgcactttgaatttattctcagcatttaggctgcagtatcacagcccaatttccaccagtaggaggcattatctaaacatgttgagaaatattcattcctaaggaatgacattgtttccttatctggctcaattcagtctgagaaggactgttgtttctgatgaagaaagagctccaccctcggccactgccacagctgctctgccaataacaaaggcacagcattttccctctgtgcatctccaacatggatgcttttcagggcattttaaaattcttccttaatcagaaaactgttattggctacagcttcatggctctgctgaccgtgggaagtgagcgtctcttttctgttgtggcttttaagtgcccctgcagcactgagaatatgacct

SEQ ID NO: 36901 - DNA, 2300 bp, Homo sapien
aatgtgttactgaactcataatatctttctgtacttataattaatgagtgaggcacaactaccatcaagtgaaagtccctgaatggattgtggttggctaccttatatgttcctccttccttcatcgtctgtcttcctctttttccacagctgaggcttctgtacgccatctcatctcagtacctgagccagttccagctgaattataaactattccatcagcttcaggtccccttccccctttcacatgacgtttgcattgaccgatgctttccctcaattcacagtacccagagtcaaactagagcttggtggatgcttccataccagccctcaaaagtgtcttattttgcatatgtcctcccccaaaccatggcagttttcctcattgacttggaacaaatactgtgtaccagaagctttatgcccatttgtatctatcatctctaaatcttccgacaactctccaaagtaagtgatattaccactaactatgagaaaactgggactcaaagaggtcgaaccactagttctaggtcacatagctggtgattggtagcatcagcatacaaacccaacgccagacaattccaagactgagctctttccactactccattctatcttccttaagaatagagagtcatccagctagattttttatctgccccacccatggatgaatgttcttttccgcctccaggcacatgtacacctattgttggtctggactatatgctgcctcctgcctatctgaacctctgtagtcagcacctgctattgatacaagttctcttgcccacattccttatgcatcttcccacaggaatcagccccaggtccttctcattctgatgaagaatcagcaggtcagtgtgctcagcctaagctatgacatgatgtgcaagatttccttgtacctgtgtttagagaggagaagctcacacaatgataagtgtttgggcctgccactgactgaatggagcctggtgactgaggacatacaccataaatcaatcattctgtcataagagttgtaagttatacccttcttcaataaaagacacaagacatttgggagcctgatatgttttatctaagatgtgctttatgcattaaagaaaagattttgttttggagtattttttgacttatcaatttatgaagagtatgactttactgccaaccagctttggagtgtatgattttaaaaacagattttgccttgatttgttgttaccaaggcaaatccttgtcgaaaaagtaaaataatgctatttctgtgcctttattctgaaacagatagcattcctgacaatttgtggatctgcttatcaactcttaccacttgttttgcttttgggaatgcaattcttactacctataaatgggaagttagtccttcctaaggctgtacatctggatttgtgttcatgtgcctggaggaatgacaggctacttccctgcatcaattaggtaaagatatgatttccttctgttaaataaaacaatgcccaaatcttgagcttctgaagtaattaagaacccctttagctgtacagcacaaagagtataaaacataatctccctagagagtacagtcactttttcacagaaggctatttaaaaactgctgattcctaccatacaaggaaaattcttctcaatcttgacaatatttatacacagagatagcagttgccagaaatcattcaagagaatctccacactaattatattacatgcaactttgaaaagtaataactcatttcattcagctacattttaatagatgaataatacatgtgtgtgtttgagaaaacaacttgaatgtaaataattgatagaaggcagtaatttctaattacagctctgccattaacactcaatttatgatttagtgttaggcattatttatttacagacccagagagactgttttaaagtacttaagtatttatatgtggacaatccagtggatattttcttttcagaaccggaaaagagataatccagtcagcaactttattgagccacccagcctttcaaaagcttttcctgagatagtctcaatgctgcatcatgtttcagtttccatttagtttcaaaatattctgacaggacacagacagccctggctgaaaggagcacagagagaatacttcgagctcatgctgagagaaaaaggcgagtttgtcttttcttacctgagactgggcctgaagggagagtttcagttcttcattgacggtaggtagcatgctagttttgccacaagatactttgtgaagttcttccca

SEQ ID NO: 36902 - DNA, 2300 bp, Homo sapien
gttataggcacttgaaaagcagcagtcacaagattgctctgaccttcctgctgtttcttaaaggcaggagaagaaattcccatgtgaaggatatcctccctgtactagaaagaaagcaacactcttaacatcaaggagggacaattgaggctgagaggattctgtacagattttattaaaataattcttgtcttcttgcctccccaaataatttagttgccttttcacaaattactattctttgtccaattcagtaggtaagtgttcaactccttgggtctccatttctttattaaagattcccggcccggcgcggtggctcacgcctgtaatcccagcactttggggggccgagacggacgaatcacgaggtcaggagatcgagaccatcctggctaacacgctgaaaccccgtctctactaaaaatacaaaaaattagccaggcttggtggcgggcgcctggtcccagctactcgggaggctgaggcaggagaatggcgtgaaccggggaggcggagcttgcagtgagccgacatcgagccactgcactcaagtctgggcgacagagcgagactccgtctcaaaacaaaaaaaaaaaaaaaaaaaagattcccatgctatgtgttaagtaaatgtgtatgctttttttctgttgatctgtctcatgtcaatttaattctcaggacaactttaaaaaaaaatcctaagaggatagaggtgaagttttgccttccctacagtttcataagtcagtttcacatgagtttcatccaaataacttaaacagcagaaataaaaccaataatcttcaatgcaaaggcagagcagcctagatattcatgtgctgggatacccggaagattcaaaacttctcccctaggagggagagcatttggaccaatgcctaatgcatgcagggcttaaaacctagatgacaggttgataggagcagcaaaccaccatgacacatgtatacctatgtaagaagcctgcgcgttcagcacatgtatcccagaacataaagtaaaatttaaaaaaacttctcccttagagtatttttagtaatagagcaaaaatgacatctacatgcagccagatttcttgtaagtcctgattatgaacaaaaatggaagatggacattcataaggaaggtgagaggcagtgctaagttatttagtgacttgcagaatttactaagaatcaacccctaagagattcttctctgtgatgaaagaaaaaataatattatgcaaatgcagtcataataaaagtttaagggtaattcctctgcaggtgctttgccttcatgttggaactctgccataaacagtggatgtggccttctgggtttgatccaatcagtctcaaaatccacaaagcttgtggctgtacacatatgcttttccacaaaagaaaatttcctacatttttcctttttcacccctcccagaggtacaaagcggaatagaccaaatgggtgagtgattacataaggcagttcttgcctattcagtggggagaaacaagcctaagtggttatgcttgtttaaacaagtttcatgtttttaataatctatctgccatatttctggcccaaattgtaagatgtcttaaaataatttataaattgtttttgctgtgaatattcatcattttttaaatattgagaattttattaccacaaagaatttttctttccttttaattgatttccgctcccttctctactcaaaactgctactaaataggaaaatggtctgacattcagctaactgtgatgccagccttctctggaatgttgtgttgtgttgggctgtgacttccatggaattcaattcctgtttaccaagggctcccacttattttattttaatatagtatgttgaaaagagtggaaaaaagaaaagcaattcaataggctcttacaattaggttttgagttagcctttgaaaaacaggacgagcaaagaaagattttatttttaggcttatctgataagtttcctttgttgttgtagttgttgagggattacagggattagtaatcttagaaaaatgttgagaatgaggcatatacggtgttttacccttgggtcctcccctgcctacactgtgctgagaactgctctctctgaccgggtctcctgtttctacctggtttgttgtgaacctgtgttctccacatttgtcctgactcttcaggtgaataactgagcctttcacttggctttgctgcaacccttcagctctgtgcgtggtaaggaatgcctgggttgcaaatctcactagaccctgggg

SEQ ID NO: 36903 - DNA, 2300 bp, Homo sapien
caccatttgcctacctgcagagcttaaaacacttggtctgtaacatctctacctaccgattaaaaatgaaacactaaaagaaagtcaatttgcctcatgagaattttccacaatttcagttaagggacttgctgtgctgtgttaagcatgtgttatggtcaaaatgaaattagagatccactaaaaaatgcttaataatgcttatgtaggtgtgacaaagatttgcggaagtgttttcttgattacaagagccatctccagtatcaaagtaacactcttgagcattctgaagcatgtagggtttatttacagtgatacataaggtttgaaaaggatgctttaccaaaaattttgttaatgaaataggaatgaaaataaagaggtacatttactggattgcaactggcaaccaaaagtaacctttttctaacgtaaaccttgtatgtttgttgctttgctgcatctcatttcttttggtaggttgtttttattattctgttaggagaaaaaaacttaattttgcttgattttctttcatctaggagtcatttaaagatgtaatgccaccttccttgccaaatttgattctgtcttcctcacttattttggtcaacagaacttcgtctttccagttcttccagccaaaaatcatccttgactccccacttaggacttaatgcactagctgtttcctctggcagctctttcctcataataaatcagtataattcctctgaactgaggcgatccaaaaaaaatgagcaacttatacttgcaaagttactttatgtattttatttgattgtcatcatagttaggagactccactttttcattaaagtttaaaagaacgcctgaaatcaacccttaataccgtaaacacggaatcagtatcaaagtgttcctctgctataggtaagcagcactcctcaataaaagatcaaggtgccttctggtgcttcaggggcttcatcattaggaatctttcatttaaaaagtgttcctcccactataccagtgaaaccagctttaatacagagaaatcaaaacaaagaaaaatacagaaaagtgggcaacagcttttgagtattttcttaaaattttccatttttcgacttagcgcaataatataataaaggaacatgggatcctttattattgttaccatagtttttaatatcattttcataaagctaaccatgtttatttagccattttcttagcttttgccatcatggttctttgaaaattttctttgtaattgctgcaatgattttggagatcacagatgcatgctacttgctcaagtttattcttggaagtcgtattaccaaattaaaggttctcaacatttctcggggtactgcaatttttacattgcatatgataattgttattactgagatctacattcctttcatcaattcacaaatacacaatcacagacatcttgagatctatcatacgtccagctgcgttcatttcacaaaatcagaagttaagcctaaagatctgaaccgagaagccggacctccggtctatttctccctcctggatccaccccgacttattaagcagttagaccgacccttccatactcattcaaggcagtgcagagcttttgctcccctgcccagtggaatctacactggtcccagcctctcgtccaactcccgtaggacgccaagcaatacggagttcgagaagctcagaaatctcctgagccccaccagtccacactaggttgcaagcccgcagcacctacgccacggcgtcaaaccggaaaccagaaaaggtgaaggcatcggacgcccctcgccccagcccggccaccagcgacactatccttcactgacgcgcgatgccggcctttcagcccagactcatcgagcgaggatgcagcgctgagaggcttctaaggctcaggccctgcaaagcccaggagccggctgtaggtgtccttggcgaatgccagaccgcgcgcaccgtcccagcaagtcccgagcgagtgtgggacaggcagcaaatcagtgccccctggccaggcagaacgagtcgaacgtggaagtagggagcaggcggaggccggcgcggagctgcagttaagcaagccgggtctggctttgggccctgggccttccagccggggactctgcgcctgcgcccgcctggccgccgcccgctctcccggcgcggcagctgtctgggctgctgcgcgccgcctaggtgtctgggcgatctatgggcaagagcaagggccacgatgacagattacggcgaggagcagcgcaacgagctgg

SEQ ID NO: 36904 - DNA, 2300 bp, Homo sapien
acataatacaaaactgggaacataagtaggctaagagctttagtctttatcttaagaacagtaagaagcaaatttaggattactagagtcaaagtcaagataaagctctggactgaaaatgaagcaggaataataacggacacttacattgttcctttcaggtgctcttcactcctaaactggagagataagcaagctatgtctgttccttcatgcgttctttctcctggccctactacccttctctggcttgtctttttttcttttcttttcttttttccttttcttttcttttttctttttcttttcttttctttttctttctttcttttttttttttttttgacacaggcttttctgactccagcctggataacaggctgtcgtccaggctggagtgcagtggcacgatcttggctcactgcaacctccgcctcctgggttcaagcaattctcctgcctcagcctccggagtagctgggattacaggcactcgccataatgcccagctaatttttgtatttttgtagagatgcagtttcaccatgttggccaggctggtctcaaattcctgacctcaactgatccacctgccgtggcctctcaaagtgctgggattacaggcatgagccatcttgcctggccctctggcttgtctttcaaagaaaaaacacaaaagtgctgggattacctggtgaaaaaaagacaaactgcttggattacaggtgtgagctaccacacctggccctctggcttgtctttcaaagaaaaaaaaagcctccattacagcttgccagctgcaagggagaaattaagggggaaaaaatgctaacttcctcaactcttgcaccaattaccaaaaaaccccagaatttattgttctagtttatcttaatgttctgtttttagaaatccaagcattctaaatcccagacatttgactttaaagagtctctgtaccagcagaagttatattcaacattttgtgtgtgtgcacacagtttttatcaaattattttagtctgtgattccctcaccacactgaatggaggagtattatgttcttccatgaagttagaatttagagcaacatcttgctaaatagaagctatatcaatgtaaactgtcaaatgccaagtatttgttggtatatttagaaagagaaagaaatacaaaacaattaacattaaagactttaattaatatatggtttatagttaagtccagatatggtccaatcttctataccttcttcatattggagactgtatactataaatgaatagtcataatcttgaacttaaatcattgcaaaattatgcatttacatttacattatcaaataaaaattatattatgccaatatagtttagtgttaatttgaatttcaattattagaaaacgggtaacccatgaattgcctatttataggttttctgcattgccttctcaagtataatattctgcctaatcaccaggagattccttataagcaggaagaacaaaactcaggactgctttgtctattctccgagtctttagagttggttggttgtagctgatgcacgctaaatgtgaggcttggggtctcctggtcagcacactggggtcccattgttacctgcacctccgagattaccaaggtcagtctcttcctccctctctacccctcactctcctctctccctccctcccttccttcctccgttctttccttccttccttctctctctctctcacacacacacaccctccacacacacgcttcatgaatacactgtccctccactaacgcacgactcgctcctcacagcacaacttggatcagtctcagacccctaaaggtctctcgcatggggtcgccattcttcctactttgtgctcaaggcgcaggatctggagttctcggtttccaagcaagactggtcgagtctaggtcggattggctgcgatagaacgaggggcaggggttgtaccgaatcacaaagctaggattttcatctctctctctcgttctctcttagtctccgccctcgaatcctggcaacaggcgcggtgagtttttctgagaggaacccggcctggggttgctatggagataggacgcagcaactcacagagcaaccaggacccagaaatcgcttaagagaccgcggcaaagtaacttaactgagttgccttcttccatattttcacgcccctttcatccagaacattttttttcttgaactgcttccatggaggactcaacctccccgaagcaagaaaaagaaaaccaagaagaactaggggaaacaagg

SEQ ID NO: 36905 - DNA, 2300 bp, Homo sapien
gaaacaagaacaggatatctgtgctgtagtttaaagtgatgataaagctatcaaatgcttttagttatacccgaccttttaaaaacagttgttgagtagtataaacagtgtttctggttaaaaaaatgtttattcaagggtgacttcctcttgaaggaagaataccacggtggtccggtggcaaataggagatagatgtatagattgagtacacacacatttttctatgatttacaagtattttctgttatagagatttgagagaccgacaggaaaagtatttaggatctattttatatataccaatggctactgaggaattaaaatcagaaatcagcttctgatcatcagggttagaaactagaataaaagctgtgaaaaaattatgtgtagatgactttttaaaaatcaagtatggtcattatttactattcatggagattttatatatcagagaatgtttgtaacctttaggttagtcagcagacttattatgaagttatttaaatagttagctagttagaggaatagttaaatagttaaatagggagaattgttaaatagttatcccccacaaaaaggagttttttagataagtaataaaaatttatatttacttttcttcttttataggaaagtaatggctagaaacagttagttctaaactaagaatttgttgtatttgataactccatcgatgaaaatattttaaaatgccctttaaatgtgcattttgtcaatttttaataggtgtcatattgttgattttcacaaatcaactggtcctttgggtacacaccctcgcttatttgaatggatattgaactattattcttcagagggagaagggagtccaaaggtagtgtgtacatctaaacctcctatctatcttcagcatcaaggttagtattaatataactcatatttgacaatgttgtttataagataacaaattgttgctttcagacaggttaaggttttttgtttgtttgtttgtttttttagacagaatctcactctgttgctcaggctggagtgcagtggtgcaatcttggctcgctgcaacctccaccttccaggttcaagtgattctcctgcctcagcctcctgagtagctgggattacaggcgcctgccaccatacctggctaatttttgtatttttagtagaaacggggtttcaccatgttggccaggctggtctgataatagcagggagtattatgacattaatctgtttaatttttcagagctcctttgacagtacaatactttcttaggtaattaagattgatatttctacaatacttcattgggtaattaagactgatattcctgacatcttcaggaccttttgcacttcttgttttctgtgtttagttcacttgtccttcattgttcatcccttaccttcttgggtctttacccacatgtcacttgagtgaggccttccctgaccttaccttaccttaaaagtagaactcaaggccaggcatggtaactcatgcctgtaatcctagcactttcagaggccaaagcaggaggattgcttgagcccagcagtttgagaccagcctgagtgacatagtgagaccctgtctctacaaaaacataagaaaattagccaggtgtggtggcacatgcctgtagtcctagctactcaggaggctgaggtgggagggtcacttgagccttggagttgggggctatagtgagccatgattctgccactgcactccagcctgggcggcggagtgaggctgtgtcaaaaacacgtacaactcatcccagcatcccaccgctggcattttcttcacttatttacctcatttatagagtatctcttcctattagaatataagttccaagaacacaggcacgtttgtctgttttgtttgctgttatataccttcgtgcttggagtagtacccggcacatagatacttggtaaattatgaatgatggtttggattgacaggaataaacagaagtaaatgttaggaatttcattgtttaggaatataaactataagagattaagctccctccactgatattctagcatttatgggtttacttttgtttaccttttggaatcatgagagttttgttctagaacagtttttgttctttcatttgagataatttgaataagaaggatcaaaggattgggaaaggaaaagtaaaatatttggcagaataaaaatgttttttttggtaatgaagcctttagaaaactaaagttaaatgaaaaaactgaagtagaactaaactcttacgtcttaggagaacttagataca

SEQ ID NO: 36906 - DNA, 2300 bp, Homo sapien
agtagctagaattacaggccacatcaccacgcccagctaatttttgtatttttttggttgagacgggtttctccatgttgcccaggctggtctggaattcctgggctcatgcgatctgcccgcctctgcctcccaaagtgttgggattacaggcgtgagccaccgcgcctagccaatttttaaaaacatactatttatcatcagataacatcaccctcctatttaaatacctcactagttttctaccaggtcctacatgatttggcccctgtctacaaccctaacctcatcttgtaatcatttttctccttaccacattatgctctggtcaaaaagtgttctttttgctccagccttaggccttcgttcttgttattttatctgtctgaaatgctatttcccctgttggtgtaaggtttgttcatcagcacactcaacccttcatcaagaccttttctaaacattcgtatctctataatccagttttcttttctttctttctttctttttttttttttttttttgagactcagtctcaaaaatctattgctctgtcactcaggctggagtgtagtggcacgatctcagctcgctgcaacctacgcctcccgggttcaagcaattctcctgcctcagcctcccgagtagctgggattacaggcacctgccaccacgcccagctaatttttgtatttctagtagagacgggctttcaccatgttggccaggctggtcttgaactcctgacctcaaatgatctgcccgcctcggcctcccaaagtgctgggattacatatgtgagccactgagcctggccaatccagttttattttcttcatagcacttatcatgatcagttaatttactttttatttcctctacctcaccagcatgtaagcctcaaaaatcctgaattttgtgtattttgattactgctgcagctcctgttgcaagcaaaacgcctttctaatagacactctttaaatatttgttgaatgaaataaagcctgaatgacaagatatttgtgattttgggctaacatggtggctcacactttgggaggccgagatgggaggatcatttgaggccaggagttcgaggctgcggtgagctattttagccactgtgctctggcctgggtgacagaaagagtcctcctctctaaaaatacatacatacggccgggcacggtggctcacgcttgtaatcccagcactttgggaggccgaggggggcggatcacgaggtcaggagatcgagaccatccgggataacacggtgaaaccccatctctactaaaaatacaaaaaattagtcagacgtggtggcgggcgcctgtagtcccagctacttgggaggctgaggcaggagaatggcgtgaacccgggaggcggagcttgcagtgagcagagatggcaccactgcactccagcctgggcgacagagcaagactccgtctcaaaaaatatatatatatacatacatacatacatacaaaccaagatatttgttatcttgtaaccttgaggaaagaacctggtatcctttaccttcggtgcatagctgggagcttgatacctagcagcattataaaccctttattgatactaaaatagagtgctactcagcaggccctagtgtagactgctatttgccccaggacctgccctgtgaactcattcagattaagtatgaatgacctcagagcccggttttctctcctagcaattgagtggcaggaaactcgatgggagaaggaaaaactcggaaatgggaggaatgcaaaaatgactacatctctcaggagatcgagaccatcctggctaacacggtgaaaccccgtctctactaaaaatacaaaaaattagccaggcatggtggcgggcgcctgtagtcccagctactcgggaggctgaggcaggagaatggcgtgaacccgggaggcggagcttgcagtgagccgagatcgcgcactgccctccagcctgggcagcagagcgagactccgtctcaaaaaaaaaaaaaaaaaaaaaagactacatctcccagaatgcactgcatagagaccggcgtggagcggcgcattctgggattacttcttttccgtgggagtaaggaagtgcttttgaatgaggtactgagggccaaggtgttggaagttcctaattctttcctcggttaactgtgaaactctgcgtattgggaaggcctggcctcagtcatcaggccaggagaggtactggacgccgcgcacgcactcgtctgccagcgaggcccaaaggggaagcctagcggagct

SEQ ID NO: 36907 - DNA, 2300 bp, Homo sapien
aagggatagggtggccaggtgattaaggcaaataaactcctatcagtactccaatagtcctgttgtcagaggcgtttgaaccagagtgactccaacttgaacaggtgctgggtaaaacgaggctgagacctactgagctgcattcccaggaggttaggcattcttagtcacagaagattggaggtccacgcaagatacaggtcacaaagaccctgctgataaacaggatgtcgtaaagaagacaggccaaacccaccaaaaccaagatgaagacaaaagtgacctctggtcatcctcacttctcattatacgtgaattataatgcattagcatgctaaaagacactcccaccagcaccatgacagtttacaaatgccatggcaacatccagaagtcatacagtctaaaagagggtagaaccctaagttccaaaaattgcctgcccccttccttgaaaactcatgaataatccaccccttgtttaacatataattaagaaataactggctgggcgcggtggctcacgcctgtaatcccagcactttgggaggccgagccaggaggatcaccaggtcagtagattgagaccatcctggctaacacggtgaaaccctgtctctactaaaaatacaataaatttccagctactcgggaggctgaggcaggagaatggcgtgaacccgggaggcggagcttgcagtgagccgagatggcgccactgcactccagcctgggcgacagagcaagactccgtgtcaaaacaaacaaacaacacacaaaaaaactatatactcagtccagcagcccaagccactgctctgcctatggagtagccattcttttgtttctttacttctttaataaacttgctttcacttcactatatggactcatgattggcaacgctttctggtaacactgcccaggtttcctttgtcaagcgtgcctttctcagccctacatacccacagttaaataatcccttctctcctgtttatttttcaactattgaaaatagcaaacatcttaaaacaatttgtcttcatgtttttcctcttaaaaaattgcaaacgtcttctgggcaggatttatgtattgtttatcttatttattctcttcctattgcatctggaacacagtctgttttcaataccgtttgttgaactccagggtagattacagggctgtgtattataatctacagtactttaactgaagttactcgtttattggtgactacattgctgtcaaaaatacactcatgtggctgggtgtggtggctcatgcctgtaatcccaacactttgggaggctgaggcgggcggatcaggaggtcaagagatcaagaccatcctggccaacacggtgaaacctggtctctactaaaaatacaaaaattagctgggcgtggtggcgcatgcctgtagtcccagctacttgggaggctgaggcaggagaatcgcttgaacctgggaggcggaggttgcagtgagccgagatcgcatcactgcactccagcctggtgacagcgccagactccgtctcaaaaaaaaccccccaaaaacagaaaaacaaaaacaaaaaaccgcagatgttatagaatataaaattataaatgacaaaaagcttgaaataaaacgagcagagcatataaaagttaatgaagctgaagaaaacgtgagcttctccgtacacttaacaaggctgcgatttttaccaacttttttgcactgttgtagccccaataatgtatctaaaatggtacttgacacagtttatatccttaagaatgtatgcatgcacgcacgcgtgaagaatgaatgaatgaggggtcgtccctttgcacacacggaggtctacgggccgcagagtacctacagcatggccaccgcaagcgcaactaaaatccagggcttgtcgcaggcacaggctcctccttcggtgggtgggacggcggcgcgcactttctctacgccccactgctaggatgtgcggccaccactcctcctccgccgccgccgccgccgccgccgccgccgccgcgtcgagtgcaagggcttctgggagccgagcctcggggtctcggagaaggggcgcaggtggccgccatcttggattgcgaactgggtcgctacgcttcacgccaggggcggagtggcggcccttctgttacccgccacacacgtcgccgctggggactgggaaatcagggcatcggagagtgccacattaatgggtaagttggagtgaacacgggctaggttgggggagcctcggttttggtccctttgggaactacta

SEQ ID NO: 36908 - DNA, 2300 bp, Homo sapien
gattgtttcgttcactgaaaaataaatttaaaggctgcacttcaaaggctgaggtctcataaaaattaaatatttttatttagaaatgttattccagcactttaaagttacagaatagaggaatttttttcattcataagctttcaacggctcttagaaaaaccatgtttaagttgggcaaataactggaatctgaacttatgattttctttaatatcaatcgacattatttcttatgccagtaaagccttcatttccatggggctgggcgcctcattagtgaaagtaaaagactgcacaaagcgggggaagtgccaactagagagccctcacaaccaaacaagcagtacttaggtcggagggagagagttgctcctgacctaccaagaaaaccacttttgtacagaatatgagtcatcattattgggtgttgtaattgagagataaatcattagtgtttttgtcttttttaaaaaacatgtctaaaaagctcaaaagtaaatgccagtgtcatattcttttgtttgttttttgagacagagtctcgctctgtcgcccgggctggagtgcaatggcgctctcggctcactgcaagctccgccgcccgggttcacaccgttctcctgcttcagcctcccgagtcgctgggactacaggcgcccaccaccatgccaggctaatttttcctttttttgtatttttggtattttttttgtatttattattttgtattttattttgtattttttgtatttttggtagagacgaggtttcaccgtgttagccaggatggtctcgatctcctgacctcgtgatccgcccgcctccgcctcccaaagtgctgggattacaggcgtgagccaccgcgcccgccgccaatgtcatattctttagacatatcactgtcatttcacagctttcaaatacttccatctcctatgtattatcgatgaaaacctaagttttcatcttagaacggagctgcccgactattagaagcgtggaacccaggcttgccttgtcgtcgggaatgagcactagaggcacctgcacgcaggtggaggagggaggctggcggatggagagggcgaggctaggaggccctcgggatggaacctgtctcttctttggacactgtggaatttccataagctgctggacacagctgatgggtaccaggtatgagtggcaacgtttggcaattccattaactgaaaagaactaccgagaaacggtgaggcggggcggcgaagatgagaccagctgcccatcactccagaggacctgctgaaagaatctgaactcaccacgccttcgcgtccgcaagggaaaggtccggctgccacgcccccgcgaccgctgtcgccctggggaaaacacgagaaacacccggcaccgccaggttccagagaccttcgcaaagtaaggggtaaataaaaaccgtggccccaggaactagtagttcccaaagggaccaaaaccgaggctcccccaacctagcccgtgttcactccaacttacccattaatgtggcactctccgatgccctgatttcccagtccccagcggcgacgtgtgtggcgggtaacagaagggccgccactccgcccctggcgtgaagcgtagcgacccagttcgcaatccaagatggcggccacctgcgccccttctccgagaccccgaggctcggctcccagaagcccttgcactcgacgcggcggcggcggcggcggcggcggcggcggcggaggaggagtggtggccgcacatcctagcagtggggcgtagagaaagtgcgcgccgccgtcccacccaccgaaggaggagcctgtgcctgcgacaagccctggattttagttgcgcttgcggtggccatgctgtaggtactctgcggcccgtagacctccgtgtgtgcaaagggacgacccctcattcattcattcttcacgcgtgcgtgcatgcatacattcttaaggatataaactgtgtcaagtaccattttagatacattattggggctacaacagtgcaaaaaagttggtaaaaatcgcagccttgttaagtgtacggagaagctcacgttttcttcagcttcattaacttttatatgctctgctcgttttatttcaagctttttgtcatttataattttatattctataacatctgcggttttttgtttttgtttttctgtttttggggggttttttttgagacggagtctggcgctgtcaccaggctggagtgcagtgatgcgatctcggctcactgcaacctccgcctcccaggttcaagcgatt

SEQ ID NO: 36909 - DNA, 2300 bp, Homo sapien
catgcattactattctaatatactactctagcataaaattcacaaaaaacagaaatttttaagaatgaaagttttaaaaggtaaacaaatagaagttctaatattttcttaccacatctgactggatcaccttgtgccccaccacgcacacatacaaaggcgctacttatgagaccattaatccaagcaaccacattgtaactgttcagcataaattttagccaaataaaatacagcaccaacaactcagatatcacttgttcctttttcttcaatagtactgacttccggcttcagatttaacactgcatccatcctcactgcagttgctttaaaggggacaataaaccaagggaaattatctctaaaggggccccatccaatgggattgtttcgttcactgaaaaataaatttaaaggctgcacttcaaaggctgaggtctcataaaaattaaatatttttatttagaaatgttattccagcactttaaagttacagaatagaggaatttttttcattcataagctttcaacggctcttagaaaaaccatgtttaagttgggcaaataactggaatctgaacttatgattttctttaatatcaatcgacattatttcttatgccagtaaagccttcatttccatggggctgggcgcctcattagtgaaagtaaaagactgcacaaagcgggggaagtgccaactagagagccctcacaaccaaacaagcagtacttaggtcggagggagagagttgctcctgacctaccaagaaaaccacttttgtacagaatatgagtcatcattattgggtgttgtaattgagagataaatcattagtgtttttgtcttttttaaaaaacatgtctaaaaagctcaaaagtaaatgccagtgtcatattcttttgtttgttttttgagacagagtctcgctctgtcgcccgggctggagtgcaatggcgctctcggctcactgcaagctccgccgcccgggttcacaccgttctcctgcttcagcctcccgagtcgctgggactacaggcgcccaccaccatgccaggctaatttttcctttttttgtatttttggtattttttttgtatttattattttgtattttattttgtattttttgtatttttggtagagacgaggtttcaccgtgttagccaggatggtctcgatctcctgacctcgtgatccgcccgcctccgcctcccaaagtgctgggattacaggcgtgagccaccgcgcccgccgccaatgtcatattctttagacatatcactgtcatttcacagctttcaaatacttccatctcctatgtattatcgatgaaaacctaagttttcatcttagaacggagctgcccgactattagaagcgtggaacccaggcttgccttgtcgtcgggaatgagcactagaggcacctgcacgcaggtggaggagggaggctggcggatggagagggcgaggctaggaggccctcgggatggaacctgtctcttctttggacactgtggaatttccataagctgctggacacagctgatgggtaccaggtatgagtggcaacgtttggcaattccattaactgaaaagaactaccgagaaacggtgaggcggggcggcgaagatgagaccagctgcccatcactccagaggacctgctgaaagaatctgaactcaccacgccttcgcgtccgcaagggaaaggtccggctgccacgcccccgcgaccgctgtcgccctggggaaaacacgagaaacacccggcaccgccaggttccagagaccttcgcaaagtaaggggtaaataaaaaccgtggccccaggaactagtagttcccaaagggaccaaaaccgaggctcccccaacctagcccgtgttcactccaacttacccattaatgtggcactctccgatgccctgatttcccagtccccagcggcgacgtgtgtggcgggtaacagaagggccgccactccgcccctggcgtgaagcgtagcgacccagttcgcaatccaagatggcggccacctgcgccccttctccgagaccccgaggctcggctcccagaagcccttgcactcgacgcggcggcggcggcggcggcggcggcggcggcggaggaggagtggtggccgcacatcctagcagtggggcgtagagaaagtgcgcgccgccgtcccacccaccgaaggaggagcctgtgcctgcgacaagccctggattttagttgcgcttgcggtggccatgctgtaggtactctgcggcccgtagacctccgtgtgtg

SEQ ID NO: 36910 - DNA, 2300 bp, Homo sapien
ttattaacgattggttgtttctcagtgatggctttctctagctctatggatactccctctcagtgatgtgaagacaaataaaatactaatagaaaaaaccacatttaaataatgcaagaatcttcaagtaccataatgctggagcaatattagctatggcaacatactttctcaggcaggaattcattcagttgagttttataaacacttatttggagaccgctatgtggtaagcaacatgatagacactgaaagtatgaagtttaaaaggacatagaatgtcctcaagcatctcagtcttttcgtaaactagcctaggtgcagactattctgttttcgaagacttgtattcatctattcatttatttaacaaatacttattaaatatctactaagtgccaatttttcagctatatcttgggaatataatcacaactcctgaaggtcagggagctcctagttccccacaggagatttcataaattaaaatgcccttgtgttttgggactaaagaatgtgacggggaaagaaatcattatcttctgaagtattattacacaccaggcacatttagaaggacattgctaaccatggtttctaaatatcttctcactctactcctgcttattctttttcaccttgttttatttttcttcatcttcacctgatgtcatcactgctccatccccagctctgagaggtagctggcacgtagctggttactggtagtcattgcatgaataaacctaaaagataggaattctggttttacaaaagagaccaagacttataacttaaatgatttactgctcatgattgtgcaacttttaagtcacaaatccgggatttaaacctaggtgtgaaggcaaagcccatgttccttctgcaagcgctcctctaaatgtatgtcttcacagagctattaacccctctttttttgtttaacacggttatgtaaaaagaaaaaaaaactgagctggcagttacagaaaagttatagctttcaagagcctgacagtctagttaggaagcaaaatatctagaaatccaacaagtgcaaagcagtgtctagataaggagggaaactcacaggcagtaatagcagaggagggtgagctcggcctggtgctgggctgatgagcactttgacttggcaggaggtctgttgtctgtggaacaagataagtaaattgcttgtacaacccttctctccaatcattgaatctgaatccctgttaccatttaatgcctgaaaatagtagattcttttaccttttagcatagaggagatggtggaaggtgacagaagaaaggcacattttgaagggagtgtggagagtttgtgggctaagagatgaagaggtaggaagctggcatggcggctcatacgtgtaatcccagtgctttgggaggcagagcccagctgatagcttgaggccaggagttggagaccagtctggacaacatagtgagatcccatctcttaaaaaaaaaaaaaatagcggagcgtgctggcgcacgaccaaagccctagctactctggaggctaaggtgggaggactacttgagtccaggagttcgacgttacaatgagctatcagcatgccactgcactttagcctgagtgacagagccagagactgtctctgaaaagaagaagaaaagatagagaaaggcacttggaggaattgagattgttttccgtaggaaagagaaaaggtatgggggtgggagacgatgaggtgaggagctaacttcaagaaatctcatccagaagttagtggagtgcccttaacacttaattgggaaatgtcttcagtttcctgcacttgaaggattgttgtctcttcctggaagagaggatttagatttattctcctggggaacaaacgatggaatcaaaggctaaaagcctggcgggaatacatttctactcaatacaaagaatttaaaaggagctacacgcactgcctcaggcggtggtgagcctgtttcaaacagaggcaggctgcttcctgaggaaccagcccctcggggcttgacgccctgatcccgggtcgctggccgggggcggagacggggatagcgagctgagtgtgcgagcgccaggggttccagctgcacgtcccaggctctccagcgcgcggcaggccggggcgggacgaggagagctgcggggacaacgcctgtggctgggtccggaggtgcgggtgcggcgcgggacaagcgggcagcatgctcagggcggtcgggagcctactgcgccttggccgcgggctaacagtccgctgcggccccgg

SEQ ID NO: 36911 - DNA, 2300 bp, Homo sapien
gaaatgagatcatgccattgcactccagcctgggcaacaagagtgaaactccatctcaaaaaaaaagaaaaaagaaaaaaaagaaagaaaccactacaaatttaggaaatgataactttcagtttagttttgggaagggaaagaagggaaaggaactaattattcagtgcgtaccagaatacagaagctttgcaaatcaaaccagcttatctcacaacatattcattagatagagtatcttaactcttttatagatgagaaaattatttttcagagaagttaagtaactcattcagtgtcacatagctaagtagtgggcagagcaacccaggtctatccgattccaaagtttgggccctttctgccacatgatacttcattttacagcacaaaagtctttttagatgttttgttttcctaccttcagaggctcctttaaagacatagttcttcaaacttagattatatttattaaaatttaaaaagtgccttatgtttacatttcatcagattacaaagaccctaaatattgttaaaattgcaacctaaaagacattattggcataccttttgtcattgatttttcaaataaatgtcatctgaacaatgtatcttcagaatcactctgagttgcttaatacttactataattttgctgggaattatctggatttcccattttttagtttagttttcccaaaatcatttttgaacttgtaattacataagacctttgaggttatctgagcaaaataactaaattcatgaaaatataaatccatccgataccatacacacacatatataccaataaataataagattaagatgagtaaaatgtaattgctaaacatctcaagagtcttcagactcatgtatgtttgttaaactttctgggcaactgaagttaaccggttttcattctaatagaaaattctgccattagtaaaaatggtaagacttaataaaacatttgaagctgcatgatgagctgtgacttctccactcctcagttgtcataaccccataggactatggaatctaatgctaatttggataatgaaaaaatgccacagtggccattgtactcttttattttttgaaatttctttaaatgtatctgccactgcactccagcctgggcaacagaatgagactctatctcaaaaaaaaaaaaaaatgtatctgctacccatcaaacaaactgtatgtattggatttgaaactgcttgcccatgagatattcatttttaataaaacatttttaaaagactgattttattaaatacattttaaaactttaaactttttcttaatggtgactacattattgaggtttctctatcctctgttaaattccaaaagacacccaacaaattatgttagttcagagaatcctaagtacttaagaatatgtagcctgaaatcagtcccaaatttattaaaatatagcacccacaatagtggaaatgtcaatgatctatgaacagacctttcttgttcaaagcaaaatactgtatcggacaagtttcatcttgtttttagttttacccatcttcacaaaagctacatatttctaacacagggaaagtggaagtgacaaatacctaaatttaactgaatttcattttttaaacagaacttttcaggaaaaataaaagcaggatggttttttctaaatacctgataaactatattgaattatttgtgccttgaatgtgatacctttttaaaatgcagaactgtctatttctaaagtggaaaaacttttccaaactgcttcttcttgaaagttctacattctgcttcaaaagaaatgccaacgtgactcagggcccttgacatatcactagagtaaaaaagtaccattacagtgaaacttgtgtttataattctatcagcttttacatcacatgactgctatcacattatctctaacactggagtgttaaaaagcctgtgttcttattggtgaaataactgttttgactatcatcaagtatctgaatactgagtgtttctggcctttgacactgtcctataccttataaggtgtttacaggtgaaataggaatcttgctggcactccgtgcacttaatgattcctaagaactcacatgaactgagcaaatgagatagaaacatggcattcttaattatactaattacctgctttgtgattattcttgctacttcacagccttgccagacccctgatgactttgtggctgccacttctccgggacatatcataattggaggtttgtttgctattcatgaaaaaatgttgtcctcagaag

SEQ ID NO: 36912 - DNA, 2300 bp, Homo sapien
ttttaaaagatcattctccatttttacctattttcctgcctagagctgcttttctaaaacactagtctcatgagctcagattagttataataattacaaatagcaaatttagaatattgacagcttttcccctcctctgctttcaccacataccatacgtttgagaagaactggcatttattcttctttaaacgtttggtataaatcactcatgaagctatctcatcatgtgttttctttatgttggaagtttttttattactgattaaatttatttacttgctataggcctatttagacttcctatttttgaatagaagcacaaataactttcacattattttgttaggcaaacagatttacttaaaattaaggcaaaaagttcacttagggccttaactgatcgtggtttttgtttccaatgatctgttcaattggataattgccagattttcacgtagtgtctgtatgacttacacacacacacacacacacacacacacaaacacattatcatatggttagtattttaaaaaagaaattccagtaattttcctgaacatttttcttcttatcatttcatataagtagacacagttaatcactgggactccctttacagaatgaatctgagggtatctctgtaaagaggcaacattctaaactttagtactgtacatacagctaagccctctggtctgagcaggctctgaggctttcggaggactgggtagagaaaactggcaaagttgtcctgaagcactggaggggtatacccactttaggagtgtggaggggtgggtagccccatcctggatctagctgctggaggtaccagataaggtgaaaacctttgacaaagagttgctgcctttcccaacaagtggtactaaaaatggggagattcaaatccactcataattttagctgcttttgctgtattacttagactgtatcgctccttcccataattcacccttcagccacccaccaccttggatcccattttgtttgttctatgttaaatttcaatgtaatgtagtttaatattgtcaaagtcgaaggctgatttctctctctaatgctgcaagagaagatgacatgctgtaggttgtgatgaggcaatgtgatccaaagcagaatccttgcttttgttggagagcactggacatataaagacactgggcgtatttgtcaaaagaacagaaggtggaaggaaaggaagatgatctggcagtcaggtaacaccaatcccaagtctccactgaccgctcccgtctaaagagagcacagattatagtttgcccccatgagattgccattttgggttggaagatggtcgcaatttcatttttcacttaagcaaacgtccgttgccgtactgctaggtatgagatgagtaatcgtcagggacgcgtttaaattacaaaataatggtaaatgggagagaaagaatcttttctcggggttgaggccagatcctccagggctgggagacccaggagtgcgggccactgtgcaccctcgagcaaagcagtgtgtgacgagatgggatcttccctcaaatgctgagaagagccctcgccaatccctcggaaggttcccagaataaaaagcccggtccctgctgtgcaaagactgagcggtactccggtgtactttttccctgtcccaggcgtgcagagtccacgccgcgcggccaggtgccccaatagtgtacctgaaagtagggatggggccagttacagctgcactttccctgcagaagacagtgagccttcccgggatctttctgggagctctgagtgtgaaaacggtcctccggccagcgcaggttgagagaacgggaaggagggggaagctgtgggcgcccagggcgtgacaggcgcaggtgagaaagtgagtttcgcgggagcatctgccgggaccgcagacaggtggagaaacgcagtcccaccgcggcccaccgcggctcccgggcggcctgggctgtacctgtgcgcggcgtcctttctgcgctgagccagggcaccccggagcctgcggcctccttccccgcccctgcggccccgggtcccagccccgccccgccccgccccgggctggggctccgctggggaaccggccgagcggcgcgcgcggaggtgtccggcggccaggaggatggccaaggtcccggagctggaagacaccttcctgcaggcgcagcctgcgccccaactgtccccggggatccaggaagactgctgtgtgcagctcctgggcaagggcttgctagtctatccggaagaaacagtgta

SEQ ID NO: 36913 - DNA, 2300 bp, Homo sapien
ccagagatgtccaaaacggaacctccgtgtccaaggagggactgcgggacttgcgcgaaagtgggggaccggaccctccggggccacacccgcccgccccgtggagtccctggtgcgatggttgcgttgacacctgtactcctgcgggcctgggtgaagccgacccagcagaaagggtgcgcagcagcggccagcgagactgggacctgaactccccatctcccgcacacagaagagcgtactgtggctctttggatgagggtttcctctcttgccccaaagaaaatgatgataggtggttgtacctatcttcagaaacgcctagggagggcacattggggtggaggtgggatggatgttctgcttcacccttgcgcctggataatcagaagctccagaagctggcagatttcatccaacaggcagcttggcccctaaaaagaggcttgcatggaaatgtactagaagagtgtctttattttaacttttcattgattagaaaactttacatagattacattgttgttaattaaggaaattgtcgaatcgctcaagatggctcaccagttacaagcatttggagacacggagccatttcccatctataaattgggcaacaccaaaactgcaaccctaaaacaatttggcttaaaatactcacttttaaaacacaaatagatcttcaagggttcatttattcacagtcttatagcctgagactctataaagactttctgttgtatttaagctggggaataactagggtttgaaatccatgctgcctctttcttgagtctagactcttaatgctcccaacctgttcccttggtccccccaagtctggcccgcctctattcccgtaatgccccttccgccacctgacccagccatggagatagccttgtctcaatgcattcctaaacttatagaactgaagactccactgttacaccccctttccagagggcttggtggggggtaggcttgagaaggatgggtagggtcgcaggaaggagggcgaagccagcagacctctcagggagggccggagagagaaaggggtgaaggttttatagttggagtgcatatacttccagctctccaaaatgaaacataccatcgcagctggtattaccggctgaataggcagcaaaagacctctctgtgtacgggtcctagtatgcttcttcttagcgccaacgagtccttgtccccaaagttgccaaaactttaaaggaccccggccaaggagaccccagcatgaaaagccagacatccgaggccgggtaaagcctcctggactcctcgaaagcagctcacaccgggagcagccggaagcgggcgcgatctatgcgaagctaacgggttccggtggagaacatcaaagagaaaggagcaggatcgaactttagaggggcagaagggcacggcccaagagagcagaattggggtgtgggacaggcggcgggaggaccaggttagagggagcgaaaggaagtggattagaggacagcggttacaggtttcagccactgccatttccccgcagaggtagctcttctgcgccctggaggggtacccggactcccacatcctgtctgccacgacccggactccctaggggattccaagggacagcaccgtcctccccatacatcatcaggaaccgaaagcagagaatttgccccacctcggcacttctggaagcacccactcaactacagtatgagacaagggctttcctaagagacctttctccaactttctttctctgcgtgtatgagcccggatcccttcgtccccgcctccttctctctctctctttctctctctctcctattttgtcctgggagattcctactcgcggtgcgaagcctcggatccgctgggaaccgcatagtctccggcacccttggccgcatgcttgtcagaggtgggccccgggaaacacactcgctgcccctccaacaagcgtccctcgctccccattggccccccggtccccgccccccaccgccccctcccgctccgcagcccccgagtggcgtcagcacgcccgccgggcatgggctttaaatgcccactagcgggagctcaggcgcttctgccctggagcgcggtcgggagtaaaatcgcaggagtgggagggtagcgagccagctggattccgagccgcggagcgcgctggctttgctccgcctgatgactccagagcgcgggtccaagcgccgcccatgcagcacccctgagctccggggaaggagagttaatgaaaaaacacttaaccgtctccgctgcgg

SEQ ID NO: 36914 - DNA, 2300 bp, Homo sapien
aaatatttgcaaactacccatcagacaagggattaataaccagaataaataaaaagctcaaacaactctatagaaaaaaaatcaaataatccaatcaaaggatgggcaaaagatttgaatagacatttctcaaaagacatacgaatgacaaacaggcatatgaaaaggtgtttaacatcattaatcatcagaaaaatgcaaatcaaaactacaatgggatatcatcttacccagttaaaatggcttatgtccaaaagacaggctataacaaatgctggtggcaatgtggagaaaaggaaacccttgtatatttttgatgagaatgtaaatcaatacaaccactatggagaacagtttggaagttcctcaaaaaactaaaaattgagctaccatatgatctagaattctactgctgggtatatgcctaaaagaaagaaaatcagtatatcaaagaaatatctgcatgtgaatgtttattgcagcactgtttacaatagctaagatttggaagcaacctaagtatgcatcaacagatgaatgggtaaagaaaatgtggtacatatacacaatggagaactattcagccatattcagtcacgtccaacaacatggatggaactggagattattacgttaagtgaattgagctaggcacagaaaggcaagcattgcatgttttcacttatttatgggatctagaaatcaaaacaattgaattcatggacaaagagagtataaggatggttgccagaggctgggaagggtggtggtgggtggggtgggggatgggagatggggacagttaatgggtacaaaaaatgtagaaagaataaataagacctactatttgatagcacaacagggtgactacagtcaataataactgtacatattaaaatgacttagaacatacttggattgtttgcaactcagtggataaatgcttgaggggatggacaccccattcttcatgatgtgctcatttcacatggcatgtctgtttcaaaacatctcctgtaccccataaatacatacacctactatgtacccacaaaaattaaaaaacaaacaaacaaaaatccaatcaaaagacgttcagctcaaaacaaaacctcatgcatgtgttactcatagggagaaccttatatcattaagaaaaggttaagttacatttagtataatttatttaagaaaacaaggaggttggcctgttgtaccgcggtggctcacgcctgtaatcctagcacttttggaggccgaggtgggcggatcacgaggtcaagagatcgagaccactctgggcaacatggtgaaaccccatctctactaaaaatacaaaaattagctgggcatggtggcgggcgtctgtagtctcagctactcgggaggctgaggcaggagaatcgcttgaacctgggaggcggaggttgcagtgagctgggatcatgccactgcactgtagcctgggcgacagacagaaattcagtctcaaagaaagagagagagagagagagaggaaggaaggcaggcaggaaggaagcttgtacaatgtttccttctcaaagcagacacttgaacatatcttaggtttctggtaactagtttcagctgtctcgatagacctgataagtcagtattttagttaatatgtagtaaagttctgagagtactctaaccaacttccttgtttttaactctctcccagggtatttgtctattaatttcagctttgtttgctcttaaatttaaaaatatgtatttggcttctgagttctgttttctctctcagttgcattgcttgatttgggtgcctctatttttccaataattctttattataatagtgctactgtttgctaaagcatacgtggtcaaaacccaattccctgcagagctgaaaagagctcagagaagtaaggtggtggacgacccactgaaatgttccagtttcagactgcatgtgtcacacccttgctgaaatacaattcgttttctttaatttccatgtgaagtgcacttctaagaactaacctttagtcactgggtgactttatgggagtaaaaggaagctgttatgaaatagctcttatggaactgttacaagctttcaagcattcaaaggtctaaatgaaaaaggctaagtattatttcaaaaggcaagtatatcctaatatagcaaaacaaacaaagcaaaatccatcagctactcctccaattgaagtgatgaagcccaaataattcatatagcaaaatggagaaaattagaccggccatctaaaaatctgccattggtgaagtga

SEQ ID NO: 36915 - DNA, 2300 bp, Homo sapien
ttgtattttcacttttttcttttattatgactttcttaactagagattttacatttcaaggaaggaatggcatgatgaaatcaataggatctggctggtctttctgtttcttcattgttaccagatcctaaatctttccccttatctggctcaggattcaggtgtacagcagataattccattcccatcaaggtactgactgaagttaaaaaaaaaaaaaagtcacccctgaaagcccacctgcctcacattatgaattcctcactgttaaacaatactccccattgtctttgcttcattcatagctcacagtgtcaaacctgttggagcctggaagcagctgcccaaactcacttagaaagaatgaagagaaataagaaaaagcgaaaactgaagttaggaggagactcaacgtatcaaagtatcgttctgtgtttttgagtgtaagaatactcaatatttttatgggtgtgaatttactttctgttaaaaaatgataaaacctaccgtttattaggtactttctctacatgctagaacccaatatacacattcagttaggtactttctctacatgatagaacttaatatacaaattcagtatacactgaatatacacatatatacccagtttgattctggacctcagctcttcaacaaagctgaggtccagaatcaaaccgggatcccctccatttctaaagcccaagttctttcatctaagatatgctgcctcagagaaagcaaagccccaaagacaatctcatttgagattttatcagcttgtttatttagttaaaaaaagaaaaggaagaggaaaaaaggaacgcatgtatgaaatgagtctgtccagggtatccaaagatcacgaggggccaatgtttgccattggaggggctgttgcttcctctccgcctccacgcttccctgcgctgcacctctaggtgaaacttcagcgtgccgcgcggtggtgcgaaggtgagggcagcgcgcagaggaagtaaacggggactacaggggaccagagacgtgagatagtccttaaaatacatatctaatctgtcctcgtcattttccactgccaccaccctattcaactactcggtgataaccctgtaattctccagtctccaatctgtcctccccaaacccttctccgcaactcctcaagaggatcatcgggtggagtccttcccccttctgaaccttccgtggctgctcactactccgaggaccaagttaaacatcctttaggttatttagctgcacgtcctggcccctactctgtacactagcttctacatctggccgtgtacccacctgttcactgtgctccagctacctggccctttcctccttcagcttctttgcacaacttgtctgttttggctcctgctttaatctcagctttgatgccacttaggcctttcctagctgattcccgccctcacccctgttacccgccatctaattacagctctctaaatgtgcttcaacagcacctttcatgtcactgattgcaatttgcattgaatacttgcctgattatttttgtctgcaagtgccacatgggtttagccctgctcctgacaagcacactgctgaactgagtaacttttgaatgaatgaatgaatgagtgaataaatcagtgaaggtcctacttggcactgtcatcatcctatcatcaaaatatttcgagtccctcggtgttgctatccctggcatgcccatccccgcgggctggcaaaaccctggagggggcagcctcccaaggcaccgccgcgggctcagcccatctaggaatgactcccgcaccacgcggcgaggggcgggtccggcggcgaggtgtcctgctgcctagcaggttcacgtgtactggtgcaggtggggaggaaggcaaggaaggagcgcagcagggcgcgccagatacgtggaggggagcgcgggcggcgcctcgctcgcctccggcttcgccgtcggtcactgcctgggaacgcgacttcctcctctaggggccgacgtgcggggcggggcggggccgggcgggagacgcccccgcagggctgggctgaaagccgccccaatgggattcggtgcggggcagcgactgcgccccgtcccggcgccgcgctcgtccgcagaggaggcggcccggcccgggcagctgcggctcgggatccgtcgaggggaggccgagcttgccaagctggcgcccagcggggtcatggtgcccggcgcccgcggcggcggcgcactggcgcgggctgccgggcggggcctcctggctttgctgctcgcg

SEQ ID NO: 36916 - DNA, 2300 bp, Homo sapien
tctgtttacctccaatggtaaggatcatgctttccttaagaatttgatattttcggtggctcacgcctataatcccagcactttgggaggccgaggcaggcggatcatgaggtcaggagatcgagaccatcctggctaacacagtgaaaccccgtctctactaaaaatacaaaaaattagccgggcctggtggggggcgcctgtagtcccagcttctcgggaggctgaggcaggagaatggcgtgaacccgggaggcggagcttgcagtgagctgagattgcgccactgcactccagcctgggtaacagagcgagactccatctcaaaaaaaaaaaaaagaatttgatattttaaaagtcttcagtagtagtttattcctccatacccttcagattatgtagtttaaaaggttgttttttttttttttccttttttctcaggttacatagcaccttttttttttttttttttttttttttttaaggaggcagagtctcattatgttgcccaggctgatctcaaactcctgggcttaagcgatcctcttacttcagccaccctcaccaaatcttcttgacttaaccatccacaggacaataagcctaattaacattaagcagaaaatatgtttctttataatctaaactctcaaacttttgccaaaaagaataaaaagtgaaatatttattttaaaataaatccctttatcttagattttaagagaaaaagctttcaaatattgcaattggtttgttattattttgaataaagttactgaaaatgagtatataaaataaaggcttttgagcttctccatcatggaatgtattctatgtaaatattctcccttagcataaaccgtttcaaggaaaacactacaaatatttcttctttgcctttattgctgccttcacattggtatattgggcatggtatagttaaggtcctttggatgaatattgggtacaacttactgatgttcagacgacttagacacatctgcttttcaagtatgtggaaaaaatggggttcccatctgattctaaatcttttaaagtgagaaggaacacatcattttaaacctttaacacagattgcattttgttgaaatcaggatgaatatagaaggttagaaaataaaatctacagtggggacgaagaggtgtcacttataaaggatgtgacttggaggtctattaaaaagaaaagcaataacagtttcaaggcatggtagtacaaatgagtgaaatgcaagtctggaccgtttaaaagctggtaattaaacactttattccatatcagaataaaagtcaactagttgaatatttctaggtgagatgtggtactacttttttttttgctgttattttatgtctgtatctaaaatatcttactgcactcttttttcaggttgcagcagatccttgagttttgaacctgacgggcaaatcagagcttcttcctcatggcagtcggtcaatgagagtggagaccaagttcactggtctcctggccaagcccgacttcaggaccaaggcccatcatgggcttcgggcgacagtagcaacaaccacaaaccacgagagtggctggagatcgatttgggggagaaaaagaaaataacaggtgcagaaaataacacaagtgccaagtgcaggagtagtttcatgactgtaaatgactcgtagttgaaaatacgcttattgtttacataggtgcttctctacctacctccaagttcttgaaatatttgaaaatgtaacaaatctttacattctttctgtgaaaagaatctgtatgcaagttgtaaatatggatatatggattagagagataattcttcaatggtgaaatctttatatggtgtattgtcagtgtgaaaacattaatctgtgaagagatttttaaatgcaactaatataagttggcctgtgagatgatctgaggtttcaaatgagggagaaaaaaatgaaacttgaaattataatagatgttatatttaacaaacttttaaaaatagcctgtaaatattattttcttacaaggaattaggaccacaggatctacacagtcgaacttcaacttttatgttaagagttttgtgatgaacttcaaaaacaataattctaagtggaagacctataaaggaattgtgaataatgaagaaaaggtaagaggtaaccctagaggcaagagaactgagtaggagaacaggcctctatatattttcatcaatgtgtttacattaaatatctcattaataaaagacagtgaggccaagcatggtggttcatgcctg

SEQ ID NO: 36917 - DNA, 2300 bp, Homo sapien
acaaagtgaggctgcagtgagctgtgatcgtgccactgcactgcagcatgggcgacagagcaagatcctgtctcaacaacaacaataaaagacgtgatcatacctacctcataggattttgtaaggatcaaagaattaaagaaaatagcataatgcctaacacatagtaaggactcaataattgaaagctattataattgtggttcgatgtattctccccctgccctgctaattttaaattatttacttcgcgttcctgaaaatgcattgctaactgtattatgtgtagataaagtggctgggagcttgatagctgtagcaatgtttttgcaaatattgtagatgaaaataaagctaattttggaagggaatggggaaagatgtaaattttagttttacattatttattgtgtactaaaacctgtatgaaggtccctacttaagtctaaggtcaggatctcatgatccattttgattagctaagtttgctcaagccaaaggactttattgcttcatgctaaccagtctgccatgcagtacaaagactgcaataataaaattgtgatttcttgctcctcagttgccttgcatcagcgaagggcacacaatgcaggctttgggttgtgattaaccgtaagggtctgccccaagaacagataacagcagactgcactcagctaaatatgcttctaggtaatgcaggagtttccaccagcctactctaatcacacaggtttctctttccctttctaggactgtctacccttgaactggaagtaggcagaatgtaaagagaggagttgctggatacttttaaaggcactgaaaaattcaagttaaagttatagttgaggggtagtagcctcactagcctatcttgagtaagggtcatgtctcattcatttttgtgtcttcaatgtcgcaacagagctctgcattcaatatatttgtaaatatatgaattcacaattttgattttctgaaatgtcacgtgtgaggacactaccagttttcaaataaatacaccttttaaagtacagttatgtgccaaataacaaggcttcagcaatgaatggatcgcataaactatggtgatcctataagagtatatgactgtaccttttctatgtttagatatgtttaagtacacaaatagttaccactgtgttataatcgcctaccgtatccagaatggcaacatgctgtacaggtttacagcctaagagcaataggctacatcatatagcctgggtgtgtagtaggctatactatctaggtttgtgtttaaatacactctaggatgttccctaagggatgattaacctaaggacacattcctaagaacatatccccatcttaagtgaagcactactgtagttgcttttgaaatgtgtgacctatggtgtattaagaggaataccgtgtgccaagaagtgacgctaagcgttttaccttacaactgagttaagtaaaatttggaaacttggtttcgaggttaatacatgaaaggcgacacaggtagtatgtgacagagggtaagaattgaatccaggtctacctgactcttaatcacaagacaaaaagtcttctattaattccgcaaaatctggtcagccgcttcaatgcgcagctttaggcagtccacacctggaatttggggtctggtttaccaagaacagccagtgtgtacacccactccatcctatccaggaactggaatcgagaaggtaaaaacgtggctattgcgcatgctcacaccgcccttccttgctctcccctccctgaccctagatgccaccgcagcaactttctgggaggattttggaacggctcccgccaactgttaagtcaaaccggcggaaatccttcctttctgcgacgtggacacctttctcatcctcgggcctttccaaccagggtgcagaaaccacgcgcctccgtttctcagggattcaagccgtagtttgccagttgttaatatggccgctgacaggccgctcccaagctgaggcctttcataggccaagatcgcatcctgtccccgcctattttgtccctcgtggctgcgtccgcccagctcttcgctacgcatgcgcagcgggggcaggctgggaggtgggactgactgagtcttccgtgtgtcgccgccgttgccgcctcagcttcagcctcgttactcctgcggttctgtgactgtgctgctggcgttaacggcgcgaggtgaagggaggtgacggagtgtgcccgcgcgcgcgggggtcccctcagtcccagcagttcccttcgtgcgcggggggcgg

SEQ ID NO: 36918 - DNA, 2300 bp, Homo sapien
ccaggatctgcatgtgagtgtgtcagatggacatgtggctagaatccttttgcttaagtttgcaattcaaagaaatacaggggccggacgcagtggctcacgcctgtaatcccagcactttgggaggccaaggcgggcggatcacctgaggtcaggagttcaagaccaacatggtgaaaccccgcctctactaaaaacacacaaaaaattagccgggcgtagtggcgggcacctgtagtcccagctattcgggaggctgaggcaggagaacggcgtgaacccgggaggcggagcctgcagtgagctgagatcgcaccactgccctccagcctgggcgactgagcgagactccgtttcaaaaaaaaaggaaaaaagaaatacagaagatagagcctgtttgtgcctgcacacctgagagcaggccacgggaacatgagattgatgtctttaatcttgtcagaacggatagacattggggcaaagaaatgagtacggtagagaaatgtggcaacatagtcggcatggggggtggggtggggtctgcagaatacgtggccaaatctcaatgggacactggtgtctagggagcttccttaacaagcatcatgtagctgcataaactacagcaatgggcagtgaggaagaagactgtaggcttccctgatcatggcctttcgcctctccttctttgtccatcatcagaggagctaccgcagaggagacctggagagaaagaagtgtgtgaagggtgtgcctggtgcccagccctcagttcttcaggctgcactgccaaagggaggaaaattgcactgcgaaagggagatggacatgagattcaacttttaaagtaaagttaaatgagtcttagaaaccaaaatgagactagttgaaaaagtgacaatgttagaaaaattaagtcacatagccaagacgtgaacagatgtttcccagggggaaaaagaggctttagcgaacaaagaataggtaggtattacaaaaacgcaactgtttacacacacacacgtgtgtaaatatgtgtgtatacgtgtgtatgtgtacagttgcatttttgtaatacctccctaatctttatatatatacttatataaatataaatgcaaataatataaatattattgttgcacacacacatatatatgatgatagaggatgtagcatgtaggataaaccttgagaaatgggttggaatgtcggcaataccaagtcgggaatcaggaattcaggagaagagcttgaacaaaaagggcaaagacagtacagacttaccgcggggaagtacaaaaccattctagaggaccacgtcgaagtccacatggacagaaacattagggtgttaaaggggatgataaggcttggatgggcagtttgcttcaaatagtggcggtcattgaagtcaggcacaatttctattttttttccccactgtaaacctaacccacggcggttggtcaaagtcttgccgaataaaaaaaaaaaaaaaaaaaaagaattaagtgactggactgccaagctgtagagcctctattaagcaatgtacagccaggaaaggataccttagatgagaatgacatgggtagaggggtgtttcaggaacatggctaaagagcctcgctcccagcctcagccgggaggctgaataaaggacagtagcaggatcactccagcctttgaggacacttttggaaaccctggtggattcccagcatcaacacttactgagggctgctttccatccctaggttctttccggcatttgtaatttccaatccacttaggacacttctactcctcagaaaccgtttctgtcggggccgtgagaggagacagtataagacttcctggacccaagggacgccgggtcccctggaagcgcccatcgcattgaagaccacgtgtgccttgctggggtcccattcagacaagtcccgggtcgttcgctcatcgccctccacgcgaccagggggcgcccgcggtatcggcccggctagttcgcaggcgtgcgccttccctcactgcgccggaacgggccacgttctcggacccagaagccgcgtcagaattccacgctggccaatcggaactgtccatgtactactgggggcggggctgccaagggaggaggaagatggcggcgggggcgaggtgaggtgttggcagtggaaaggggttcgggctcggggggcggggggacgcggagcgatggcccgcgccggccgcaggggcggataaaaagccgtcgcgctgcgggagtgggcgggagggagagggggtgtctgagg

SEQ ID NO: 36919 - DNA, 2300 bp, Homo sapien
ctcaacttatctcctacctattcttcaaggtcctgcttaaatcccacctccactgcatgaacttctcaagttccttcattcacaatttctctcctctcttctcacaatagtaattttactctcaacacttcttgttattaaccatgtcaaatatgtgagtgtgtgcctacctcctaacaagcctgagagtccatggaattaaatgcaagattccaaggaatatgcctagcacagtgctttaggtttgtagctacccaataagtactgaatttttgtacttacaaaaactccctatggtgaaattcattccctcaatcaaaacatatgagaggacaattctatcaagtactgtgttgggcactgatgatgaaggatcacaaaccatcccagccttccaagacagaaagggaccattttcttttctgcctatccaatctctcacatatttttcataaacccagttcaaataccacctgacccccaccgctcccatttgcagtacctatcacacagcccatgcctaagtcctctatagcctcactgcgacttaagaacagcgcctggaagctctcttaaagaaacagtgtggtgtaaccaaaggcaaagattgtgaaaaagcacagaatggctaaaattccaatatcctcattccgatctttgtggccccattacgatcttgtggccttgggcaaatcagttaatgtttttaaaccttggcaagggtatacaaataccatctacattactgcagtattataacgaataagagattttttatttatttttatttatttatttacttatttgagacagagtttcgctcttgttgcccaggctggagtgcagtggcgcgatctcggctcaccacaacctccgcctcccgggttccagcgattctcctgcctcagcctccctagtagctgggattacaggcatatgccaccacgcccgactaaacttgtatttttagtagaaacggggtttctccatgttagtcaggctggtctcgaactcccgacctcaggtgatccgtccgcctcggcctcccaaagtgctgggattacaggcatgagccaccgcgcccggccaagggatatttttaaaatgttaaaaagctactgagtcaaatccagagaattagtaggtgttcaataaagctgatctcccttcctcgaaagcgctagcgctgtgatttgcagagaggccgcggcaactcgtgccatgggcaccacccgccagaccagcggtctagcggtccaagacgcctcggccaccccccaccaccgcaccgggcctcaccttggtggtcgtagacgctaatgtaggagatgcccacggccatacaccacaccacgaggctcgcgatgtccgagaagctgggttcctgctccacctcggtgatcaccaggcccatatgcacaggcagcttctccaaggaacgaccgtccgcgcgccagcgcatccggtggtgtgcggctgccaggcacgaccccccgcgcgggtgccggtggtgacggcggttcctgccgactgccgggggcttgcggagcgtgaagccgagcggcgctaggaccgcggcagaggcggcgcggcagcagcgccgccagatccagttccaggtgccgaaccgaacgcggagccaggaggtgagcgtgcggtgcagacagagcagcgcgtgcagcacccgccacaccagctcgtacagccccgtcatactcttgtggccctcagacaccccctctccctcccgcccactcccgcagcgcgacggctttttatccgcccctgcggccggcgcgggccatcgctccgcgtccccccgccccccgagcccgaacccctttccactgccaacacctcacctcgcccccgccgccatcttcctcctcccttggcagccccgcccccagtagtacatggacagttccgattggccagcgtggaattctgacgcggcttctgggtccgagaacgtggcccgttccggcgcagtgagggaaggcgcacgcctgcgaactagccgggccgataccgcgggcgccccctggtcgcgtggagggcgatgagcgaacgacccgggacttgtctgaatgggaccccagcaaggcacacgtggtcttcaatgcgatgggcgcttccaggggacccggcgtcccttgggtccaggaagtcttatactgtctcctctcacggccccgacagaaacggtttctgaggagtagaagtgtcctaagtggattggaaattacaaatgccggaaagaacctagggatggaaagcagccctcagtaagtgttgat

SEQ ID NO: 36920 - DNA, 2300 bp, Homo sapien
aaaaaaaaagattatcattttctgctacctaggataaaagccatggaattttctacattcacttctaagtcagtcatgtaccatattctctcaattcttcctttgtggtaaatcctttttcccctcatcgcctcgacaaattatgtatggactaatacagtagtctgctgcttgcccttctatatgctgttgccagattaattcttctaaatatgcacatttttatgtatttccatattgctcagaaattgttgcttatccatttgataggcagaatgagataaaaactaggactatcctcttaccaattttttcatatcctttgcatcagcagcattggtctgtttttttaacattccgaactcatgctttttcttaagcattttttcccacctgatatcttctctagttttttctggtttaaccttcagagttcatctcagctcaaatcttattttataaagccttcctcaccaaaggagacttttgtaactactgttacacatatacttctggcttggcatttgtatacagtatattcagcaggttctgtgccatagatatagatatatatatatatatatatatatatatagttcaaaatatatattcaaaagtgatataattttgattgtttaattatatattgatttaatatatttatattatatatatttaatatttattgatttatatatttaattatatattgattgatataattttaattgattgttcagaatactcaccagaatttgcaaatagtaatgacaaagatgatcaaggtaagcatgagtgtataattgaacatgtaacatatgaagatgtgtgttttgtgtttcatggcaatttctgttactctgtcatttattcatcacgttgctctgttactctttaatgtcaacatctttaatcatcagatttagactttcccatcttaatcttggtaaaaagtgaatacatggtaaggattttattaaaccaggcaaatttttaaactagttccacagagaatccatagaatggacacatttgtagggatattgaaatgaatatataaatagaggtacaactggttgttctatggggtgaggaaagaaattgaatctttgctggacaagaaagttggaaattctacaaagagaactggtttgatggaaaagatttaagcagctttatatgtatatatttattatatatatgtgtatatattagcctgtgttctctctcccagttattttgttaaactactttaaagtcatgcctgactgagagtgcagagtaggaacatttgataaagattaaaaaggcaatggctactagaaagctgcctctgcaaattgtcaaagacttgttcctttttttttagtcagagctcttactagttttacattaaatgtatgtcacatagttcctttgtctttctcatctttctcaataacatgacagtagttaacagtgttaacttttccctgcatagaggaccatacattgttctttgtattttatttctgtgctttgttttaaatttactaaattgtttttctgttctctttttacgtaatccttattacttcctcttatgatttaaaaaactaatcaaattgaggcaagattatttaatacaagtagtaaatctgcagaaaaggtacattagactgtgagtgaggaacataacaggctctagaccactgctgcagtttataatttcttggagaagaaccttaaagagtttaggcctcagtttctgaatccataaagattttaagtaagtgatctcttaaaattcctaagtctaaatttctgtcatattcacatgccactacttaagtagttacctctgttcttttttttgctggaagccagactcttgtattaacaaagttttgttgtcatgttttccttttagattctagtttaggactagtcattacagctttgtttgacattcgtttagttctggatctagtgttgttttcatagcaagcattcacttgaagaggaaaaattaacctagttgtgttttacttgcctttttcttttttaaaggtattttcaaaagaaataattccagattgatggatgaaattttaaaacaacagcaagaacttctgggcctagattgttcaaaatactcaccagaatttgcaaatagtaatgacaaagatgatcaaggtaagcatgagtgtataattgaacatgtaacatatgaagatgtgtgttttgtgtttcatggcaatttctgttactctgtcatttattcattcacgttgctctgttactctttattgtcaacatct

SEQ ID NO: 36921 - DNA, 2300 bp, Homo sapien
actgtgatggcagggaaaatgttaatcataatacagagaagggaagggtggggttctgacagaacagactgagaaatagcaacagagcttctgaggcattgaggagtagtggcactatattgaagagtcgtaggagatgaggttgattgaaggggtaagatgaggaagacttagggaagttgagagtttgaggacatttgaagcaagctttagcaagaataatgcattaaatttgttctttgagcatattatttcagaggtgtgaataagacttaaggttgatagcagagattattaagagatgatgaggaattagaagtggatgacttattgcagaatttctggcagtctgaggaaggataaagaaaagtatagctaaagacaggcaggagtcctttcaaggtaggtttgttcactctttttttgtggtgcatgtgactgtaggactctgactgtgactcttctattctgaccaggtgtttgaccctgatactatttggaattcccacattataaagctacataaattacagatgtttttcatgttacttatttaaaattaatagttacttctaatacataaaagggaaccctctgattgtgtattcagtctatctttaaagtgcttattttcacactgtaattgcccttgagtaattggaaatggtggaggtaagtgttgatttctaggttgctcacaacatggctacaatatttcatcatgtttggatgctgtgtggctctgcccaacattaagcatggctttcctaaactaagtaatattggctttactctgaccaaggagaaattctttaatggatttaaatgagatcctttatacatagatctctagctttgcattaatctgagcttacgctttaacaagttatgaatctctcattactagttgcttttcttgtggaaaaagaggcatattaattttttagttgatgatgacattgtgtgtccttgtcatctcattgtccacaatgagctgaacaatcttagtagaattgtttggcatattctgcttataatttaccctcagagcagagggaatagctatcttcaatgaacactcgtcaataaacagtgagtgccactacccctcggtgcctcagaggctctctgctatttcccagtcagttctgtcagggccccaccctttcagtctacatattatgattaagacattttccgtgcctgtcatggtgctgtctggtggaggataatttggtgtattctattcttaacttctttttggtccttatcttctggttcccccctacattacagtgtatatctaattgcttttctccccccgtgttttcttttcagctctttgccttcccacctaaacatcagttatgaggactttttctctgcccttcgtcaatatgcagcctgtgaacagcgtctgggaaagtagtggtcattggttgcataatttgatttgaggcttgtggaggaaaggaaccaagtgactctgatgtttacaaagcacctatgaaaccctgtacacacctagttcataatcctcataatttatcaacaaacacaaaaaagtgtcttacttgagagtgagtgtgtgtgtgtgcgtgtgcacgtgcacacatgtgcacgtttgtatgtatggaaataaacttataaatggggacgtattggagaaggaaatacatagacctacaactttgagcaaatagcagtgatgttttaggaactgaaatgtcacacttaaagtcttcagcccagctacttccctatttttgtggggagaagagggcctgattagaactgttctggttgtgtttggcgggaggggaataatttttgttcagtccttcttagtgaccaaactttaatttttaagaataatatattgacttactgaactgaagcattctgagttgaaaggagctccagaggagtggagttctgtgttgctcacatgttaaaatcttgctcaccttcagagcagagggaatacctatcttcagatatccgtccattttcatctcttaattgtagtcaaaagtatgacttgagagtgttgctctggtattctgggttctgaagtctggtattctggtattctgggttcaaaagtatgacttgagagtgttgctctggtattctgagagttgctctgtattctgggttctgaagattatttgaaaaataactcctactacattgaaatgcagacttaaaaatttaaacattggattaggcagtcaaaaaaaccaagcaagcataaaaggtcaataagttgtaatcttgatagtaaaggtggaaaactt

SEQ ID NO: 36922 - DNA, 2300 bp, Homo sapien
cctgactcagaggagatgtagagcatttggatttagtagtccctctagagaaatgaccagatgcaaatgcagacattgaagtgcagacacagcactgagtcgtgatgtgccaaaaacattcaaagggaggcaagccaaatgtgaaggaagagggcactgaagcaaccagttattcaaggcagacacctgaaattaccataaatgttgttttaatagagagacttctaccacgatttgctgccaggttcagctgaagtgcattttattcatgtctgctacattcggtgggtccactaagggtaaatttattgccactattggaattttaatgcccaagaggctacaagccttggtcctgtttgtaataattcttcagagtgtcctgtgcaaatctgaggtggaaaaatcagagaatgaaaggttgttgagaaagaacaggacgacattttaattataaaagggaaaatgttccaattggggttaatttctgtagaaagaaacctcagggatatttcaggtagcaagtaggttttacagaattgaaatatagattgaagagattttgcaaatacccgttttctcatatttttgatgattaaaaaaagactccgaattttgttaaaggaattggaccttgttaactgaacaaagaatcccatcttatttatatccttccatattccttttctcctctgttgaaaggacatagtccattccttttttgagtgttattttctccccaattccctctctcagtggcaaatcctatcactggtatttttaatttgctggtttcagagcatttggattcagtagtggtatcagcatgcctttgtgtgaacaaacttacctgttaaacttactcaattccctgcactgaagcgaagagttttttaaaatgcatatcatttttcaaggcaagatccctatctaaacagtctaaataaaggaaaatttgaaaaatatctctctttcaagaatcgattattaattgggatccggatcaattggtataagaatgcccgggacagagagtcagtttccattggtagaaatatggtccaagatttctgtggcagatacacaggactttcccttttggagttgggggactattaaaggagctgttaggctcccctgctgcgtggtttacctcatttaagtcttacaactcccctgggagaaagacatgagtagtctcgctgcacagagaagaatgtctcagaatttaattgcttagagtctctgcggataagtttcagatgtgccactgaaactcaaatctgcctacgttcctttcacagcactacattgcctcaaatggagacgttttgagttggtctgatatgctttttccagttcccagaattgattctttgtgagaagtagttttttctcccatttccaccaggccaattatggcgaatgtagtaggagcaacatctaggattctccgtttgggtttctaatccggggccggcacctgtctcggcgtcctgccgctgtcccaggccggtggtgctggattccgcggcgcttgggcagaaacgaggaatccccgccaactccacagggaggatctattcccagcccccttatccccctaaaaaacacccaaaccaaaacaatcaccacaacctagaccgtgggcctctgcggacggggcagtagagggtcgggggcaacaaggcacctcggcagcgccctctggcgagaggagagcgcgcaggtcccccgcccgcgccccgctctgccgccgccgccgccgccgccgccgccgccgccggcgcccccgcccggctctccgggttcaccctcggtctctcactccgtgagacacagacggtagctttccgaccgagcggggcacaggctgaggcggcgccagcacaactgccgccgcgcgccccgaggagacccgggcacgaggaaacaaggagaaatcaggactccttccccggaaccgaccggcagctccgcgcccccgcgcgacacccttcgcagccacttcgcggggcgggccaggacttggggacgcggctcgggaagagccggggcgggcggcggcggcggcggcacgggcgcgagggtgcgcgcactgggactggagaggagtgagtggcgggctgggcggcggcggccgtagccgcgggtgcctccccgcctcaccgcttcgcaggcagcaccgcctcccgggccgcggccgcccggccgggtcctctgcgcgttcccgggcccggaaccggcacacgatgcacccggctgcgttctgatcgccgccgcgcctcagcctctgccgc

SEQ ID NO: 36923 - DNA, 2300 bp, Homo sapien
tgacatattcagacagtatttcactttttttttgttttcaattcattgattcattcactccaaaacacttagctaacccttgctatatgtcagtatgctagaggctatggataagtatatgagtaagacattaactctacctttggataaaagcacccagtctagtgaagagtcagtaatcacaatcctatgaaaggattaatcagagatggatgtgcattacccagttggggaaagggcttagccaaaagaccagagaagggctacattttgaaaaatgaataggagtttgcaagatggggagcgcagttccctgatacagaaagactttgtgcatgcttgaaggcttgaaggctatgagaagtgtggcttggaagagtaggctggcaaactgatttgaccaccaaaggtcaagagacccttctctcctattgtcaactggccacaactcatgctttgacagtctgtatgtaactgaaagctttgtgctcacaagtcttcatagggttggaaagaccacctcattatcatggtcattggaatacagctaagagcagaaataagtagctctgattctgagagtggtccaaatacagctgaggatccaatgttcttctgaggctttgaggaccagctgaagtacatctctaggactaaagatgtgtgtcactgtttaggcagcctctaagatggcctccaaggatctctgcctcctggtattcactcccttatgaaattctctccccttgaatgtgggctggacttattgaccctttgttaaagaatacagtagggtagaagtgtcacttttgagattaggttataaaaaccttatcttccatctttggtgttctctctctctctcattgtttgtcctgggacaaaacaaatgccatgttttgaggcagtactgtacaaaggtccttggggtaagggaccaatgcccacccacagccatgtgagtgagcttggaagcaggtccctccccagtcatttcttcagatgacactgcattcccggttgacaactggctgcaacttactaggagaacttgagctggagacactcagttaagctctaacctggttcttgacccacaaaaactgcgagataatcagtatttcttgttttaaacagctctgtctctggatatcttgttacacagccataaatatggtatatagtcaccattcactaagtttctgtacatctacatcctctatgaagaccccacaggttggctacagagaattattattgttcctgatcatgattgccctgccttgagaaataaggtttatctcaggcctgaaatatatgtaaaaataagaatgaagaactaagagattcaaagtctgttcttatgctaccagtttaaaaatgcaagatggtgaagattatagttgttggcagtattaaaagtgttgtcaaatggcactctttttcatctgagagtgatgccccaacttgctgtctcttcccatcacccacaaaccactagagtgcatgcaacattcaaagctgatcaggaactcaggatagcatctcagagtcttactacagatctgctgccaagcacaagcctttttctgtttggttctttcatttttatctattttatcacaatcctgaaatttagaatgatttggaatgttgtgtttatgcagcctttctggtacacctttcctttcattttcatatgatgtaattatgttatccttcatttattcacacacaaaagatgttttgcatggtaagcttataacctgcccagtcttactctggcatagaaagtaacttgaaaagccaaaatctgcaataaagttaatttgctaaataaaaacatgtgggtatctgatacgttgatttatttgtttaaatatttggtaaactttaggttaaaaatatataatgttgcaacatattagaattcttctaaatgtacaatttattctatttcaggaacctaacccatttcttcttaactttgtaacacaggagaagaaaacctcctggcaattttacgacgaagatggtggaagtacatgattttgggactcatagacctggaagcaaattatctggtggtcaaggcttaccaatacacaactctgaccagtatccaggtacccatggttcttcttcccttctcaacttcctctatccagatgtagtttactttcagtttagtccttgaaaatctctatactacaagttactatctgtatactatactatagtatacagactgcagtatacagattctgtatactataagtctatgagttttgcaacaagat

SEQ ID NO: 36924 - DNA, 2300 bp, Homo sapien
cacaaaaactccccactcttgtaccaatctaaaaagtaaatttttgaatccattttccaactgtgtcacacacagttgttagtatccttctaaggtgtgtatatgcctatgtatactttttaagtaaacttataaacatgtggtaactagggcatattttattctgtctacggcagcttcttggtttatccaactaagtattactaattctattttcttagaatgagaagttctcagaacaatgatctatcacctaaatttcaaatgaatgtgtaactggtagacaaacttaaagcagactttctaaaactattaacagtgctcaagaatgcatctatttacatcttaaaaatttctcagttactatatgctactctaatgaaagctatattcaaattataattttttcccacagcatgccaacagattaggaattataaacagacagatctggatttgaatcctgtctattctttagcagctggttatctctgacaaattactgtaaacctcgttaggcttctcggttttgtattatcaatcatcattggtaactgatagtactgagagatcctcattatgtaaggattgaaagaaaaatggttgtagcactgagaaaagtatcaaacattattctgcaatttccttaacttgggttttacttttaagttgtaaattttcccttggcaatgttcacaggatatctttgctaaaatattatttttcagttagttttaagctgactctttaaatatcaaatgatttgctctagagatggattttctttctttggaagaagccaagatcatttccatttaagggcatgtaagcagctgctgctacacattttagttacccataagaaagtgaagtgggctaagttcactctgtcataagcatttaaaaaattaaaaattacaagtacctcctctaaaattaaagaagagatttaagaattaatattttcgagtgtggtgacttaagtaaatctaacatctaagacaacaaattagataaacagagaagaggagaatgatgcccggctttacaaaaaaattatttccccagttctactgtaagataaactgttctaggaagttcaaaatatcatctcacttactagcatctcatttttatagtaattttcaggaaagcaactgctagattaaatgaggcacatcctttcaaaaacattacaaaacttaaatttcaacacatcaaacctataaagcctcattaactgagatgtaactgatttggaatctgtaattatttcttttttgccataaagttgcccttaatactgcatcagtttattaaaaatttggtaagattgtgtaataatttaatgcaattgtttttaaaaaatcttaaatacttaaagtagcatattgctattttgggggtgttgtatgtatcagtttaaatataagtattactattcacaaatatattgttaaactgctaattgaagaaaacacaaatgaattaaatacatttattagttctttaactgtaagataaaaataattttttaaaacaaaaagcaattagcctgattttctcatactccttctcccatacacacaagaacaagaacaaaataagaaaacaggtataaaattttattgtgtaaaaatatttcactttcactaaaagctaacattatgaagacacgtattaaagcaacagcagcaagaattcaatgaaagttgttttgcttatacctgtgtttatttttctcataattaaaattcctgcagtaactattttagctcttcaacatcttcaccattaatattcaattatctctaagcctgaagatgcatgaatctttaacaaaagctttccaccacctcaagtttacttatttttttcatttatctaccatatactgttttaaattaaaaacaaaagatgaagcacaaagtgttaatgacttttccatacctaaagtaagaagttctaaagtttggttgtgataagactgagactgtggctaaccaatcgaaacttcagaattcctatgtgacatcataagacctccctagaacactttttctcctccacctactgcaactgttcccataaactgggtgacagagtcagaaaactccccagctaaacacccgtaagacttcatacaacacaatactctatactgtgatgatcacagctgccaaggtaagaaacagatttcgctgactttggtaattcttactttctataattcttaattcctataatttctataatctgaacttttaaaatgagttaattttatgaatatcagttcaatc

SEQ ID NO: 36925 - DNA, 2300 bp, Homo sapien
caaatttaagaattataaatgcaacacttatttttcagttttaaataatgtctttttttgaaatgagacattttaaacaaatagtttaatatagtttggtattaaatgtggcatttttagtactattttcttcttttgtgatctagtttatattcttaaaaagtcccctcccaaaacattaaatatcctaatttcatctgagcaatgatacttatacacacacacacacacacacacacacatacacagagtcactattttcattacttatatctgcacagaacaactgccaagattgaggtttattgaggttcaacgataactgtctttgcttttaaaattctccttgtagtcctaacacactgtcacaacaaaacaaaaatatggcagtttaccacatggggtttagtaatggttagatagtccttaggttctccaacttgtgttatgataaattttaatcattctgaaaaccatggctgtatcataccatgtacatatcatccatgtatcatggatttggggggaagcattagttcagtatatactcagaattcatatgattaaaagaaatggatactttagcaacataatattctcacttagtatttcaattagttctaattgcattagccctctatcctcccaagtttaattactagggacacaaaaatttcatatttggtgccaagtgccaaaagagcaacatgtttttactgtttgcttttactctgtaatagatattgaaatattttagatactttcaccttcgcatgtactttttttgtgtgtagtagcatgccctttatattgataaaaagatgtagaaaacccgagtaaacgattttctttaaacactgtttagaattaggaaattggcagttttgaaataataagtgtattttaaactcgcaaaggccaagatatttctgtaatattttatacacttcttagaactgcatcacaaatgaatttcaaaaattctgttcctgagactgtggtaactacaaagcatgaaaaaaaaatctatacatagtgctatagcttctgctaattttctttttgggacttaaaaaaatctatcctcttcaagtgttagataaaacgagctagtgcacattaaaataataaaaaggaaccaatcacattcgtctttcatgtttctgtatctttttatcatcagaaacagctgacccttggctaacattacatgatttggagaaataattggaagtctaccacagggagactaaatgtaaaactccaatcagataaattacaacacggatgtggtaagtgatagaacacacacctaaatctaatttaacttccaagaattttaagtagtatttcccaattaaaatgtctttaagggaaaaatgcaaatatgaggcctttgttagcaagattccagaacaggaaaagcggaactcaaagcctctctagttaagcgacctgcgttccgacttacctctgagtgatgggcctactgcagagcccgcctcccaccacagtgctggcccagaattttttatacgaactagttcgtaactaaacgttggaagcatcaccatattgccagtgagaagtaagatttaaaaataaaacgatgctgtcccttttcgcccttccttaggacgtctcctcctgcactaagggttcaggtgaagggtggaaactggccaagaagaggaagaacgtgaaggagtagggggcaaggaggaaagggctccctttacagactttggtgccatttttactttctgcttgctaatctgaaacgttgtgcgattacaatgacggcccctctccccctcgggtactaattacccccgggccttttccggtgcacatcccggtgctatattctggtgcctgtgttgcccccacgcccccattaaattagtaaaggaaaaccaccccttttctgcccctaaagtaatctataaacgaaggaatacagatgaggatttaaatcccaatcctaattccaagggaggctggaagccccctcagccgcgccctggcttggctttttcatctcgagcggttgtgacgccaggggcaggtcttccacgtgtcttcacagaggtgcccggagggagggcgtgagggattacccaagggaggggcgagtatcgcaaaataggccaagtcgctgccctctactcaactcgcagggcgggaggatggagacagagggatgcggcgggagggcgggacagcccagtcgccgccaaggaggcgaagcggggtcggggtagctcacccgccccccgcagtccccgccccccgcagtc

SEQ ID NO: 36926 - DNA, 2300 bp, Homo sapien
ttataaatgatttttgggattacaacaatccacaaataattggataacttgtcacctttgtgatctggaagaggttgtatagcatggtccttgatacacacttgatatacaagaattgtctagtccttggaatcttttagaattcattcataaatctctttctatgtagtagcaatagttctttaggaactatttcaattgttattggttggtttacttttcctacatattgttgggttcttttgctatttatatattttatatttttgtaaatataaagctctcttgagctttcctcatattatgcatggggtttccttctcattttatttattttttagaggcagggttttgctctgttgcccaggcttgagtgcggtggcacaatcattacagctcactacagcctccaactcctgggcttaagtgattctcctgccttggtctctcaaagcactggattacaggcatgagtgactgcacctggctcttctaatttaaaaatatcacttttattcattgtcatatccctcttcagttctgtagatgatgtttgcacaatctgataaatttgaatcagaaaaacacatgtaagatagctcaacttaatcagttcaaagatttatatacaaatttaagaattataaatgcaacacttatttttcagttttaaataatgtctttttttgaaatgagacattttaaacaaatagtttaatatagtttggtattaaatgtggcatttttagtactattttcttcttttgtgatctagtttatattcttaaaaagtcccctcccaaaacattaaatatcctaatttcatctgagcaatgatacttatacacacacacacacacacacacacacatacacagagtcactattttcattacttatatctgcacagaacaactgccaagattgaggtttattgaggttcaacgataactgtctttgcttttaaaattctccttgtagtcctaacacactgtcacaacaaaacaaaaatatggcagtttaccacatggggtttagtaatggttagatagtccttaggttctccaacttgtgttatgataaattttaatcattctgaaaaccatggctgtatcataccatgtacatatcatccatgtatcatggatttggggggaagcattagttcagtatatactcagaattcatatgattaaaagaaatggatactttagcaacataatattctcacttagtatttcaattagttctaattgcattagccctctatcctcccaagtttaattactagggacacaaaaatttcatatttggtgccaagtgccaaaagagcaacatgtttttactgtttgcttttactctgtaatagatattgaaatattttagatactttcaccttcgcatgtactttttttgtgtgtagtagcatgccctttatattgataaaaagatgtagaaaacccgagtaaacgattttctttaaacactgtttagaattaggaaattggcagttttgaaataataagtgtattttaaactcgcaaaggccaagatatttctgtaatattttatacacttcttagaactgcatcacaaatgaatttcaaaaattctgttcctgagactgtggtaactacaaagcatgaaaaaaaaatctatacatagtgctatagcttctgctaattttctttttgggacttaaaaaaatctatcctcttcaagtgttagataaaacgagctagtgcacattaaaataataaaaaggaaccaatcacattcgtctttcatgtttctgtatctttttatcatcagaaacagctgacccttggctaacattacatgatttggagaaataattggaagtctaccacagggagactaaatgtaaaactccaatcagataaattacaacacggatgtggtaagtgatagaacacacacctaaatctaatttaacttccaagaattttaagtagtatttcccaattaaaatgtctttaagggaaaaatgcaaatatgaggcctttgttagcaagattccagaacaggaaaagcggaactcaaagcctctctagttaagcgacctgcgttccgacttacctctgagtgatgggcctactgcagagcccgcctcccaccacagtgctggcccagaattttttatacgaactagttcgtaactaaacgttggaagcatcaccatattgccagtgagaagtaagatttaaaaataaaacgatgctgtcccttttcgcccttccttaggacgtctcctcctgcactaagggttcaggtgaagg

SEQ ID NO: 36927 - DNA, 2300 bp, Homo sapien
ttttaaaaagcaatttctgtctgcagacagacaaattgtgaaactgtcaacctggagttaagatgcccgttaagctattcaattagaatatgtttattttgttaaatagttgatatttgttaggtagattcatatattatataaacttatccccacaataaagcttggcaatggatttcattatcctcatattatagacaatgaaaccaaagctcaacacaaggtcaccaagttacaggtggtagagcaagattggtgctctggtgtctagccatctaagcccagtgttctttcttactcctgaacccacaacctctggttagctccaagcctcctaatgagaaggaggtgaaggaccacactgcatgactgacaatgctgctgaggtcaacagacctatgggcaatgtggcatgttgatcagatatttaattcccaaatggatttggaattatttcccggtgtttcattcagttccaccgttttgtctatttatgagttagcatacactttcagttatcaaagctttatatttcagcatctggtagagctagttcctccctcattagacttttccccctcagatttttctttgtgctttgaatcaacttagttcacaagaccattatgaatttttttgtcatatatcaaatttatagcttaaatcatgagagttgacatcttttttcatttttgaaacagagtttcgccctcgttgcccaggctggagtgcaatggcgcgatctcagctcacagcaacctctgcctcccaggttcaagtgattctcctgcctcagcctcccaagtagctgtgattacaggcatgtgccaccaaacccccccgctaatttttttgtattttttttttagtagagacagggtttcaccatgttggtcaggctggtctcgaactcctgacctcagatgatacatctgccttgggctcccaaagtgctggattacaggtgtgaaccactgtgcctggccaagagttgacatcttgataatattttccatcttcctaataaaacaaatagatttttccatctgcactagtgttcttttgtgtttcccagtactcatgtctttgtggctttcccaatcataaaggtaaatctttctatcactttttgaatcgtgtttcagtgttgctttctttccctctctcttccttctttcaaacagcacatatgggcacacatacaaacttcattgacagagtcatcgagggcatttgaaagaaattgaagaaaaaggtccaggccctttaatgacaggcacatgataaggtgttctttctctctggaggagcatggcagtctgaaacactccgcgatcatagccttcatgatgcagggacttttgtgttttgttcattgtggtttttccaagtgcccagggcagtacttggcacatcgtggcacttaataaatatttgttgagtgaatgaagaaaaacccagtacatgccttcccaaattctactgaaaagcagttatgtttaccactatactatcgatgccaccccaaatcccactgaaacaaggcctttggtttatattttctggcagctgaaactatgggtattttgttgtagaaagtctgttgagaagagaagcagtatatagagtgttatcatcttcccatgttggttagactgacctgtttctccattagagtattagtaataaatgcccaatgctttattgaaaacaaataaccatattccatttttgcttcttagcagccgaagccttgagattcacacttgcacaatgatgtctttcaaactgcatcctgacagatacttcttgagctgtcataaggcctatggagaacatccagtcaatgtgtaggttaagttgtcaatgaacaattatggttcttctgagccatgttttaaagcaaggcattgtgcccctccagtgctgcagtgtgtccgggctgtgtgggatgcaaagtgtgtgcaggaaatacagtcacactgtggttttacacggaagctcaggttgcctcttatgaatatgtatgatggggctggatcatgctcttgccacttgagtttacttgagcttaacttaacccccacatacccatttcctgcctatcatttgaagacgttccttgaggaggtttgaaaaagtgagttgtttctccaattgtggagcattttcctttttttttctcttaaagatgatgacaaactacaccctgatttatttttattcactgtgagtcatttgctagtcttattttatagataatattttatacctcttgcttagaagcagatgggaaagtt

SEQ ID NO: 36928 - DNA, 2300 bp, Homo sapien
atagtatctgcctgtcctaagaacttactgacccaacacctgatagatagatttttccacttaatgcacacttgctttgtttcactaaatgccaaacaaggattttccattgtatgcctttctgggttttcattcctcacctttcaagtcttctaagctcttcactcaagaggctctgcagctctagcttttccagaataagttcacactgtctctggtactgctctccagggttttcaggaaaggaagtgtggagggcattcacacctcctagcagtgcacctccctgaaggggtgagaaaataccaggagagtcaccaggccagcctgcatagcggtaagtacactctagggaccagcaatccccgggggctaagaccgccgtttacacccctatactgggtatgaaaatcacttgggaggctttttcaactttctatagttcactcccccagttcttggtggcaatcattgctctaggaagctatactgtcactggtgggctatgaacatctctcaggtgtgttgaggaaaaaaacgatcgaagcgcactactttacatcaataggcaaaagcaatgccacccatgcagcaaatatctccaggacactgtttcctcttcatttaatcggttacctttggatatatttccaggaattactaagtctagaatatgagcattttaataacttttgatatgttaataaagtgtccttttttaaaaaaaagaaagtttgtaattaggataaaaattaggtacacaaaatatccttacctgcattgaggactccatgactgacaccaccgtaatagcgtcttccagagttacagtatcacgaaacatcaggcgagcatgagctaagaaaacaaaacacatttgttttttaggaatatttgaggtgagaaatgtaattctctaacttcctcctcctcaccatttgtattttatgaatgagctattaataacaacataattttactagaacaagcacaaaagtcaacattcaactagctttaaggatgtttctataatgagcctaatccttctgtgtagcccacacaatcttgtatatttatatgaaaaagtactctgggctctagcaaaaaaacgggctatataaacatacatttaatattcagcaactttagtcctcattttctagtcttttataaaactacacaaaattaaaactcatttttcatttctggcactcctctttatgatctatgagcttttcaaagctaccaaacaagcaattctaaattctgagtatttcttgccctaatattagctataaatccttgaaaaaagaaagtccatttgttttacagtattttttattaagcttgtattattttattttattattcagttcatgtgaattctttttttagatttaaacaaaagctaaaatgtaaaagccaatgttagaagaaaagaattaagatacatgttagctatatgtatatatgtaatggggcagggcatggcattgtcaagttggttgctataatgacaggggtggactgcaactggcaattaatgagcaagaactagtgatgctatatgggaaacaattccaaacaagaaactgtcctactcaaaatgctaacagagctaccactgagaaacaaaatatcagaagtaaggctttctaagtgaatggtatattaagttctaggaggtcccgagatggcacaaagattcctctttcttaatgacaccacattccagtcaatactcataatctgtcctcagaggagcagagatcttctggctcagagcctttatttttaagtgactatgagcaccttagagtgggagttattctcattcaactttgaatccatggtgccaagccccatgccttgcacacacgcagcattcaatacaagcatcattcgctgaatgaaatagaccttctgctaatcgtatcaagctttccaacagccgaatggtggtccgggcagcgttccggcaatcactctgcctttgcatctggtagtaccggagaagaacctgattgcccacatcagacagtgtgggctgcagattccttatgaggcagaaataggttttcatcttttccatgctccagagcttctctgatttgcttgggtaacctgtatgtatcaggtgttgggtcagtaagttcttaggacaggcaaacatctcattttaaggatttttataaagttctggtactcatttgttaaaagataaccttcatgttttgtggttattgaaatctagacttgtctgcatagcatacaatcagcatcttatgatctaagcttaa

SEQ ID NO: 36929 - DNA, 2300 bp, Homo sapien
caccttagcctcccacaatgctgggattacaggcgtgagccactgcgcccagccactctatgtgataattcttagtcttatcctcacttggctagtttagtacctttcacatcactttcttaaaacagtttcttcacttggcttttgggtcacctacctcatttgccacttgttttgtaacttaatttgtcctcttatctttggagggctcaaatctcactccctagagcaagcccatgtatttttatggctttacatatcattgacaggttccaaatttttatcctgcctattcagtatctctgcttagaagcagacatctcaaatatgtctaaaatgaactcctgattgctcccctaccccacatcacctccctgcaaaagtggctcctgctgctttcatcttcaggattttatccagaatataactgttgcacagccccatggccacacgaggtccatgccaccataatttcttgcctcaattattgaaatattgtttcttcccttgtcctcttacactctatattgaacacagcaatcaaagcattccttttaaaatgaaagttggctcctgttactgctctgctcaaaacccttcgatggcttcccatgccacgcagtgtgaaagccagagtccttatgatggccttcaaaaccgcatgatctggctgttcccctcatcctcaatcatagggtttggtgctttcctccttcctttcattctgctccagccctagcctccttgctttttcttgccaagtgtgccctacccctgggcctttgtatttgctgttccctctggcgagatacttatattgcctacttcctctctatctccatcaacagatgatctcaggagatgtcagatgcagcaccctgcatctggaagtgtgctggaagctggaaatagaaatggtttagttctaggacagagccatgacataataggtcctcagaaaatgattgctgacttaataagagaaaataaaaaaggagctttcagttgattgtagtttacaatacaatataaataagcagtacgttactatttctattatcaatttagggaacaaaaatatctacagttacacaaaaatggccacacatggtggcactaactagattgtcatgagtgacccagaaactcaccctttgggagtgcttgtgtaacagtgtgttgaatgcaagaggcaggccacacagtgcaaaatacccaaagaagatgaagaggtctctcagagatggtttgtattacaaagttatcttcttcctcagctaaacaggagactcctccaaagagttctactcatctctgggttcacttcacagaacacattgtaaaacatgctcagtaaaatccgctatattgaattacatataacgccttgaattgcacctgaatgtcttttcctcctgcctatctccactgtgtatactctattgtatcacgtggtgtaaagatcttggtttcctctgcccaatttaaagaatgtatgacacaggggggtgccgtaagggaaaaaccctaccattgttcgttgacagttgatgagctgaagccacttacttctgagccatgagggaggttttactaataatttttctactttggagctctgtgattatttggatctctgcagcgtagtatagggctgcccttccaaagtgtgttgagaagggccttaaaagatgatatacaaaaaaagggggattccatagccaaataaatttgggaagtgctggattaatgttactggtgttctttactgaaggatatctcagaaaacttactgtgccagcatgctttatgaatcctcaagacaaggtttacagcatttcccaagtgtttggctatgttatcttgtttgtgaggcactgtccaggaactagtgtttcacaaaagagtattttgagaaactctgatcaaagtgtgaactctggtaggaactttataaggagcatttcactgcctttctggattgctatgagaagccaattttaaagccagtaagtggctaagtggacattaaaagggtctttgatgtcatctggtaatgtaattactgaatatgaaataatgctttggttttttaaccctagacttggaatggaaaattatctatgtgggctctgcagaaagtgaagaatacgatcaagttttagactctgttttagtgggtcctgttcccgcaggaaggcatatgtttgtatttcaggtaagattaatcttggtaaatgtgtatgccaaatatgtttcgaagtagactatattatctattatcttataacccttatccc

SEQ ID NO: 36930 - DNA, 2300 bp, Homo sapien
cagatggcaaaggggaagcaagcacgtcttaccatagcagagcgggagagagagggagaatgagtgagggggaactgccagagagagagaatgagtgagggggaagtgccagacactttcaaaaaacctgatctcatgagaactcactatcatgagaagagcaagggggaagttcgccccatgattcaatcacctcccaccagactcctggggattacaatttaaggtgagatttgggtggggacacacagccaaaccatatcacccagctacttagggggctgaggtaggaggattgcttgaacctggcagacagaggttgcagtgggccatgatcacaccactgcactccagcctgagcaacagagcaagaacctgtaacaacaacaacaaaacccccaatcatatttttacacactatctgacatagtttgagtatttctcccttccaaatctcatcttaaaatctgatcccaagtgtggggcctagttgggggtgtctgggtcacaggggcagatccttcaggaaaacttagtgctgccattgcataatgagttctcattctgttagttgcctccagagctgattgttaaaaagagcctgaccactacctcccctttctcttgcttctcttctggccatgtgatctgcacaggcagcctccccttcactgagtggaagcagcctgaagccctcaccagaagcagcctgcagaagtgtgagccaaataaacctcttttatttgtaaattattcagtctcaggcattcctttttagcaacacagactaagacactatcaaagaacaactgaaaatttaaaatgtcatttacataatatcaagaagtatatttttcccccatccttagatttatggataaatctgacatagggtgatatggtttggctgtgtccctgcccaaacctcatcttgaactgtagttaccataatccccaggtgttgtgggagggacccggtgggaggtaactgaatcatgggggtggttattcccatgctgttctctgatagtgagtgaggtatcacaagatctgatggttttctaaggggcttttccctccttgctcctcacttctccttcctgcagccctgtgaagaaggaggtttgctcccgcttctgccatgattttaagtttcctgaagtctccccagccatgctgaactgtaagtcaattaaacgtctttcctttataaattactcagtcccaggtatgtctttattagcactgtgaaaatggactatataagactagacctgacaaaagatcaaaacatttgctgagtgaaataacacctaaataaatgaagaggcttactttaagggtcattactaaatattgttaacatgtaaattattcttacatggatctatagacgaaatgtaaccaatcacaatcccaactttttaaagtgacaagctgattttaacattcatatgaaaacccaagggactagatgagccagaacatttttgaaaaataacaaaaaattggaggccaaacacgatctgattttaagactcttacgaatctacaggaatcaagacaatgtggtatttttgtagagagaaatataataaattgtcggaacagaatagaaagtctaagaatagacccacaactgatgctttagggacaactgattttaaacataggtgcaaaagctattcagtgagaaaaagaaagctctctaaacaaatgacactattcacatacaaaaaaatgacctaagatccatactttgcaccacagacaaaaattagctctaattggatcacagacctcaatataaaacctaaaattctaaaacttgtgtcagaaaacacagaagagatcctctgtggccttgggttaggcaaattccttggacagacaaaaaacaaaccctaagatccgatctgagccgccgcacaaccctgctctggccacttagcctgaggtcactgctcgggtcccgcccctctccccgcccgggaccctcctggctccgccccaatccgcccgctccgctccaccccgccccgctgcctcgtctccatccggaagagccgccggggcagggaagttgaggcggtgcgcggcccggcgtcggtcgagagcgcaggcccggcagagccgcaggcgctaggccgcccgacacagcccgcgcgtccccgcggccggtggcgcctcgagcggccacgtgcacgcgcgcactccgcctcaccagccttcttgcgccggagacgaacccgctgcctggctggagctctctgggcccttcggcctcgggagcaacgcgt

SEQ ID NO: 36931 - DNA, 2300 bp, Homo sapien
ttaaaagtagacagttgaaatatttctaatgaatgttaattgaatataggttgtgtttatatggtatcatggaagttctgtcttgccttggtgcgcacccagttcctgactttaaggtattttatcctggctgcctttcccccggctgtcctggcactgagtattgggcttactgattcagtttcatttctttcaggtcttttttcatatttacatcgtacttctgtccagtagtagaaaataataaacactttaagcaaaactctatcaattcttcattttctgttctgctggagaattttaactgacaaaatatagatgctgcatcctggtttaccacaactctgcgtaagctccttaagaccaagtgtttttttggtacctcttttcctttaacctaccccaataatgtctaatgatgtactttgcattgaggaaaagaaatacattttaagcagtctactccgtttaatgttgcctttggcggaaaattaaagaattactagaggcaaaacacttagtgaaaagaacagttggctaagatggctgccttcaattctcaatacttactgcttagtagccaggccaacaatgtagaatggcaatttcaacattggcttgtttttttctcattaatctgggtatacccttcaaaaactgccacaccacatgtcattagcaagtggatgatctagaaagggtcattgtgataacaggaagatagaccatcatctgctcctcttctgccttgtgtcccaagagcagctgctctgctggcaggggccgatggttgccactgttgtccaaacaggtcacctctatccccaggctccacagagccacttgattcatgctaatctacaggaattgtgtatatattgcagcatattgccataacaatgaacacacggaccactagtttgcagttacataataaaaacagtagcctaaattctgcataattatttttatggtgtcaggtacagctatatacttaagttttgagcaagtaacatacttttgaatataagtgaatttgaataacatatctgtctatgtaatgggtgtacaggtaaaggtaattggataatcagtctaccgttagatacctaatatatggaaagtgtaattaagatgattaatgctgactttaaactatttaaataatttgtgatataagccttaataaaatacagtttagacaagaacatgtaaaatataaaatttgttttacatattttattttcagaaaatcttgagtcattttcacagatagcattatcaagtattgggctgtaagaatttaaaattaaaagttttaatacaagcactttacttatttaaaataaccagcagtgtttgtttttgaagtttagtcttcattgaaaagtttttattcttcagggtgagctagaacaagaaaggcaacagcatgaagaaacaattgctgccatgaaagaagaagagaagctcaaagtggacaaaatggcccatgacttagaaattaagtggactgaaaatcttaggtacattttttattctgtaatcttatcaataaagacatgcaagaaagtttttctcttgtatgactcacattatcctattgttaaagacatagtagcagtattttaaattaaaatttcctgtgattagagacagagaaattggatttattttccgtttgaattcagatttactttttgcatttccttgaatataaaataggcagtaaactaacctaaagtcagaagacttatttgttctggtacctattctgctgttaataaattgataaatgagtgatattggggtaagttaccaatttactttacagcccttaagtaaataatctgctttcctcagcatcatagacttttgaagaggattaattaagcgcttaaaaaacctgtagactctattacagtcagtgaaaggaataattctctttacaaagtaaatgcagttgttttattttagacaagagtgttctaaacttcgtgaagagttaaggcttcaacatgaagaggataagaagtcagcaatgtctcaacttttgcagttgaaagatcgagagaaaaatgcagcaagagattcatggcagaagaaagtagaagatctcttaaaccaggtaattaataatgtgtacatgatgaagtttcatctcccttgacattctctggctaggcaaatattgtaaaactctgttaattcactgaattttgttatttttcatgggacaaacttaaaacttctaaaaatacataaaaccaggaagatgtatttataaacttataaaacat

SEQ ID NO: 36932 - DNA, 2300 bp, Homo sapien
tggttgtatgtaaattctgaatccaccacatagtgtgtagctttgtgcaaagcctcaccttccacatctgcacaatgaaggagaggtggggggtaataacactcttcacagcactgttgtaataattaaatgagatgaaccatttatagcacagtgcttagcaaaatagtaaacactcagtaaatactgccttttactaatattatttcagattttcttttttagttcagaattggtgacatttcaaaagcatataaacaaggacactttagtgaatttaccttgtgtgtggggcatacataattctatttatattttatctatgatatattctgtgtgcattgaatatttaccttccattttgaattatgtgacaataaattacttcattttcctcgaatcatttccttatgtttacctttctccggtggctgtgtgatatgacagtgttaatatataacaagaaataattggaatttagagctagtataatatacaacttgatatatttagtttctgtgatgccaaatatattgactataatctcgatggtagcattctgtggtgtgaagctgaactcgatgaccaaactatattaagaggtgttttttccattgtcaacaaataaaaggaaaatgatattttaaggtaatacaaatatatttaaaagtagacagttgaaatatttctaatgaatgttaattgaatataggttgtgtttatatggtatcatggaagttctgtcttgccttggtgcgcacccagttcctgactttaaggtattttatcctggctgcctttcccccggctgtcctggcactgagtattgggcttactgattcagtttcatttctttcaggtcttttttcatatttacatcgtacttctgtccagtagtagaaaataataaacactttaagcaaaactctatcaattcttcattttctgttctgctggagaattttaactgacaaaatatagatgctgcatcctggtttaccacaactctgcgtaagctccttaagaccaagtgtttttttggtacctcttttcctttaacctaccccaataatgtctaatgatgtactttgcattgaggaaaagaaatacattttaagcagtctactccgtttaatgttgcctttggcggaaaattaaagaattactagaggcaaaacacttagtgaaaagaacagttggctaagatggctgccttcaattctcaatacttactgcttagtagccaggccaacaatgtagaatggcaatttcaacattggcttgtttttttctcattaatctgggtatacccttcaaaaactgccacaccacatgtcattagcaagtggatgatctagaaagggtcattgtgataacaggaagatagaccatcatctgctcctcttctgccttgtgtcccaagagcagctgctctgctggcaggggccgatggttgccactgttgtccaaacaggtcacctctatccccaggctccacagagccacttgattcatgctaatctacaggaattgtgtatatattgcagcatattgccataacaatgaacacacggaccactagtttgcagttacataataaaaacagtagcctaaattctgcataattatttttatggtgtcaggtacagctatatacttaagttttgagcaagtaacatacttttgaatataagtgaatttgaataacatatctgtctatgtaatgggtgtacaggtaaaggtaattggataatcagtctaccgttagatacctaatatatggaaagtgtaattaagatgattaatgctgactttaaactatttaaataatttgtgatataagccttaataaaatacagtttagacaagaacatgtaaaatataaaatttgttttacatattttattttcagaaaatcttgagtcattttcacagatagcattatcaagtattgggctgtaagaatttaaaattaaaagttttaatacaagcactttacttatttaaaataaccagcagtgtttgtttttgaagtttagtcttcattgaaaagtttttattcttcagggtgagctagaacaagaaaggcaacagcatgaagaaacaattgctgccatgaaagaagaagagaagctcaaagtggacaaaatggcccatgacttagaaattaagtggactgaaaatcttaggtacattttttattctgtaatcttatcaataaagacatgcaagaaagtttttctcttgtatgactcacattatcctattgttaaagacatagtagcagtattttaaattaa

SEQ ID NO: 36933 - DNA, 2300 bp, Homo sapien
acacacttgtaattccagctactaaggaggctgaggcatgagaattacttgaacctggtggcagaggttgcagtgagccgagattgcgccagtgcacttcagcctgagcaacagagcaaggctgtatcaaaaaaaaaaaaaaaaaaaaaaaaagaaagaacgaaaaatgaagcacacttttcaagaggtgttgtcctttaaaaatatacattttattttattttattttttgagacaaggtcttgttctgtcacctagactggagtgcagtggcatgaacacaactcactgtagcctggacttcctgggctcaagtgatcctcccacttcagcttcctgagtagctgggaccacaggcatgcaccaccttggctggctaattttttaattttttgtaaagacggggtcttgccatgttgcctagggtgacctcaaactcctgggctctagcagttctcccaccttggcctcccaaagtgctgggatttcaggtgtgagccaccatgccagcatttatttagtttttagagatgggatcttgttctgttgctcaggcttgagtgcagtggcctgatcatagctcactgcagcctaaaactcctgggcttaagtaatcctcttgccttagccttcccagtagctgggactctaggtatgccacgggctaacttttttaaagatgaggtctcactgaaaaaatacacattttaaagtgctcaaattagttgaagtttgtaaattacagcagttcatttcttagggcttgttactaaggttcatttttacatactaaagctgacttgcctatttctcaagtggctggtatgctttttcacaaccattactggaggaagtgggtgacttgtgtcagttctgaagttatattttgtctaagtgtttagtgtgcccaggaaggctgtttgagctggttctttgaggatctcatttgattttgattggcttatcagtgaatctcagattttccttcctctaaaatagttgtttttaatagcctttagtgcacattggagtgacctgaagggtttgtgaaactacagatgctgggccccaccctcagagtttctgattcacttttaggtctggggtgggtcacatttctaaccagagttcccaggtgatgctggtgatgctggtcctgggtactttgagaacctctgccttaaactatcctttctatgagacctttttcttcactcacttttcatctctctgtctctcctcatttttctccaccttccctgctttttgctgtcatttaagagattctttcataaccttgctgtctttatctgtgtcttacatcaccttagttgttggttggttggttgtttttatttggagatgaggtctcgctatgttgcaggacatagtgcagtggctgttacaggtgcagtcatagctcactgcaaccttgaactcctgggctcaaacaatcctcccatctcaacctcccaagtagctggaactacaagctccactttaggtctttatctggcctcttgcctgaaacaaattcaatttcaaccaaactgctatctgccatctttgtttcctacatacaaacttcttcctttttatgttagaatttgaaaataaattagaaaagaacgaatcactcattttggcgccacagtgtcagtcagtgcatcctctccgtccttcttttattcccaggagactttcttatgaagcctactgaggagttgcgcctacttcaacctgtttagcttgcaatcttaaaaaaacaaaaacaaaaacaaaaaaaaccagtaaaacggtacgaggtgcaggaagcaacattaatcatgtgaaaatgacgttttaatttaaattattctagtgcgctaagaagtattttcatgtaaatatttccattttatgtagtgaagaaacaaaaggaaaatttgtacatgtagaccatttattttacttaagtataaagtacagttgtgttattaaatgtaaactgtttatctcatagtacaactgatttttaaattgaagggattttctttttgggggataggtcatattggaatgcttcaagcaactcaaatgacccaggaagttacaattaaagatttagaatcagaaaaatcgagagtcaatgagagattatctcaacttgaagaggaaagagcttttttgcgaagcaaaacccaaagtctggatgaagagcagaagcaacagattctagaactggagaaggtaaaaagtaatggacactccattccccccgaaagagttccgtttttctctttttcacatttgaagtattt

SEQ ID NO: 36934 - DNA, 2300 bp, Homo sapien
agaaatgttgagtgccaacacaacactcagaggaactgctcattggaacattttggatttcagatttttggatttgggaagctcaaccagtaagtataatgcaaatattccaaaatcctaaaaagtctgaaacccagaacagtttgggtcccaagcattttggataaaggatactcgacctgtatattatgtttctattcattatttataattaaatataactttaattgtgtcttgttttatcccattgtcgtggggaaaaatattaaattcatgaagtgacagtggatgtcttttgagcatagtatttaagaaaagggtccttttgggctatgctacatagtgatgatggaaactcatgtgatggagttcagagtgaattaccagtggaccagggtcctaacttctcattaccaagtccgagctggaagcagctggtaacaccatctcttttcagtggaagcacttgaggagtgaacaggttgggtgactcaactaatgctacacattcatttccttatttccagtcttattctctttccactttatcatagtgacaaaaacaaaaatatctttgtcctagcaagacttggctatacaaatttagtgaaacagagagtcttttgagcatacatttctgcttagaacgtaaagaacatgagttctaaaatgactgtgaatcttccatgcctagaatttgatgaaatagcactagtttctaattctctttaattttatttgatcattagtgcttaaggagcaacatttgtaggatatttgtttctggccatatgctccattcagaacctcggaactagacaacatttttcctggaaggtctatttaagggggactgagtacctagcatctgggaaaagagccaatttcaagtttcctttcaggaattccaacagatcttaaagtatttcagggtccgattaaaccttcaccttgtttagatgttgtcacatccagacaatctttgttaaattcggctctctagtttgttaatattctcagatttatattttggctacttgcatgctaaaaagaaatcacatggagttggggaatttggttctgcaaaactgcgtggagatacgatttttaaaaaaacaggtacaattctacgtttttaaagtattatccatgccctaaaatgactcacatgcttcaatgcaggatacaaaaacttttttaaaaaatcatttgacttgcaggggtagagatgttaagagaaaatcagtagggaataacacatttatgaaggcgaaaatgcacaagttatgacacattttggcccagctccaaatccttaaagcactgatgtcttgttccatcttctgttttttttaccattactttcactccgatcctattcttacttatttccagccaagtagtttcatatctatttgtcttgggctccaccgcgggaaagtagctatgcggtgctccaccagctgactgaaaaggagcgttccctccacacatacactcagcactgaactgggggcagtggccgggcactcggggtgggagggggcggctaagacagtgtcacggtcacttgtgtgccattggaaggaaggtcagggcagggaatcctcgctacttcactactcatgtctctggattgggcttgcctctcttcttggggaagagccacttcttggggccctgcacacacgaggacgcatgtggaaagggtctgtaaatcgacacccgttctgctaaccgaaggtgattacagcaccgtcttcttggggatactttttttttttacgtcaggcctcacgctcgctgcacggggatcgccgccagggctgggctgctggatccccgccacacgggggaagcactggcggcacgatcccggatcgacctcgcgaggcgcccgcactggccgcggggctgcgggactggcggcggcggcggcggctgcgcggggctgggcggggcttggctgcggggaaatgacgtcgccgtccccgcgcgcgccctggtaacggcggctcccgcgtcctcctccatgtccccgcctatccccgccgcagcccgccccgtctcctcctccctccgcagcctcgccgagtcctcggtgcgggctgcgagcgggacccgcggagctgcgctgtcctcgacgcctccgccaggcgcgggccgaggagcctccaagagctggcccggcccccggccgccgccgcccaaccccgggcatctgccccgcgccgttgtccccgcggcttcgggccggcgggaccgccccgtcccttccaggggtgacccgggggtcgcgg

SEQ ID NO: 36935 - DNA, 2300 bp, Homo sapien
ttgtcatggtgagtgagctgtcacaagatctgatagttttataagtgtttggtagttcctgtctctctttctctctttctcacctgataccatgtaggatgtgtcttgcttctccttcaccttcctccatgttgtaagttttctgaggggcaaagttctcatgaatgggttagcaccattcacttggtggtgttctcatgacagtgagttaccatgagatctggttgtttaaaagcgtgtagcacctccccgctctctttccccctcctgctccagccatgtaaattttgcctgcctccccttcaccttctgccatgattgtaagtttcccgaggcctctccagaagcagaagcttctatgattcctgtacggccttcagaactgtgagccaattcaacctcttttctttatgaagactcaggtttttttttatagcaatgtgagaacagactaatacagggtgtcttaccaaccgagcatcccaaatctgaaaactcaaaatctaaaatgctccaaaaccagaaatgttgagtgccaacacaacactcagaggaactgctcattggaacattttggatttcagatttttggatttgggaagctcaaccagtaagtataatgcaaatattccaaaatcctaaaaagtctgaaacccagaacagtttgggtcccaagcattttggataaaggatactcgacctgtatattatgtttctattcattatttataattaaatataactttaattgtgtcttgttttatcccattgtcgtggggaaaaatattaaattcatgaagtgacagtggatgtcttttgagcatagtatttaagaaaagggtccttttgggctatgctacatagtgatgatggaaactcatgtgatggagttcagagtgaattaccagtggaccagggtcctaacttctcattaccaagtccgagctggaagcagctggtaacaccatctcttttcagtggaagcacttgaggagtgaacaggttgggtgactcaactaatgctacacattcatttccttatttccagtcttattctctttccactttatcatagtgacaaaaacaaaaatatctttgtcctagcaagacttggctatacaaatttagtgaaacagagagtcttttgagcatacatttctgcttagaacgtaaagaacatgagttctaaaatgactgtgaatcttccatgcctagaatttgatgaaatagcactagtttctaattctctttaattttatttgatcattagtgcttaaggagcaacatttgtaggatatttgtttctggccatatgctccattcagaacctcggaactagacaacatttttcctggaaggtctatttaagggggactgagtacctagcatctgggaaaagagccaatttcaagtttcctttcaggaattccaacagatcttaaagtatttcagggtccgattaaaccttcaccttgtttagatgttgtcacatccagacaatctttgttaaattcggctctctagtttgttaatattctcagatttatattttggctacttgcatgctaaaaagaaatcacatggagttggggaatttggttctgcaaaactgcgtggagatacgatttttaaaaaaacaggtacaattctacgtttttaaagtattatccatgccctaaaatgactcacatgcttcaatgcaggatacaaaaacttttttaaaaaatcatttgacttgcaggggtagagatgttaagagaaaatcagtagggaataacacatttatgaaggcgaaaatgcacaagttatgacacattttggcccagctccaaatccttaaagcactgatgtcttgttccatcttctgttttttttaccattactttcactccgatcctattcttacttatttccagccaagtagtttcatatctatttgtcttgggctccaccgcgggaaagtagctatgcggtgctccaccagctgactgaaaaggagcgttccctccacacatacactcagcactgaactgggggcagtggccgggcactcggggtgggagggggcggctaagacagtgtcacggtcacttgtgtgccattggaaggaaggtcagggcagggaatcctcgctacttcactactcatgtctctggattgggcttgcctctcttcttggggaagagccacttcttggggccctgcacacacgaggacgcatgtggaaagggtctgtaaatcgacacccgttctgctaaccgaaggtgattacagcaccgtcttcttggggatactttttt

SEQ ID NO: 36936 - DNA, 2300 bp, Homo sapien
cagaacaagtgttaaaaaaaaaaagcagccaccaaggagccctgctatgaatcatgtgcctttcatgaggtgaacttcccctccccagagatgcgtgaacagcaaatcaggaatccacgtccccacactcggtactgctggtttgtcttgtgttagccatggatctgacatctgccaaaacacctcgcaatgtaatcacgggtgttgtctggttctaccctcaccttgtataaaaccattctttatacactggcctttctatttaataatctctgctcaaggtatttaaatggtccaaaaatctaaacaacagcttgatcgaaatctgcttttggatattcttttcttttctgcacatgtttaagcatcacagtgaaaagtgggttctagtaacaggtaggagaaaccagctgggaatattcctgtgcaaagctactgattagaaaaagtggtggccgggtgcagtggctcacgcctgtaatcccagcactttgggagcctgaggtggatgtatcacaaggtcaagagattgagaccatcctggccaaatggtgaaaccccgtctctactaaaaatacaaaaattagctgggcatggtggtgtgcgcctatattcccagctactctggaggctgaggcaggagaatcgcttgaacctgggaggcagaggttgcagtgagccaagatcatgccactgtacttcagcatggtgacagagcaagactccatctcaaaaataaatacataaataaaaaagataaagtggagatctcactagccacatcaacagcaatagtgtcgaacatttactggctgcttactaggaggcatgccctgggtcacatacatccatgctgtattagtttgctagggctgccataacaaagcaccaccaactgggagcttaaacaacagaaatgtattgtctcacggttctggaggctagaagtccaagatcaatgtgtcagtagtgctggttccttctgagggctgtcggggagaacctgttccatacctctctcctagcatcttatcgtttgttggcaattttgggcatttgttagcttacagatgcctcatcctgatctgtgccttcatcttcacagtgttctccttgtgtgggtacctctgtgtccaaatttcctgtttctataagcacattagttgcactcgactagggctcactctaatgacttcatgttaacttgatcatctgcaaagactctatttctaaataaggtcaccctacaggtactgggtgtttggacttcaacacgttttctgggacacaaaccaacccctaacacatgcattgtctcattcaggctcacaccagcatcatgaggcaggggctatgattactgacattacaaaccaagacggtgagacttagaaagctttgcttacgcttttctattgcatctactacaaagatagtagaactatggtatggatgcagacagtttgatgcaaaaaaccatgctcttaatcaccacatgagatttccaaaagagcatgaggaactttctccacctttcagttgcttggccataggttacacactggagtcatccactctactcagaagaatactagctacccttggttgaacacctattacatacattacattatctcatttagtcccctaaaaaaacttagaagttcagtactctttatcccagttcacagataagcatattgaaagtcaaagaagtagagagcagctggccaagaaagcaagaaagagttgagccaggattcaggttgcccccggccactacccatcaccacttgagcctgaagatgtattttctccactgtgctgtgctgcctttcatgcaaagctcagggcataccaggctatgattcactcacatgaaaaaatcagaggtctgagtaaatctcacagtgctcatttttaaaagggtacacaaaaaaatctcaattccaaagaatttggatcagccaagagaaggcatgggaaaatatcaaatgtttgtatgattacctgggcaaccttttctgtgctatgtaaatgtgtaatgactaatcaaccaggacggccaagggatttgtttctagagataggcaattttcatttgtgcctgtgattggctcagctctgcgtgtgaagagggaaaaggcttccgtttatttagcataatgatggaccaaaacaaaagaagaaatcatttcactcatgcttaggtaagacatttccatctttcttaaatctttgtgtgtctatttttgtgttcatagcaaccggcagactatttagaacagaaatgtgcatgc

SEQ ID NO: 36937 - DNA, 2300 bp, Homo sapien
cctaatgtacacagacaccctttaatatgtacctataatcaaccacccatgttaacttcttgtttaacatattatcaaagccaggctgcaagtataaccctgtcatttaagaaatacggaaaataagaaaaaaatcttaaaataagcttcatgatgaacttaaaaagaatagttactttaaaagatgtagaaacaacatagataaatttaaagtttttaggggaaaaaatccttaaacccacgtactaaatttttaatatttccactacagaagttaaatgcccaaactgatttggtatcaaaattaaagtgtcagaaatagaattaagttataacttttatttatcaccattttaacatatacttaaaagtggaatttattgttttgctggaatacttaataacattaatttgaaataaagcttctaaatatttccggggctataattccattcttacaacataatttttaaaataataaatcattccaaaaaaggatgatcataaagagattagcgtttggggtagttaacccagttcctatttatctatccattcaagaggtaactcagttttaaggatgttgttagaaacattatttcacagtgattcaaacctttcagcctatgcacaacctacaaatgcataatcgtttgaaataaaaattgcctttccatcattaaagaaaaatcatctttgttttctttttcagtccttctgaacttattaccctgcttggatatgctgcactcttctggacatagaatttcatagcaggtatcaaaataaccaagccataaagccagctttatcaaacaataatttcctattaacaagaactttgagtgtattactcattttacacaaaacaagtagacgacaaataatgatggttaaaattaataattaaatgattaaatgaaaactagtaaggatttctgattacttttctactttctcatacagcttaacacctggaaacaactgtactggagccaccttcccgaaaggtgccagctgtttcctttgtcttaagcacaaacagaactaatgtcacatttccagagaagggtaaggatgaaataaggcgactacaaaccagctttcagaaatgcgaagtcagtcaacgttttcctctctgataaccccttatttgtggagcaacaggagaattacaacacattttggaaaataatttctattggaccaactcctcacttcgctggaagtagtcggatccaagacttaatttcaacacagtgttcgacttattgcttgaagctaccgcagcataaaactcgtcttcgaatggaaaatttgaccaacttctatgaggtaaatgaatagtgaaagtacgggtgggcgggagagacatacaagttttttcggttttttgttttttgggggaagaaagggcgcatacgaaaaaagtcctaagcaagcacagaactgtgtctcttaggatgtaaaaggatgttataccagagagctcaaaagctcccagggtcacggctcccctaaccgagggacttggggtttcactgctaccaggcacccggggaaccccggccttggataaaaagagggtaactggagtaaagccgtgcttctgaacgacccagcgcccaggaccccctgccagaccccgcctttcccgggaccccctcgggagcgcccccgaccgccccgcacgggtcggaggaggaggcagagaggtcccgcgcggacccaggcgcctcccgggccagtcgaggatcaaccaccccggggacccctgccgaggccagcgcaggataaactccccgaccccgaactctgcctgccgcttctcggcgctgggcctcagccacgggttcgaccgtcctcctcaccgcggctcccgcctacctcgcgcctcccggccccgcgacctccccgccgccggccgggccccgccgaggctgcgcttcccgtaaactccccgccccgcgcatccccctcctcgcctcggccccgcccccgcgggaccctgggcggcgcgtgattggcccggccgcgccgtcactctccggccgcgtcgcctccctcgctttccaccgccccaagaccggcagtgagattagtgctcgcggggccgcggcggagtgtaccgtgctgctctactcgctgccattcgcccgcaggtcggcgcgctcgcccacctgagccgcgccggggctgcgggaccgtgggacagcgcgctcagcccagcctaggaaagaggcagcagtctcagcgcggagatggggagcgggcgaagttgacgagtctcccgcccacgc

SEQ ID NO: 36938 - DNA, 2300 bp, Homo sapien
cgaatttgtagtcttttatccctcactccttcccattctttcccccaagtccccaaagtccattgtatcattcttatgcctttgcatactcataggctagctcccacatatcagtgagaacatacaatgtttggttttcaattcctgagttacatcacttagaataatagtctccagtctcatccaggtcactgaaaatgctgttaatgcattactttttatatctgtgtagtattccatcacatatataaatatataaaatataaatatatatgatacataaatatcatataaatatatatgatatttatataacatatatgatatttatataacatatatatggtgagatatatatatataactgtgagatagatagatagatagatagatagatagatagatagatagatagatcaattgatctcacagtttctttatccacttgttggttggtgggcatttgggatagttccatgattttgcaattgtgaatagtgctgctataaacatgtgtatgcaagtatcttattcaaataatgacttcttttcctctgggtagatacccagtagtgggattgctggatcaaatggtagctctaattttggttctttaaggagtcgccccactgttttccatagtggctgtactagtttacattcccaccagcagtgtagaaatgttccctcttcacctcatccacatcaacatctactgtttttttattttttgattatagccattcttgcaggagtaaggtggtattgcattgtggttttgttttgcatttccctgatcattagtgatgttgagcattttgtcatgtttgttggccatttgtatatcttcttttgagaattgcctattcatgtccttagcccacttatttacgggattgtttgatttttttcttactgacttgtttgagttcattgtagattctggatatagtcctttgtcagatgtatagattgtgaagatttttctcccactcagtgtgttatctgtttactctgctgactgttccttttgccatgcaaaagctctttagtttaattaggtcccagctatttatctttgtttttattgcatctgcttttgggttcttgctcatgaaatctttgcataagccaatgtctagaagggtttttccaatgttatcttctagaatttttacagtttcaggtcttaggtttaagtcgttaatccatcttgagttgatttttgtaaaaggtaagagatgaggaaccagttttgttctcctatattccagcaccatttgttgccaattatcccagcaccatttgttgaaaatggtgtcttctccccactttatgtttttgtttgctttgtcaaagacctgttggctgtaagtatttgggtttatttctgggttctctattctgttccattggtctacatgactatttttataccaataccacactgttttggttactatggccttatagtatagtttgaaattaggtagtttgatgcctccagatttgatctttttgcttagtcttgctttgcctatctatgcaggctcttttttggttccatattaattttagaattgttttttctaattctgtgaggaatgatggtggtattcttatggggattgcgttcaatttgtagactgcttttggcagtatggtcattttcacaatattgattctacccatccatgagcatgggatgtgtttccattgtttgtgtcatctatgatttctttcagcagtgttttgtagttttccttgtagaggtctttcgactcctttattaggtatattctgaagttttttttgttttttttttctgcagctgttgtaaaagggattgagttctttatttgattctctgcttcatcgctgttggtgtggagaagagctactgatttgtgtgcattaatcttgtattcggagactttgctgaattcttttatcagttctaggatctttctagaggagtccttagggttttcaaggtaaactatcatatcatcagcaaacagggacagtttgacttcctctttaccaatttggatgtcctttatttttttctcatctctgattgctctggctaggacacccagtactatgttgaagaggaacggtgagagtaggcatcctggtcttgttcccgttctcagagggaatgctttcaacttttccccattcggtattatattggctgtgggtttgtcacagatggcttttattacattaaggtatgtccctcatatgctgattttgctgagagttttaatcataagggaatgctggattttgtc

SEQ ID NO: 36939 - DNA, 2300 bp, Homo sapien
ttatggtccaatctggaatatggaagagatgatgttagggtaacccatcccagaactactccagtggatcctattgaccgaagctgtcaaaaggtaagaagttatttgactaataatacacagatttgaaaagtatttcacagaaatgaattcgttcatactttatccatattcagttacaaccagcagactttttaatatatttatttctcctctttttaattttcaaactattatttttattttcaaaataagtttagcaaatgatagaaatcccagtgttttgtgggaataatattttgcaagaattattttcttttactttatgtctattaaagtttttctcccttaatgaagagtaataatgtaccagacatgttacaaaaaaaaaatcattggaacaaagaaaaaccaaccaaccaaccaatgaatataaaaatccaagaaatgttttgccctatagcttgaatctaatagaaaattgtcaggaatatttgaaggaagtacagacagagagaagatgctatcatttagagtgaggtcacaaaatttttaaaatcagtcacccaatgttctatcataattcaatggctttttacatttaacatattctccaaagttcactaaaataaagtgacgattcctaactttgattgtatggtagcttagacaatttttattcaaaagatgtcataagattgcttaaaaagcaaaacactccaatgtttcagaagtttctctttctggactagttcactcccatagaaaacacaaattctggaaaaaataagttaaaaatcaagtagctaaaagcattgaaatgaccaaaaataggcagaaaatagagggaagttaatatatggatgaatagagtggtatttcttgagattctggatttaacagatttttgcttaaggtagaaaatttgtgctccactgatagaaatctaaaatgcttgaagcaccagaatagaaagcttaggactacacagcaggtggaaaattaaaggaggtccctggaaaatagacccacagaggggacactccaaactctgtgtatatactttgcccagaaatgtgactaatcactcaagtatgcctgtgaactgtaaagaaatatcagatgctacctatcataggtgttagagagttcagtttgaatctggccaatgtaactgctaaatttattttttaatgtactctttgtcagggagtataatagaatccaggatctctatggcgtatctcacaatgtatgggatacaatccaaaatcagtagacatatgaaggaaaatggaaatgtgattcattcttgagaagaaggcaactaatacagattgattgtgaaatgaagaatttaggattttaaagcagttattataaatagaatataaagggaaatatccttataatgaataaaaaaattagaaatcagagtagagaaataaaactatgtaaaagaaccagatagccattctagaattaaaaaaaacttacatgaaataaaaatttctacatggccttcacagatttaaacataatagaagaagtagtgaacttgaatcagatcaatagaaattatacagtctgaagagcagagaatgaaataaaagaaaaacttcagtgatttgtgagaccatgtcaaaatgtttaacatgtatgtaattggaatatcagaaatacatttgactaaataatagtggaaaatcttcaaatttattgacaagtagaaatttatagatgaaaaacttagtaaatttcaaagagaatttatgtagagaatgaaaatataaaggaaactacactaaggctcatcatagacaaactgctaaaaaccaaagataaagagaaaattttgaaagaagcttaagaaaatcacatattacatataagagattagcagaaaaatttttcatatctcattacaatagtggaaaccaggaggcagtagagcatcttaaatgtgctaaatggaaaaggaaacagaagcagtcaatttagaattctacatatagttaaaatatactccaataatgaaagtgaaagaaattttaaaataaacaaaggctaagaaaatatttgtcagcagacctgcctttcaaataatgatgaagaaaattcttcatgttgaaagacagtgctaccagatggatagctggattttcaggatggaaacagggaattgcaaataggtaagtgagtatagaagcctattatttttccttttaacttattttaaatacatatgattggttttttaaaacaaaattatgatacatagtggggtttattttgtactt

SEQ ID NO: 36940 - DNA, 2300 bp, Homo sapien
ttctgttttctttgggaggactcacatagacttcttttattgattcattttctttaatgggtaatgtctcattctgattttctatttctgcttgaatgacttatgattacattttctaaaaaataacaatacttttttacttgtatatttatttattatataaatttttaaaaaatatttgtgtgtgatttaaaagtaattgttttcctgctgtaattatttcccctttttggattcttagtattttttgtccttttctccccttcttgaccaatttattgcattagtttatgcagactaggttttggtcttgttaatgcttgcttttctccctctcttactccctcgtttgcctttatagtagaggaaagtaagtggaaggggtttgagaatggatgttgagagaagcaatctatattaactgtagcaatgaatacattttgatatgtgatacttccattattaagctgttctaaatatttttgtaatttctattttcattttactccttaattcattaaatattggaagtgcgtctgtgttttttttttggtcttcaaacatagttgtttttactattttattttgttgacttttatatatattctttttagagaacatggatttcatgttatgtatgtttttaggttggttgaacttactttgtgacccattacagggtcagttgaaaaaaaaatctgtctgcttgaaaagacaatatattcttcattggatgctgatattgtttgtgtgtgtttgtgtgtgtgtgtgttttgttactaaaacttttaatatctctactaatattttgatatataatctctcactatagggtagatttgtcatgatccaaagtcatgatgccttgtcttttatttaggaaaggaatctcttctcatcagattttttgtgaacatcctattggacttttcatatggccacctctggccagatggtggttggtgaaaaagtggctgtagatggggattgggtcagccagtcaatattatcagttacacatagttttccttcccccaacccttttactttctactgttctgagtagcaaattttgtatttttacccagcctccaaatttctctatattttttattaggtgagtttagttttttttacatttttgagatattcatatgtttggggttattttcttattttgtgttttgtaattatattttctttgcttctttcctctattgctttgtgttagatggataaaattttcattatacctattttttccttctctgctggttttgaatttataagttgtatttccattttttaaaaagtggttattcctaagacattaatgtatatatttatatatattttcaaagaaagtaaaaagtaattaggtatttgtgtcatgttttcaaatgcaacatgggttttagcacacttggactaagcattgattctccaaacatccataattcccagtcttatagttatctagaattttagttttataaatatatgttgatctttcttatagaagtgttctgagaaaaaatatctttccccaaaagtaaaataaattaacacctatgaaaatcgaaaagagataatatctatcacgtgcttttgaaagcagaagacagatactttataatgaaaagaaagtacagaaataatggggtgttgaggtttggagaattcatgcacagcagaattttaataggaaaatagaaggaaattagtgtgtggatgagagaacctgggtataataaaaatgctgacatatgcagttaacatttttttcattcagtgaagagaaattataggtatagaaaatgtaagaataaaagaattcactaccaaagaaaccatgtttttatttaattttaaacctttattgattaatttgcaaccaatatatactgtgtaactttaattgtaaacagggttaagctcagctaagacatactctttgttttcagtttttagtatcttaaagaaagctctacctttcttttacctatttcagtatggcttgggaagataatttgttagatgatttactacattttgctgccacccccaaaggattactacttcttcaaagaacaggtgctatcaatgaatgtgtgacatttatattcaatcgatatgcaaaaaaattacaggtatgaattaccatctgccaaaggcaaagggaatttttgtggttttaaaagccattaagaacatcattctgttttctgtgtatgaagaagttattaagcctctgttaaaagaccatatagcattgtaatagtcaacttgattttttttta

SEQ ID NO: 36941 - DNA, 2300 bp, Homo sapien
tattacaacaatatacagtccatcctttccccttcaataatgtatcagtcatctaatcaggcatatatgcactttaatgggaaaaaaacttccataaaatgttgtttttatttttgaacaccctgtgtcaccccgtgatccttctttgcttattctgtgtctgagctaaaatgtcttggatgcttcgtaatctggccccaatttcttgatacaatctcttctgtagttattgactaaaatgaatcttctcttagtcttttttttgcattccaatgcctatacaacattatttttactcctactgccccatctgtaattccctacactaatagatatcttatttatcatgaaagaagaaactgtattttatttatttatttttttagacagagtctcgctgtatcacccaggctggaatgcagtggcatgatctggactcactgcaacctctgcctcctgggttcaagcgactctcctgcctcagcctcccaagtagctgggagtacaggtgcctgccaccacatctggctaagtttttgtatttttagtagagatggggtttcactgtgctggccaggctgctcttgaactcctgacgttgtgatccacccaccttggcctcccaaagcactgggattacaggcatgagccaccgcgccctgcagaaactgtattttaaatttcaaggcctccctgcttattctgaatttttcttgctcttgcttatatcacacaattggccatgtgaacctgatagcttttattgttctgttgtttttatattgtttccttaagcatatagtaagctcttttgagagtatgacgatatcttatacttttcttcattctcaggtgaatttctttatctaactcaaagcaagggagatggtgatagaccaataattaatgggtttcaaaagctagtgttttgtaggggaggagaaagtgtagaagttataatttattcttcaagagaaggaaaaggacatataagttcatatgttatctcatttacaaacttacagatttttctaatttcttgatattaaaatgtaatatttagctcctttcccctcattactttcttagtccttcatggttttgctctcttctctatctactaaagacctcagggtgcttcattacattttttttttttgccatgtttttaaaaaaattcttgctcatttctctttcagagttttctgcctgcagttgcccaactttaggtcaattcaattctctatcttttctggtactcaagaaattgagcagagagtatatgacatggcttgagagtaaatatatattttctagcttcagctgctctctctctgttgctttggaatcctcctagatgttctttcttcagcgttccgtaacagctattacaagcccttgtcagtctcgtcgaaccttctgctttgctcctgcccagttctctctcaggaggaggagcccttgcttactctttcactaagaaaaatagaactttgctgatgtgaattctctaagtgtcttgcttctttgtatgcaaatacatatgcgccctaatcaatatttccttttcttagcctgcaaagaagagatgttttgttttagattggtgtcttaattctgttatcttctgtgtatatatatgtgaatgacaaatacatattgggagatgtctatattgtagagattctaatttcacttagacgtgcttgttaatatgatcttttgtaatactggcttttaattggtggaattaaacagtaactaacattttctattaactttcttctgcccttaacttacttttgaagttcctcttcagtggcagataactctggcagtcttatggtatttattttagaatggacactatatgtatactattcttttctgaggctgctttttaagatgattgcttttctttggggatttattgtaaaggatcttaggaaacaataaggaaaacaaataattaaaaaatttttgaccagtaatgtctccattctagcctgtagccttgtttaatgtctagaagggaatgaagacaggtactgtaaaatataatgatactaaataaatattcgtgtttgcttctcttttaaggaaacaagcagaaaactttctactacttaggacaagaattacaatatatttatttcattcactcactgtgccttttaggaagattattgatctataaacaaggcagaaaactatttcctattaagctgaagaataaaaaaggtaagtacaattaggagaaataaatttgttaagatatgctaagatttatatatggtgga

SEQ ID NO: 36942 - DNA, 2300 bp, Homo sapien
ccctcctgtttttgctctctttccttcttgtatctcaggtattctaagtttattttccttcttcctaaggtataatatctagaacagtagttgttaatctgtccagttctattctcccgtagaaggctttttgaaatatttggggacattttgtcatcacagtggcttcagggcacttactggcatctgtagtgtgagacagggacacttaaacaaattaaaatacacccaggacagtcacctacacaaaaggattgttctggttcttccatgactctcagtggtttcaatggtctttctgggtatttcatgcagaaaaaacactcttgataagtatttgagtctaggatctaattccatgtatataaatagatataatatttataaataggatctaattccatgtatataaatagatataatacttataaacatggaattagaaatatacatattataaatatgaatattatataaacataaatggaatatttggcacagttttaacacactgaatttttcaggaatgcaaaagccatgtaaaccaaggaattttgttctgaatcttaccaataatagcaatatttcagaaaatcacatcactaatggctatctcagtcttcgtgtctgagttgtcaatacaaccatctgttaatttgaatatgcagctgtcacattgctggtaactctatgtatgtgcacacacatacttgtacatatacatattgggttttagccctcacccacaaataaagttgcaaatatgcctactctgctaatatttttttcccctaatgcagtagttagacaattagcagacatttcatggagttacatgccgctagagctggcaaagatgtatcatacttttgcttcagaaaataatagcgtaaacatcaaagaggacgttaattctgtctaacatgtgatgtgtacctgatactaggggagtaaaatataaggctggataaaggagaattcattgacattgaaccactcatcagtgggacggttccttatagcctggacataaccatggtctggggaattgatctagactggaaactggatgagggaccatgaatatccactgcagcttcccgcagaacgatctttatatatgataccatcacatggtgtctctctggaatcccattgcgtcctattacttgcagaaaaatctcgaatcccttaacgtgccaaaagattagacccttccagatgtgaccaatttacttctttagcttcctcatctcctctttctaacccgattacctcaagtgccagtatatcctacactctgaggcccctattctttgcatgtccagtttactctctttgcttctttcctcaactcctctattgggttgaaactaattctgggtctccacagcaccgacttggcatatcttttttttctagcatgacatttaattgcactgtattgtaatcgttaatttatttttctctctgttacttagtgagggagttcttcatagctcctagcagggtgcttggtaaggaaagtgtttggtagggcgtaggagctcaataggtgttagccgttagaggaaaacaacactgcaacttttcaataccattcactcttcaactgaggctcgtcaggctactttcagtttcacttttactatctttcttttattgatcactttctcttcgtactctcttccctcccacctacaacgcggcggcgaaggagagtggctcacccgaacattctctgggcgcccccaggacaccagttgcactccctcccaccaaggaagccacatcagcgagctgacgtcacgcgcatcgtggcgttccgtcgtcgggtcctcccatcagatcattcctgatgtctcttttgttgttagtcgggagagcctgaggtctgctggtactgaaggctagcaactaagagtaccagaggcgagacctcgcggacccctgcttccccaaagtaaggtgactcgttttccgaaatgacgcactggcagctgagggcgcaggcacaggcgctcgccgcggtatccctgggaacgacgccgcacgtagccggggctgggtgggggtgcgcgtgcgcgtgcgcagtgcgcggcttttgctcggacctggagtaatgagagtggacgtttgattccaacaggatggcccatttctccagcgaggaccaggcgatgctgcaggcgatgctgaggcggttgttccagagcgtgaaggagaaaatcacgggtgccccttccctggagtgtgccgaagagattcttttacatctggaggaaactgatgaaaatttt

SEQ ID NO: 36943 - DNA, 2300 bp, Homo sapien
tataaggaagttctttagctctatttccaattggtcacataggtaatagattaaaaagaaaagaatactttacaagaatatttaaacatcaacattcatctatagacctaacaaaacataacagaaataaacacaattttttttgctttaaaaatcctattataaaacagtcaatgacaacttttctttcatgtaacttattctgaattagcatcatggtaatgttttttataattgtagttgataaataattttacaaaaataaattgttatgtaaattaaatgaagcatacttttttgaaaagaagacatgtattttcttacgataaaaagaataaatcattttcatgaatatgttctaagtccaatgaaataatttttagttaagacaaaacaatagatttatttaaagaacaatataaatacaagaccaaaacaacatttataggttgctgaacctgaagactcgaaagtcaggttacaatttctacttccagaagattgtttttcccctttcttaatttaaagaaaaatgtactcttggaaataggatagccaacaagtaaaagcaaaattgttccttaaaattgcaacatttgggcccagcgcggcggctcacgcctgtgatcccagcactttgggaggcggaggcctgtaatcccagccacccaggaggctgaggcaggagaatcacttgaagccggaaggcggaggttgcggtgagcagagatggcgccactgcactctagtttgggcaacaagagcgaaactccgtctcagaaaagaaaaaaaaaaacctgcaacatttcaaaagatgttatattagtcatttcagtgaaagtttaattagggaacggtgtctaccagaatatatttggcatccttcttttttctggtatttgcctgagtgagaaaagtgttaggaataggaaggccagatgagtttgctttccctccagagaatactggccaagaaatttcctgtccaacctcaggagcatcactgaagcctgtttatgaggaattgtcctaccacaacactgtgttatggcatttgggaagccctcagaggagctgcctgctctaagattgaggccacatgactcaggccattataaaccctaatgcagagccctgaagagggagagcatttggaaggggatagggaagcacataaagatgatatgctcagctttactgtcgttgggcagaaaactctctagtgggcttgagagggggaactgattttaaggagggctgaatagtttgggaacctacttaatgcaaccatagtctgtatttttaaaatcctcacatttcactacagatttgggttttagtgtcttggcataaatagggccttaatataaattcttagttttctggagacatggtagaggtcagatatcaagatttcataggcaaacaaaacatgctatatatgtaaaaaatgtatatacacacacagccttttgctaaactgaaagaaagtaaaaattcaaagcagtcaaggggttgaaagatggattgggtatggacttttcttcatctatgtcaatttttgaaatctctctcccatctccaccattccctttgttaattgtccttgcttacatttaaaggaagggaattagatcatcaaacaggtcactcacacctacctctaacttcacacaccttggtcaatgtgaaacaagcttgaactggttatatgcttccccaccatttttatttattgtaagctactttaaaaattttagacaatgttgtaataaaaatatacacctttttcccccattatccctggtcttctggtgaagcaagcagtgtaatcaatgattcttatgtgtgaggagcaactccaagtagaggcgttcatgtccctaatgcttttttatttttcctcatcagcaaatttaaactacaactttatcctgatcccactgctgctctttgcctcttctccccccagcccttccacatttaccagcctcctccctacctcctcccagcctttccctttgccctcccctttcttctagcccctcctcccagttgagtcagtggcttgaaacttttaaaagctctgtgctccaagttacaaaaaagcttttacgaggtatcagcacttttctttcattagggggaaggcgtgaggaaagtaccaaacagcagcggagttttaaactttaaatagacaggtctgagtgcctgaacttgccttttcattttacttcatcctccaaggagttcaatcacttggcgtgacttcactacttttaagcaaaagagtaagtttt

SEQ ID NO: 36944 - DNA, 2300 bp, Homo sapien
cgtggaaaacagtgtgatgattcctcgaagacctaaaaacggaactaccattagactcagcaatcccattactggatatttacttaaaggagtataaaccgttctatcataaagacgcatgcatgtgtatgttcattgctgcactattcacaatagcaaagacatggaatcaatctaggtgaccatcaatggtagaccggataaagaaaatgtgctacaccacatgcgaaacatgaatgaagctgaaggccattatctttagcaaactaatgcgggaatagaaaaccaaatatcacatgttctcatttacaagtgagagctaaatgttgagaacacacagacacatagaggagaacaacagacactggggctactggaggatggagagtgggaggagagagaggatcagaagaaataaataatggatacaaggcttaatacatgggtgatgaaatagtctgtaaaacaaaccccccttggcatgagtttacctatgtaacaaacctgcacatgtactcctgaacttgttaaattaaaatcttttcctaatcacattgacccccaaattaatatttgtcaagaacggattctattaaagatacctttatgtttttataattcttttgagaataagtaaatctcctaattatttcaatcagtatgctttgcacagcctcaggatgcggagttttgcacatgaatgccgctaactccaagcctgctgtgaaatactggtcttacagatgttcaccggctggcttgcatcttcagctccctctgctgttcactctctgttactatggcgacctgtaaatgcaggcagaaagagaaatctgctaaagaaacctgaatcccattttcggtggccccaaaatgatataaatatgattaatttcttaagtttcactcccccaacaggagaattgttcattctcagcaaaaccacatcactgaatgtactttagagagttgtattccctaggatcagattttcccccttagttaatatccattttattttaattattgataaaatatgaatttacagttagtgcttctcttggcaagtataatttaaaaaattacctggatgatgtcaaatgcacatgatttctctgagttctttcaatgattcattaagacagtggaggctaggaaaaaactgcatcaactaacgagcaaaataaccagctaacatcgtaatgacaggatcaagttcacacataacaatattaaccttaaatgtaaatgggctcaatgctccaattaaaagacacagactggcaagttggaaaaagggtcaagacccatcagtgtgctgtatttaggaaacccatctcatgtgcagagacacacataggctcaaaataaatggatggaggaagatctaccaagcaaatggaaaataaaaaaaggcagggattgcaatcctagtctctgataaaacagactttaaaccaacaaagatcaaaggagacaaagaaggccattacataatggtaaagggatcaattgaacaagaagagctaactatcctaaatatatatgcacccaatacaggagcacccagattcataaagcaagtccttagagacctacaaagagacttagactcccacacaataataatgggagactttaacaccccactgtcaacattagacagatcaacgagacagaaagttaacaaggatatccaggaattgaactcggctctgcaccaagcggacctaatagacatctacagaactctccaccccaaatcaacagaatatacattcttttcagcaccacactgcacctattccaaaattgaccacatagttggaagtaaagcactcctcagcaaatgtaaaagagcagaaattataacaaactgtctctcagaccacagtgcaatcaaactagaactcaggattaagaaactcactcaaaaccgctcaactacatggaaactgaacaacctgctcctgaattactactgtgtacataacgaaatgaaggcagaaataaagatgttctttgaaaccaatgagaacaaagacgcaacataccagaatctctgggacacattcaaagcaatgtgtagagggaaatttatagcactaaatgcccacaagagaaagcaggaaagatctaaaattgacatcctaacatcacaattaaaagaactagagaagcaagagcaaacacattcaaaagctagcagaaggcaagaaataatgaagctcagagcagacctgaaggaaatagaaaaaaacccttcaaaaaatcaatgaatccaggagatggtttttgga

SEQ ID NO: 36945 - DNA, 2300 bp, Homo sapien
atgccatacattggaaacagaatcagctacacaatttgcaagatccattgcaaaatgaaaatgtacagtcccttgttcaaaaactgagaatttcaagaggatgagaacagagcattaaactaagtatggcaccccactaagcccagccctatgaatgcccagcctttgaatgtccaaagacaagtttctgcttctatctaatcacaccttctttttttagaagaaaataatataatgccatgaaagtaggccacatttcctccttagacactgccattcttacctcctgagctgttgccctccatagacagacatgatcattagcttcctggtttttgctcattctgttgtcttccttttagctattcaaatatatttgtacctcaagacccaacttaaggtccctatctgccatgaaatccttccttaccaccttaacctactaatctgtctttttaaacttatctagtacttattttatacaaaacatttagctctttttgtatatattgagtgctgatcactgtggtcatattgtttcttgagtttgaatataagcatcttgagctttgaaacagtgtcatcattgtacaatggaaagggcacatacttttgagctcaataaagcttgggtgtaaatactctcccatttacttgctgtgactgaagaaattaatcaacttttgagtctcagaatcttctctgggaaaatgggataataaaacctagttcattgggttgttgtgaggattcaataatatatgtaaagcccttggcatatataagggctcatcaaatattacttcctctatcacatgcatgcctccatatatctgattttgcttcagccaacatcccagtgctgagcacaaaggcagcattcactaaatacttgctcattggaagagatatacatatatcttccattaaatgatagatatatatttaatgtactattttacattcacccaagaagtaaaccaatcctatgttgaagttttgtatgttatctctgacttgtttgtaagtttttgccttcacatgctgacttttgtaaaaaaaaaaagtcgaattttgtagacttcatattttcaaagcatttgcacagccattatagtattaaagacactcttagtgggtaaaaagatagatcttattcccagtcaagaaatggaaaaaactggcactggtggctaaggaattgttctaaatgacagaaccagtgtattttaatatacagaaaaatgtccaagaggctttatctaaactgagatctactgactccttttccattgttttttccactataccaatctcttaggcaaaaaagactatatctgtaaagtatacgcaggaaaaactattttaattaactaaaatagtacaaatgagtctatttctttttattctgggtacagagtaggcacttgatgactggattaaaaacagcacatgatatatcaattgcagttcctggtttacagttttaagtaatcgagagtgagttatttaaactgctctttttgataaacatattttaaagagggctttttctcccaatgaaaatgtaagaacaagtttcattatttttaagacaatttcaatttggggcctagcacatcatgcttgagagctggttttttccttatgcaaatggatcctttctctaaactggtgcaaaccacactttgcctgccaaacttatgactcaaaggccctgaagggtttctgtagcctcccagccacagcccagaaaccataagctgtttccacgtgaaacatccaaacacggtctcccaagcctaagtctgctaccatcaaggcttctgtataaaaggcaaatgaggaggcagcgcccccttctgctcccacccccttctgctcccacccccttcatgtcagcagcagccaatcgcttttctctgtcgtgcagtcggctcctgggattggccagggacgggacaggcgcggaaccactgcgcgcacaggcggagcgcggagacttgtccgtcacgtgcggccgcccggcctctcggccttgccgcgcgcctggcggggttgggggggcggggaccaagatctgctgcgcctgcgttgtgggcgttctcggggagctgctgccgtagctgccgccgccgctaccaccgcgttcgggtgtagaatttggaatccctgcgccgcgttaacaatgaagcagagttcgaacgtgccggctttcctcagcaagctgtggacgcttgtggaggaaacccacactaacgagttcatcacctggagccaggtacggtcaggccacggcg

SEQ ID NO: 36946 - DNA, 2300 bp, Homo sapien
cggggtctcactctcacccaggctggagtgcagtggcgcaatctcggctcgctgcaacctccgcctcctgggttcaaccaattctgccacagccccccgagtagctgggattacaggcgcctgccaccaagcccagctaattttttgtatttttagtagagacagggtttcaccatgttggccaggctggtcttgaactcctgacctcaagtgatctgcttgcttcagcctcctaaagtgctaggattacaagcatgagccactgcgcctggtctagtttatggaaaatttttatcatgaatgggttttggattttgtcatatttttctggatctattgatgtgatcatatgatttttcttgagtttctttatgtgatagattctattagttcattttcaatatctgaaccagccttgcgtatctgggatgaatccctcttgatcctggtgtataattcttatacattgttgaattggatttgctaatactttattgaggatttttacatctatgttaattaaagacactggtttgtagttttctcgtgatatttttgtctggttttggttttaggcctcatagaatgagttgggaagaattccctctgcttctaccttctgaaagagtttctacagaattggtatcgtttttagaattcaccagtgaacccacctcagtctagcattttctgtttgggaaggcaatagattcaatttttaaaatagatacaggtgttatttggagtatctatttcttctggtgtgagttttggcaggttgtgtttcaaggacttcttcgtcatgtaggttatcaaatttgtaggcatacaattgtgatactcctttattacctttgttacgtccatgggatttacagtgatatcccctctttcatctctgatattaatttttgtctctctcagtctggcttgacagaggtttactgattttatcaatttttcaaaaaccagcttttggttttatcaattttctctgttgacttcctgattttctgcttgatggatctcttcattctgatagaggagtgttgaagtctccaactataatagtgaattcaactttttctgtgttaacctattctctaatttgctataaagaaatacctgcgactggataatttataaggtaaaaaggtttaattggttcacaattctgcaagttgtacaagaagcatggtgcaaggcatctgctcagcttctggtgaggcctcaggtaacttgcaatgatggcagaagccaacaggggacctggcatctcacatagcaagagcagaagagaatgagggggaagatgctacacttaagcatctagatattgtgagaactcactatcacaaggacagcaccaagtggatggcactaaaacattgatgagaaatctgccccaatgatccagttatctcccaccatgtcctacctccaacaaacagtggggattataattcaacatgagttttagaggagaccacatgcaaactgtatcattctgccccagcatctcaaatctcatattctcacattgcaaaatacaatcgtcctctgccaatattctcccaaaaatcttaactaattccagcatcattcaaaagtacaaaggccttctgagacaaggcaggtctcttccacctataagcctttaaaatccaaacaaggtatttactcccaagatacaatgggggtgcagatattggataaatattaccattccaaacaagagaaattagccaaaagaggctgcaggccccatccaagtctgaaatacagcagtgcagtctttttttaaatatcccaaataaccttctttgactccatgtcttaccttgtgcctcacaagagcacattggtataaggagtgggctcccaaagccttgggaagctctgcctctgtgactttgcagggtaaagggttggagtttagtgcttgcagcttttccaggcacagagtgcaagctattggaggatcaaccattttggggtctggaagacagtggcccccttcccccagctctctgaggagcaccccagtggggactctgttgggcctccaaccccacatttcccccccatactggcttagtagaggttctctgtgagggctccatctctgcagcaggcttctgcctggttactcaggctttctcatacatcctctgaaatctaggtggaggttgccaaacctccttcacccttgcactctccacacctgcaggcttaacaacacgtgttagccaccaaggcttatggcttgtgccctgcacaagtggcaccccatgccttac

SEQ ID NO: 36947 - DNA, 2300 bp, Homo sapien
caagtgctgggattacaggcgtgagccactgcagcaggctctgagtgttacttttgaaaagctgaataaattttaatttcatcaaaacctctaagtaaatgagcacattaactgttaagaatgtggaagagatggtccccttcaatgactattggcctgcagtaaaatcaaacaattaatgaatagagacagaggcacaaggaagaaaagggaaaaagattactgaaactgcaaacaataaaataaattccaaactgagcacggtagcacctgcctgtagtaccagctacctgggaggctgaggttacacttaagcccagcagttccaggctgcagttcactacgaccatcccctgcacttcagcccggccaatacacttagacccccatctctaaaaaactgcctcactgcttctacctttttaatgtacttcgctattaacacagaaactaaaaggcagggtcaattttatcacggacattcttctaatcaataaaggtggcgatctattttgtaaaagggaaaacatgtatctcatcttttaaatctctattatatacaaaaaactacagcacgcccacttcataactggacaagatacgacattacaaattgaattgcataacatcttccaataaaaaaccgatgaaaacaatcttatatgataatcaattatcagttttcaaaactgtttatcacactaaatatgcctcttttgtataaaagtcaataattaaactctctaatatcttgagataaaatattccaggcttccgtgcaagaagaaataccatataatcaaaagaacagactggctggagtaacaatccccacattattatttgattaaaattcaacatttttagttcaagacatatcaaaacctttaagagtatatataacggaatcatttgggaagtcagaaaagcaattgttagaaacagaattaacaaattccagactaaagaaaagtgatttgagtccaaatacctcgcctaaaattacaaatatctttattaactgcactgccaatgttttgcctactattttggagggggcagagattatcttaaataaactgaaatttgtgccacacggaccaaagtcttgccactatactgaaaatagttttactctaacaactctttaatgaaaatgcaatgtacagctaattaagcatgaaatttcagatgacacacgcatgttttgtgcctaaagacaaaattgtcattaggcacaaggcatgcgtgtgtcatctgaaatttcaattttaagttgaaatctgaaattgacacttcaaacagttacggcagagctatgactatttgtttcaaaaacaatattactacattagcattactgccaggcggttccaaatgacgacaggcactttttaatcataatctgcgccactgaacaaagagggcgacatgaatccaggaacgacagtgcggcagtctgaggtcgccaggaaagagatgacaacagagtgggtaccccaccgaaggaaaggggcaaagacctttgtagagatggcctgcgcagatacaaacaaaaccacgaaaagggacctcaaagaatgggagacagcgttcacgaagcaggggtgggggaggggccctattctagttctcttcctcaatttgagtcatcttcccatcgccactaaaccttacggccagtgatcagttcttcgcaagacccaaagctctgaagctgagtctgagtgacgagaggagacgggaagaaaacggggacagagagggcactccctgttgggtggggcaccacattcccgccgggctcacccagccccggctcggatcgccttctctttggtctctcacactagcaccccagaggccgcaaaaagcaccttacccagctcgccatggagcacagccccaggacgctccccatctccacaacgtcacaagagcagcggatacagacaagatggagacagcttctttctcgcctttccgagattatttactatctgcgagacacttccggacgcacagcgcaacccgcccctcagcctcgcgtcacttccttccaggcctgggtaggataaaacacggagcgcgcagcgctgagactgcgcatgcgcgtcactagacgacacggctgtcttctttcctggagaatttctcaaggactgctggctggaaacttaacggctaatgtggatctgaccgtagtttgccaaattaagaaaacggtgtgagcaaaacccacctttacctaccatgcacttgcatttgggcattagtagagaacagagctgaggtggtgg

SEQ ID NO: 36948 - DNA, 2300 bp, Homo sapien
tttgtatttttagtagagacaggttttcgccatgttggccaggctggtctggaactcctgacctcaggtgatctgcccgcctcagccacctaaagtgctaagataatgggtgtgagccaccatgctcagctagatagaatgttttttactaacgtacttacttagactaatttgaattttggcattgtaagttatacgtgtgctacaggaagtcacctggagaaatgggtgctcctactaatagctggtatatattgagaaaactatgctttgagctgtgtttgggttgaaatttgaaaaagtcatcatttcaattttctttcatagttggcaaagagaaaaatgagactggtgtcgaagactcttctaacgaataaaatagtctatatatactgtcgtgtccaattaatgttgtatatataataacttaagtgagcaaattccactccacatagcctacaggttaaataaaagtaaattttttttaatgtatttcaaggccaagtgttacattccagaaagattaatatgacttttgtatttaactctgaatatctcaggtgaaaaaactctattgaatagtgcaagaacttatgaatatctcagaaaccctcttaaatggagcaagagacaagaatctgtgcaaatttaaattttaagagacccattctccatttggctaataaacatattctttacgaccttaaagttactcacatataagtgttttttgtctccttctctggtactttgaaaagtttaaggacttgagatactaggattctcttctcccataaataacgtattaagtttagcataattaaaaatattgttaggtttgtaatttccatttccactattctttttttttgagacggagtctcgctctgcagcccaggctggagtgcagtggcccaatctcggctcactgcaacctctgcctcccgggttcaagcagttctcctgcctcgcctcccgagtagctgggattacatgcgcgtgccaccatgcccggctaattttttgtatttttagtagagatggggtttcaccatgctggccaggctggtcttgaactcctggccttgtgacccgcctgcctcagcctcccaaagttctgggattacaagcatttccacaattctttaaaccttatggatgctctattataatactttgctttaagagtggtctacaaaaccacagataaggcaaagaagaataaagcaagattgtcccttagtggttacaataactaggagtagggattctgacattcttccagattcttaggtgtttaccccacctcgacccatgcaatttttgtagattttacaacactttcttattattagttatgggaatgactatttcaagtttgagctgtttcccagaatattttcaagaacaaataactctaaaaaaataactggaacttttataggaatgcattccctgcagatgtgcatcatcacctaatatgcaagggttccacatgcctcaacagctcatgacattcgaaatcaatgtttgagtttgataatgtcttatctaactaattaaaaataattttaacgtgcaaatttcttgtaacatcttaatagcataagaaattaaaatataagtcaatagcaaacagaaatgatacagagaaactgaagcacacagatgaatataaatatcccaataaaacttgttccgggcagcgggctgcaggaatacgttgcaaacgcaagagcaaaacaggatgcaaacgtgggaaaaatgggaaataagtggagttaggacggacaaagactgagaaagaggaagcaatcccctaaaaagcagagaggttcctcagatgaaggagggcaaaacgtcaaccaccacctcagctctgttctctactaatgcccaaatgcaagtgcatggtaggtaaaggtgggttttgctcacaccgttttcttaatttggcaaactacggtcagatccacattagccgttaagtttccagccagcagtccttgagaaattctccaggaaagaagacagccgtgtcgtctagtgacgcgcatgcgcagtctcagcgctgcgcgctccgtgttttatcctacccaggcctggaaggaagtgacgcgaggctgaggggcgggttgcgctgtgcgtccggaagtgtctcgcagatagtaaataatctcggaaaggcgagaaagaagctgtctccatcttgtctgtatccgctgctcttgtgacgttgtggagatggggagcgtcctggggctgtgctccatggcgagctgggtaaggtgctttttgcg

SEQ ID NO: 36949 - DNA, 2300 bp, Homo sapien
gatcccatttcctgactacaacttatctctctcatttgatgtggatttgtagttcttggactcttccttcttctcccctctttgtcctcacttattttcctatttattcttgttaaccttaaaaccttgtcttaaaaatagtatccaagcttgctccttgtcttttcatcacatcacttggcacaatcccaaagttggattaaactttctgcatttaaaggcatatatttgacacaaattcacaattcacatgattgtgtggaattactgctaccaccaattcttggactcaaaaactcctccttgcacttatggtcaggtcgtgtctaacatttgcaaaagcagctactgcaaacctttccgcatcttctccttactttcctagtagaaatgagaggccatcaaaaatcttaaatctaaatagacaaaagcattctataaatagtgttcttataagtcattatttggtcttaagtgtggaaacaaagttaatacttattcatttcaaaacggcctgtagagtacctactttgtgaaggtactattctaggtgttgaggatatggccttcatgggccatacattccagtggttctgatgatttcatatgtaggttaaaagcttagcagtgaggtctagtggttttctcacattgatcccaaaatacagattttacaaagcaaaattttcaagtataggaaatacacttgcaggatcataaaaatccaatcatgataccataattcataagttcaaacattttagtatcactctctgtcatagtacctctaaaataaataaaccttagaataatttgccctagataataaaaatatatgttattatataatataataataacaggccttagcagtatgccagataataagttttaaagttacactaatgatataaataactctcagtctctttgattaatgcttgtgtaaccacacaagtaactatatttttattaggcgggtgcagaagctactgcagtttttgccagtacttttttgcaattacttttgcactaacctaatacaaaacaaaatgtgcctacatcacaattcagaaaaatcacagctttattagcagagtataatttaaggaagtcaatcaatcctgaaggcagaaagacctaagttcaaaactgatttggaatcttctcagctatttagccttgttcaaagtatctaaccttgctgaacctcagtttactatctgaaaatagagaaaattattactatattgtggaggtatgaatattgaataatttaaagaacttgattgtactaccattagcacacactgaataaaatattagtctgattatattttcgtatttccatatttaggcttttgcctaaaaagggaatttggaagtggtcattggcaggtgtcataggctttgggtggcaagtcagagcatagtatgaatgagcaaattagtaaagactagagataagagaagactttgagtactaattaagagtttcaggagaccagaggagattttaagacttcagtgagaaaccactttctcaggaagcagataaattaattttatcagcagtatcgtcgtccatgtaatatggcttttaaaaagcacagtgagaccttagtagtaacgactttatttttcttagtgagaacctgaaagtgaaacttgatatacattattttctgcttttattgcacaaaaagttgtttccattgcatattgcttcctaatctgttaaaataatctgttaacaaactcgaagacccagattcggggcgtagataagcctgtgtaccttcctaccttctccaaacagccaacattagatcaaagggcaaccttaatgacacctggagcacaaaccctgctcagggcgcgtacaaccggagggacagaaaacacgatgcgacgtcggaaagcaggaagggaattgaaattcccgcagtcacgtcacagaaatcttagcagaacctcatcatcgcccaagggaactgggagtggcgggcggggaggacgcgggttgtgtgacgatcaccgataattagttggtggttaacgcacaagtaggataaaagagctcgccccaggctgccagcagaaaaaagctaccgtggcacgtgccccggggagtgatgcggtggcccggtttgcacggagagcgggacaccgcctggggagccgcgctcgtagcctgggggcgggacgcggcggccgctccctccgcccccgagtagctgccaccgcctggctgcgccccagcccagtagctcagacgcggccgcatcccggtggactgt

SEQ ID NO: 36950 - DNA, 2300 bp, Homo sapien
ttaggtatcccacccagttcagtggcagcaattcccactgtaatgtctgacctgtaagaaggatgaccacagagctctttaagggtgctggggcccccctcacaaatttatttctcaccatcatgatgaaatgtgtgtcctaaggactctcctggggtatgtgagcaggtcttacatgataaatttattctactatttcgatctccctctctagcctttggataacttcctcttcagtgtagcaaggcagttaattctggcatttgatttcatttaatgtagaccgccttgtagtccatgtttcagccaacgaaccaaactgttagagccttttctaaccctttgagctaaaatactgaatccagaatctctgcttagtgggatgatatcaataaattcatcctaattcaactttatgggaattttactatggtggaaggccctacacaagccaaatagacgagtgaaacaagatgtggtgggaatcattacccctgcatccttcaagtccttgatggtggcactaatccctataatccctctaggaatgcacttgataggaaatgatttatgtgattcaagtttatgttccttccacaattatcccacatacttaatattcatttacgtattccccagattgtataaattggaaaactcatgcaattcgtttggtatgtagcacacttccttgtggactacactttgtaccttaatctttagggcctgctggtacttgagtcttgttataagtctagaagcaaagaggggtgtcagggataagttctgaggagaatcaacagggtcttgcaagacacctacctcaggagcagccattactggttctttaggcaacgcagagttaacctcagacaggggtgaaaagatttttctattggcaaataaactcatcagaatttagagatttgatgtcacaagtttgagtgggatttcccatatgtccccattctaattttcaagatcccatttgttctcaatcaatcctcctactttaacaggagaaattcattttgtgttgtaattcagcaacacacagtgtgagagtctggttttgaaatcttagccctgtggttataggagataaggatttgcttttgggcagacacagaagtattcaggttatttatacagagcttgaacaggaaatttcaagccctgagtttatctttttctttccattttccatagtacagttggcagcaacctgccaatttcatcatactctttagtttggctaaaatgctctaaggcatgaaatatatggtcacctaaaaccttgccttttacaaatatttgattatgagtactcagtggtgatatttgtgtttctccattgccacatcatgccatagactaccagtaccctcttcacaactgagaattgtctttaatacctttaaatttaatcacattagagaacatattccaagaataacagaaccaaaccaattcataaagcttatccttaaaaattctattcttatggaaccactcttagggcagaaatctgtatgggtcagtcagggctccaccagaaaaacagaaattgctctgacataactttaggtgcaatttatggagaatgtacatgtatgtatatacatacctatatatatatgttgtgtgcatatatgttggtttgtgtgtgtgtgtgtgtgtgtgtgtgtgtgtgtgtgtgtgtggagagagagagatttattgaaaagaattgatttatgtgattatggaggctggctgggcaagtccaaaatctttagggcaatctgcaagctgggaattccttggaggaaacttaagctgcatgttttcttcatcagggaaagcactcatctgttcttttgatgattgagtcaaacccacccagattattgatgataatctcctttacttaaatcaactgattatagatgttacatatatctacaaaattcctttaccacaccacctagattaatgtttgattgaacaactggggcctatggcctaactaaacagtagtttaactttgctctggatgactcagagtcatcccacatgtaggcagatgtaggtgctgtgtccacaaagattgaagctaattatccgcacaggctctagaacttggtttcttgaagaagttgtaggtaataatctctttttctttaaaacatagaatgaaatattgcggccacaaaatgctccttggtagcatgatttggctcttcccccggttccccatcccccactaagatttaattgaggtggtcttttctcaacagatttttgttcattcttcagaa

SEQ ID NO: 36951 - DNA, 2300 bp, Homo sapien
agccacttcttacaagctgttgagaagagatctaactgaaattaatgtaccatgggagggctcacaagataaccaaacattcaaactagagaagaacactgtgaaaagacagggaaccaattatgtgcatcagttgtatatatatatatgaagagagagagagattatttcatcactcaggtattttatgtatatatatatatatacatacacatatatatgaactttaacaaacttttagatatatatatgtatatacacatatttttccccctgttttctctatataaaaataataaaggcagaatctaaagtagctttagatggctaactatgtgcattatggggatttgaagagataattttgtgataatccatttcgtgttgctttcagagtgaactgaaattgatttgcatgcctgagtgctgacttagcagctgtgcaactttaaatgagtcgcttaacctctctgaccccccagtttccacatccacaaagcaagggtcatacttcagtacctcatgggattattgggaggtttaactaatgtaatataaaaatgttcatgtagtattgaataaaaatgctggttttcctcttggaaaatgcaagaggtcttcccaataggaaaatactttttgttaggattaaatgggatacacaagaaggtggtagaataaagaacatttagtgagatatgaacaatgatgccaacaatcagacatataccttatagttacaaagagttcatttattctttatctcattattgcttcaccagcatcctgtgaatccataggctaattgctatgcccgttatataggggaggaactgtgactcagagaaattaaatggattgaacaatatcaccttccaagtctataatggagcacattctttttgaccaatagtctagtgctctttacagtactctaagatatctatacattctccacagttgccaaataccaagcagttaaaagtctaatggattccaaaattgtatctcaaaacatagctctgttctcaaatttcccatgattcctggaaagacaataatatctatggaattaatagaatgactcttttttgggcaattccaaactattcctggactcctaaggaccatgctaagctcaatttgcatttcttgcattctatgaaccaaaaatattgtttctaatgtcaaatgcaccatgttttgtgactatgccatttagtgtttagcatttcctgaattgaagttactccctccaactaccatgaaaagttggatttgttctgtgtagcccaaggtttacatatttctgccctttttaggtatcacaaatgagcatctccatccttcggtcaatacttagtgcattctgtgttagggtgtctatctctgcaggcatatattttctctcccttttgagagtgcaagttccctaaagatggaaagtataccatacgtctgtactctcaggcctagctgagaggctagcattacatagcttttcaatacaatgcttctgctttcgagatgctattcagagttgacttctcaggagagattcattccaaaacataataaaaaggtcagttttagagtaagcaataactgttaccttcctccctttatagtgaatgatctcttgagaattctttcttagagagagacaattgctagggagataaagggtgcttaggaaagaactagtaattaccatgtcaacctgaaggtaaaaaaacctaaaataggtcctactcttcaaccattaccatgagtctatcgaaaattaggtctcagaccagaacagatcaaaatatttagtgctctctagggaaaaagcttttgagataaagtggaatttcttatttctaagaagtaggaaaagagtgttttgtttggtctctacaaattatagttatttggtttcagcctgaacaatcaccacaagcaaatactggcagaaagagtctctacaggagtggtcaaaaaagtcagttttcatttccttccaagccctagtttggctgatccatccacagaaaagcagaacaaaaggcaagggattactgcacccttaagcatccaagtggctcattcggctcaggggttatttttagcaatctggctcacactgagggcttcctgctctattcagcaaatgtgcaaatggatgctgcaggaccgtaacagtagacattgatgaaggttgtgatcaatgattagactctcaagcctgttgtgtttttgatctagccatgcctttcaaccactgtggtgaacatttacttctgaataggctcatc

SEQ ID NO: 36952 - DNA, 2300 bp, Homo sapien
caaaaaaacccttaaaacctgaattcctggccataaaaggaagggaagtcggacatacttctgactttttggagtttagacacaactgacaggcattcatgttaaaatagagattataaaactgacaaaacagactctttgtgtcaataagacaccaaactataaacaagatctaaggtaatgcaaggcaagaattaggccattcatcttgccacagagcatccttttgttaatataaaacatttatgtccagcctgggcaacatggcaagaccttgactctactaaaagtacaaaaaaatagccaggcataatggtacatgtctgttgtcccaactactcagagggctgatgtgggaggatcacttgagtcgtggaggttgcagtgggctgagatcgcgccactgcactccagcctgggtgagagagcaagaccctttctccaaaaataaataaataaataaataaataaatataatttttttatgtgcactccaagttttagacagagccttattcctttaaccaagtgcaaattaaagaatctctgaattcatctataagctgtaagccctcagcttcaagatatcccagctttttgagctgaaccaatgtatgccttccatgtattgatttacgtttttgactgtacttcttggctccctaaaatgtataaaaccaaactgtaatctgaccaccttgggaccactttcccaaggcttcttgggtttgtgttttccctgggcctcagttgctcatattggttcagagtaaacttctgtaaaacattttacagagtttggtttttctgttagcaaagcaaaagagataggccttgacattaagtttgattttagtggtaaagtattagaaatgattcagaggtttctggcttgtacagttgggtgcatggtggtatcagtcacaaataaagtgaaaattggaagaaaagcagttgtgaaggaagactacagtttttgttaaacaagcgcacttgagacaccgaagaagaatcatgtagccgccacctagcgtaggaggccttctgagccttctctgttggatctggtgtggattgggtagaaatgtgctgggctgcagtttaattgggaggggagagagaagggcagggaatatcaagtcggattctcctgctctgtccccaggagaggcaggtaagctgctttcattgctggtcagcactagtaagtcaggaaggaatctctttgggtgaaggggaatttcagagacttcctttaaatactctacttagaaccctcaaggtatttgccattcttggggaaccctgagccagggcaaactgaaaccaaagcccttctgattcctaccgctcctccagttcctgcccttccccatcactaactcccaacaaatgtacacagattgtatttgtgtagatgtggcctcaggaaatcaaaaggtcctagaatgcaggtaatttaaagtcttactaaataatcttctgtccagtttttccacatgggttctataatctattcaaggagatcggggggaaaagcattcttttatttatttttgtacctcattagtaagtcctaaccatactcttccttaggtcccttttccaactcagtctcgttctcacatttttagaaaggacaacgggatctttaaattctctcggtttgtgttgggaaaggacccaaattagtgtgcttcctcattgacagtcagagtagccttcaagcagtatatccagggaaggcatttacacctcctccccgccctctttttcagtttggcctactctagcctgcatttcgctctccctgtaactatgagagaaaataacacacactattcactctcctttgtctgcaaagtctggcatttcagtggttttctttaaggggggtcctcatttgtgaccagctttgtcattaacggaaatcaatctgaatgccccattgtgcatcttttttctttccttgcagtctgagattgcctttgccaagttttttctcaccgaacctgaaagcccttctctcattttcccgttccctgcctccagccccattgaatccctgccgagctttctcaggcataagggctgtagtgtgaggattgggaggaactcgacctactccgctaacccagtggcctgagccaatcacaaagaggattggagcctcactcgagcgctccttcccttctcctctctctgtgacagcctcttggaaagagggacactggaggggtgtgtttgcaatttaaatcactggatttttgcccaccctctttccaaataagaaggcagga

SEQ ID NO: 36953 - DNA, 2300 bp, Homo sapien
caaaagtacctgagacaggtctcaatcaatttaggaagtttattttgccaaggttaaggatgggccagtgacacagcctcaggaggtcttgacatgtgcccaaggtggtcaggatacagcttgcttttatacattttagggagacatgatacagcaatcaatacatgtaagatttttacattggttcgatctagacgggcaggacaacttgaagctgggcggggggtgggtgtttccagatcacaggaagatttaaacatgtcctgattggcaattggttgattgaaaaagttattatcaatagaaaggatgtctgggttatgataaggggttgttagacccagattttgtcacacagacgaagcctccacgtagcaggctttagagaaaacagatcttaaatgtttcttatcagacttatggtctatgttgatgttaattacgcatgtccaacccccccatcccctttttcatggcctgaaccagtctttcaggttaaattttagagtgccctgactggggaaagagtccatacagatggtcgtccattcagatggttgtggggggccttcaaattttatttttggtttacaaaacagaaaatggaagcaccttgcttcccacttcaaagcccgtttcatgacacacactcccattaaattacatgggatacaaaacaaagctttctatgctgggaaagaaatacactctacaacatcttttttgaggttagtaattatggaaagcattttcttctgcaaaggaattccacgccctataaatttaaattattagcttgtcatctccaagagatcagcatcctcataaacggtgagagaaggaacacagaatacaggatccagcacagtttcgggattctggcttctttgccagacttatctttgcttacttctttgtatagacttacttctttgccagacttatctttgcttacttctttgtatagacttacttctttgccagaagtatattcaaaaaagttccgtggaagcatcaaatcaaccacctctacttatgatttccatgcatctctggaatgcataaagcatgatttcagaacatgttctaattctaagacccttctcttcccggcagtttaaaaaaaacaaaaaacaaaacgtcgtatctttgagcattggttttcaaacatcacaatcactttaacatgacctgaaatgcttgtgaaaacacaaactgctgggctccagcaggtttctgactcaacaggtctagggtggtgcctgggaatttgcatttctaactagagttcccaggtggtgctaatgttcccagttcagagacttcaattcgagatccactgcagtatccataacttttgctgatttccttcaaatcatgatacttcagggctctctgcatcacctctactgaggagccctacccattaaagctggggtaggttggcccaagaatggaaccgggatcgttgagatttcagcaccccagcattttttagtgactgaaataatgaaaattctgatcaggctcctgcttgcttgcacattttaaccactcgctttttgcccaatattctccttgtttccacaatataattataaactgctgaggtactgcttcctcgtcaagaacaaagaggttaacttcagggtcacaaaaatgtttgcagaagggatgaatacctccaagggctttgcaaccagctgcggatgcctggacgtctaattgctcaaaggtgttatctgagactgaagaaacagacttttcccctggattctttgaaaatccccctctcttattctctagcagaataaaaactccctgctttttcctttttacacacggatttgagagatcttgttctccctccttctggcttttactaaattgaatgtctttctctatccccaagcaccagtatgtcagtgtttgacatcaactgcaccactgatacacgagtcggaatttgagcttctacaagtacattccttcctaggccaaacactgacgctaagaaatacgagaacagatcatcgctaaacagcagctgaaggtcaggcgaactgactcgctgcggaatctgcctttgcacgtgatcagtcggacgtctacacccgcagccgtcttctgtctccgcctcaccctcaggcctgacggtccgagtggagctgcgggacagcccgaacctccaggtcagccccgcggccctccatggcgctggtgcgcgcactcgtctgctgcctgctgactgcctggcactgccgctccggcctcgggctgcccgtggcgcccgcaggcgg

SEQ ID NO: 36954 - DNA, 2300 bp, Homo sapien
tgaaaatcaaatgctctgatgtcatctgaataaacaccttgtttaattttagatggcttcgtgtattcattttggtttcagaactgagttcaaatgtataagtagagagagaataacagtataatcactaaagttttgtaaatatgatttaaaaatcttatatatacctaactgacctgctccaacaatcctactgggtgatagagactatttctatcatatgtagatatgttaaaataaatctatttgaagcaattctgttattggtaaataataaataataaaaatgtcatccttcaaccttcaatactggtcataacatatgctgggccaaaaaatacattttattttataaattcccttaaaaatatagtctaatatgtccatctcagagaacaaaattaaacaactgttttttcatcaaggtgaaagatctgaattttaacttcacttacaggctaacaagttagctggctgtagtttcatggatgccgatggaagatgcaaaactcttggcttcgagataaaggattttgtcactcaggcatagcgggcagtatgagcatctgcatatcttgcattgactggtcccctgagctctaattcccacagatagctaagaaaagaggatcaagtgatactggcataaacaatgggtggcattacagcagaatagctctgagtttagggaattcaaataagcttgcctaccttttggtcaggagagagatatcacagctttcaaggctttgtttcagatggaggtactatctctatcttccaatatcttccaagactatttactgtacaaatacccttgagaagacagtctagaaaaaagggcaattagtgccttggtcataagacaggtagaaacacaacggatccagggagaattgtctctccatgttggtgatgactaaaacttcttcatacagttgatacgaaacataaattttcttcaacctctaaaatattagaaaaaatgattttttcaaatgttttaaaatgagaaccaaaaatttaacagttcacattgcattcagcatgcttgagaaagtcataatcacttaaaatcctagaaggaccttatatatagtgcatatatataacacacatatacacacacttaagtggtttattttctgccttccccatttaaaacataaattccttgacaataatgactgtgtgtgtgtgtgtgtgtgtgtgtgtaatttattgtcttattcgggttcctacattaatttgcattaatttaattaataaatgctctagctctaccatacaacccttttccttctttctttttatcaacaccatcgccatgagaagagcaaaaacaagtgtgcctgtattttgagggttctcatagtcatcaacattgaaaatgacaagataagaaatgtcaagataagaaaatgacaaaatttgcttatcttcaagaccacctcctatacacagaatgcagaaaaatgccccacacctcgtggaactcagtaaatattagttgcattgaattaacttcaattcaagaccccattctacagtttataaagtcaaaagttgctcttagtaacacgctcagtaatatgtgctgtgttttgaaaatagaaaatatcccttttcctcaaatccatagatagtcatattaagcgcaaggacttctgtttatttataatgattctcatatacagatgcatacaactgaaggaaggatggtatgtgtttccagaaatatttgctttatgatgagatatgagtgaagttcctatttttttcttcctttgagaattatgtttttattatcatttaccctagtgctcattttcatcctcttcaacagaaatttagcagggagactggttgaaaaactattcatataagttcctccggaggcttaatcatcagtacattgtcttggaaccactctggtgttttctaaattaaatatctctgtctacaacaaatgcgaaaagtacagaatgtttccgtactccttctacatcaaaattgcctcctacaggaacgagaaaatgcgtgtcaatgtgaattaccgtctacaacagctactctccaggctgatctggggtcttgcacacaaagggcgaagagaggggcgtggggaggctggaaagcatggttgccccgcctggcccggcgacgcccgctcagcagcctgctgaggagtggggacgaagagcagcctaaacttagggctcgggatatttcgatgccacccaaattgccgtcctaccccaacgaggcagggaaaggagcggagcgcgcgcgcgagctga

SEQ ID NO: 36955 - DNA, 2300 bp, Homo sapien
tcaggagagagatatcacagctttcaaggctttgtttcagatggaggtactatctctatcttccaatatcttccaagactatttactgtacaaatacccttgagaagacagtctagaaaaaagggcaattagtgccttggtcataagacaggtagaaacacaacggatccagggagaattgtctctccatgttggtgatgactaaaacttcttcatacagttgatacgaaacataaattttcttcaacctctaaaatattagaaaaaatgattttttcaaatgttttaaaatgagaaccaaaaatttaacagttcacattgcattcagcatgcttgagaaagtcataatcacttaaaatcctagaaggaccttatatatagtgcatatatataacacacatatacacacacttaagtggtttattttctgccttccccatttaaaacataaattccttgacaataatgactgtgtgtgtgtgtgtgtgtgtgtgtgtaatttattgtcttattcgggttcctacattaatttgcattaatttaattaataaatgctctagctctaccatacaacccttttccttctttctttttatcaacaccatcgccatgagaagagcaaaaacaagtgtgcctgtattttgagggttctcatagtcatcaacattgaaaatgacaagataagaaatgtcaagataagaaaatgacaaaatttgcttatcttcaagaccacctcctatacacagaatgcagaaaaatgccccacacctcgtggaactcagtaaatattagttgcattgaattaacttcaattcaagaccccattctacagtttataaagtcaaaagttgctcttagtaacacgctcagtaatatgtgctgtgttttgaaaatagaaaatatcccttttcctcaaatccatagatagtcatattaagcgcaaggacttctgtttatttataatgattctcatatacagatgcatacaactgaaggaaggatggtatgtgtttccagaaatatttgctttatgatgagatatgagtgaagttcctatttttttcttcctttgagaattatgtttttattatcatttaccctagtgctcattttcatcctcttcaacagaaatttagcagggagactggttgaaaaactattcatataagttcctccggaggcttaatcatcagtacattgtcttggaaccactctggtgttttctaaattaaatatctctgtctacaacaaatgcgaaaagtacagaatgtttccgtactccttctacatcaaaattgcctcctacaggaacgagaaaatgcgtgtcaatgtgaattaccgtctacaacagctactctccaggctgatctggggtcttgcacacaaagggcgaagagaggggcgtggggaggctggaaagcatggttgccccgcctggcccggcgacgcccgctcagcagcctgctgaggagtggggacgaagagcagcctaaacttagggctcgggatatttcgatgccacccaaattgccgtcctaccccaacgaggcagggaaaggagcggagcgcgcgcgcgagctgagtgagtgcttacgtcgcagcgagatctgtgctgggataattagagaggagttgggctgagccgagtcctctttcagcagcagcagccggagccgccgccgcagcccggtggggcaaccctgactcggaccgctcgggagagccccaggagaggccagcgccgcgcagcagccgccccgctgcgcccacctccccggctgctcccggagggctcacaaaggcggtggccgcccgagtggccttctccatccaggcgttcgcgtcctcctccccaccttctctcccgaaggcgaaaatggcagggccaggcgagaacctgggacagcggtggccctagccctgcgatcctcacccctcctgctaggagaggctgcgggctgcccgcggacgatgtggccgcggctgctcccgagcgcatcttcggcccgggtccccgccgccacccctcttctctgctccttccatcccgcccagaggagttgatgccgctgtcgccgccgccgccgctgctgaagccgcggctgatggatgccagggagtgccgcattgcttagcgaccccgcctctgggtttgctggtaggagcggctgctctttcttctttcttgctttggggttttatagaaaagataaggacatttttattttattcttcacaacgtcctccccttctcttcgtttttgaaatgtgcattcccagagatatccccggtcccctcc

SEQ ID NO: 36956 - DNA, 2300 bp, Homo sapien
caagcaatgctcctgtcttggccactctagtagctgggacatttacaagccacttttcagtttcacaacccataaagcctttctcaaggaactgagagccatccctttgaaatgtaatcatcaagaaagatagtgccccatctctaagtttctgtggaagagtaggagcctaacttccttggactcctcgctccacattgtgaaactacttcttaccatgcagatataagactgaaagtttacgttttgagggggaaaagccaatatgcaaaaacagatgtcctgtgattccccataccagccattacaaacattcctgcgtttttttgggggggaattgagttcagactcaattccagtctctctgtcctattgcaatagccttgaataaagtcttctttgcctgtttaactttgtctagtgcaagttttgctttgaccttcacgtcttgggtagatataagtaactgtgtgcaatttgtgtatgttgcatgaggagtctttcatgaagcaaacatcctgaacgtaatccatctaaggaaacaaagaaagtgcaataccttttttttccacatcaatggcagtttccttctcacttttctttttgatatcttctttttctgctggtaaaataagaaagttataagcctttacctgtttaacttgcaaatatttcagggcatgcatgactaccagtgaggcatctaatttatcttgtatagagaaatcttaaatcagccataagtcatgtcaaatatgaataaggtagcaccttcataacagactagtggcttaggtataatttctcttcaggaaacagaacttttttttttttgccaaaggcaaaaattatttaataacagtgaaaacattaaatggcattattaattatggtattatttaacagctttcctaacatatattgaaaagaatatattgaatgttctctgagctatgaggtcaccagaaccatgtcaaaagttctgaaatctctgaagttcacttgggacatcagataaattatttgaaaacaaccaattaaaatatatatatatgtgtaaaacaaaccaatcaagtattttctgccctctacataaaatgacttttaaaattagactgaattagttaaatagtaaccatcatattcacatatatagttaaagtaaagtagtgaattagagagaattaagcagctgctcttaagaaagaaaaaataatcacagtagtaattttcaaaaagtgtttaggattgaattctctttttaaaaattgacaattttaattttatttggaatatctagacatgttaagagtgttcactaataacaatgacaatgcatttattaagggaatttctttcctagaaaataatagatttaccagtagtattatgcatggacactaattgatttatgtggtacatggcttttaaatttcctacctttcttttttgtttcagaagtaactttcttctcagccttcttcttttccccttctttttctagagaatacatttaaaatatttcctttagggaaatttagtatgaaagcaaaaccaaggttgaaatgaaggatttttgttaagtcagttctgcctccagctagctttgtgactgagcaagtaatttaatcccactaagtcttattttcctcatttatcaaataataatacctccctcaaagttaatgtttacaaaacactgtgtaaagtgcctggctcacagtaaatgtgtaacgttgtagactgctaatactgtttacaaataatgaatgtgatagtttgaactttctgaaccaaacaattgtttatctagtgcctaaaagtattgatatataaaattaaaatatatttcttggaaaatatactgcagataaactagaagaattaatatttgttttcttttatacatttaatttcattagaaataatatattagaccattaaaaaggtatcttttgatgtagctgtttttcatatctggctcttgccaacaggcatttaagcctgatgacaagtgtctggcagtgtgttggaaacataacttccacggtcctttctgagtggttgtatcaacaaagctgttcaatctttgcacccagaggttgcagtaagtctggatgccacatcaaactgtttgtggtacttctaaacttcgtggaagagccctgtttcataaatctgagacagccttggtctgagggagcaaagacagagaattcacgtgctgcccaggcatagccacatagcaggtggacatccctggacacttttctggtaagcataatcattttagataacaa

SEQ ID NO: 36957 - DNA, 2300 bp, Homo sapien
gtaagaatgtcagttgcttggtttcagaaagcttggcagggttccatttggaattcaaagacatacctcatgaatggagtttcagataaattgaaagagtcctaataacttttcaaaatgagaaccatgccaatttctcactgcctaatgacattcatcaactcatctcacagaaaggtttgaaaaagctattatcttcaaaacatgtttattgtctagaatatgttttcttttatttttccttccagtatgtttaacatgaaaatagtgattgggaacttaagactaacatcaatactaggaatttagtatttcttttctagagtcttattttaactttttattgagtaaaactagtttgaaaagttgagttttttcctgttccagagcctaattttatttaggatctgacccatgaaaattcttaatgagttacataagatgtcattccttcagttaactacaatgaaagattatgaaagtaactgatgaatggagatatgaagtgctacgtttttcaaaacaattggaactgctgtggcactattgactggagattctttgtggggggcaatgtaaggagggcttttctcttaggatacctccttagaccaacccagagctctgggaagctgctcttgaggattttgtatcttttcatcccgctagtgggcctaatttgcagtgaccccctttaccttaagtcatagtatctgcaacaaggcctcatttcttggggaagatagcaaacttgtagttaaaaggctctaggcccagtcctagatataggaattgaataaaatcatgaatgtaatcatgtaatcatttcctccttgtaaattaagatttgttactaatttatgtattcagctggtaaatgagcaactttctattgtgtcaggaatgggggcagtagattaagacagaaccactaacagggaggaggtcattgcctatggaaatagctgttgcagcactcttctgagcctgaattttaaaaataacaaacatggctttgcttcatgatctatgaagtaccataggaattcgggaggtctgaaaacgaaaagtatcaagttcaagctaaaagattaaactacaagcatttattaggttgaatatgagaataaaataaaagtgtagtcaacccttgattattcacagattggctagagtttatgattatcaatgcccttcgattctccttttgcttccaactaccaactattgaatatttttttgctcattaacacctgtctaggagtgggaaggtgaaatgctaatcagccaatttggttaattgttagtggctgctataatccttttttttttaagttgagataaggaaatactttacttaaatattggctgtggactactaaactttatgtcaccttcccttcctttttactgcatggataaatgcaggtatttagttcttagtaaggtagtagagagaattaaaaagatagtaattcatcaatccaatgtttttcaagtatcacactataaattcacattacataattcttattggccagtgttcagaaaatattaatcttctacaatatgactactttaaaagaaagcttcaagatttaatagttgcaattttaagtgtagccctatataaataactgcacttgctaagtggatttgtatcaacaggaacataacttctagaaaattactcaagactaccctcccttttgcctgtgatagacatttgggaccctccccaaaccaaataagggaaagaagaatgttctgagcattaagagcactaagaataaatctgagctctcacggataagattactttcaactctttatttcatgttttctgacatagaccccaggatctgtaattatcttagagaaactgcgggggcttagatggtactttgtagttcatttggttttttttgtttgtttgtttgttttttgcctttctctctttggggctgaagagctggtgtgtctgtgtgtgtgttcctctagagtgccaaaaaagaaaaaaaaaagtgctgaagagtcctagggagatgaggctatttttgtttgaagctgatacttctagctgagccacaagtgctgcttggaaagggcttaggttgtttccagggggagaactctgcagaggagaggcaaagttcaacaggacaacaaagaagcagcagaaacagccaggaaaacgaagagcccccaggttttgacacagaaccctccaccagagttctcaaatccccaaatactctgcaaagtgcaacttgacgggaacttttcaactgacttttact

SEQ ID NO: 36958 - DNA, 2300 bp, Homo sapien
atacccatagccctagcaggtacaggacagctaacgtgtataaagacagaagagcaactaagagaaacattttccactagataactggcttcagttttaccaaaggttgtggaactattaccttccaggctttgcagtgcctaagagcacatattgggctcttgggaattttattaaacattgaaagacacttttcagaagaaaagcccctttacaaatgggtcgattaaaaccagacattctcattatagcaataaaatatctgtgctccataaatttaacaaagttaatccctttttggctccctaggactgacgaaacgtttctgaaaattcagtgccaggctctggagaatagtctctctgccctattcaatttatttgtatttagtcattctgatacgtcataatgtttattcaaaggaagcaatcattcgggatccttatttgtggttcccagcataactttatcctgtataaatgccatttttctcagtaggcgccaagttccagttgctacagagagctctctgcttgatgtggcttcgtcatcttaatctcttaagaagggtgctagggagctgtttgctatttagctccctaaaccatcctcttatcaatcgcgacacttcaccccaatgagtcagttcctcagtggatctcaacaaataatcttcacttcctggaaaagttaggattgctttccttagctgccagggctaaaaaggaaacttggtcctaaatatccacgccccaggggcagccacttgggccagcatgttgcgcccttcagctttccgcccgcaggtggcagcagcgggctccgaagcctgtctctgcaggtagcagccgcttcacagctttcaggccggtgctcagcggaggctggtgcatctccactaggaatccacacccagctgggactgctgtgaagctgaagtaactgagtattaaactagtctccgactctttagtattttaagtgaaaacaaacaacagtttgaagcagcaacagcaactcattgcatccctattccctccggttgctaatttttcccaactccagcagcaactcggtccccttccccaagcagggtcggctccgtagctctccgcgctccgacccttcagatcctcgggagcccaggggagccaggtgctgggcggtgcgtccggtgccgccgcgccccttctcgccacctctggcctctccgccactcgggctttccggccgctctggatgcctcggttgcacccctgttccatgaccccagcttccttccctaaccctcctcttggtcccttctcccccgagcgcgcgcgcacacacacactcggttcgctcccgcggagtggctctgggagcacgaccgacttcagctcagcaaaccgcggtcatgccgcccagactcctcgccccgaggccccggtccccgccgccgccgctttcgcgccgctcctttccgcctagacaccgccgcctgcggccgcctgggcggcagcccctgcggtcctcaaagttggccccctgggagggggcggcagggagcaggatgaaggatttgttgtaggaggaggattcacacatctgggcgaagggaggggcagcgccgctgctgggacgcggcgcggacccgcatcattgcgcgcagcagccgctgcagcagccgccggggaccgcggagccgggacgcccccgctcggcccgcgccccgctccccgccccacccccgcccgccgggcccagcaacgcagggtgcctaggagccgcgggctgcgcagggaggcgggcagcggccctcgcgcgcttctgccgcccccggagccggcgcgcggcgagcgcagggcgagcgcgcgtcgggcggcggccgcgctggggggcgtgaggcgagcggcgcggagagcggcaggggcgaaacttcgcgggccagatgcccgagggcgcggcggcgctgccaggctgccgctgctgcccctgcgggccccgagcgcgcctccgcaggcggcactgcccgcggcgcggcgtgtgcaccgagcgagtgaaggtatgtgtggcgggcgcggctggagctgccgccgccgccgccgccgcgccagcaggtcctaatgcctgtcacttcccaggacgctggcagcagcagcagcccggagcccccgagccctcggcaggtttgcgtgtccttccccgcgatctgattggataaagtgggggctcgacggtggccgacgtgggacagtctggctgtggcaggggtctcggaaaccatgggttattgcagtggcaggtgcacgcttatcttt

SEQ ID NO: 36959 - DNA, 2300 bp, Homo sapien
aagaattacagattagcttgttcagtctgcacaaacttgtaagtaagaaacaattggttgtgccataacaagaacccaataaatgttgacataatttcacttcagttttacagacttagttattacattatcatctctatattttttataattaataggactgctattttctttcataattggtgcatttattgagatatttcccactgttagactgatgtgtttcatcctctatacgtttgccctgctgtgtccccacagttatgatgctccaaatttatagagtttagatgtttcttgctgttggtttacattcctattcactatttattcataaaataaggcggagagggttctatgttgaaatgaacttttacacagaaaattagcaatcatgttctcagaacaactacttagtttttgataccattcacagattctaacttcgcatatgtaatactgcctaatgtcacaaatgggtctcatttctacaaaacgttaactatatgagaaagttgaaggaatggctcatcagaagacaattcaggtttataaagcttaagtgatattccagtcctatgacagtctgtgtttattaaggagtaagaatattgcattccactattgagactctgatgagtatcatggctttagcacagggtataacaaatcaaggttcttttgtttttttaattatggcgaagatgcaatgagaattacgatttgactaagttggactgtgactgctacaaccattacatggtgcccagtgtgccttagaaaatagaggtgtcatgaatttattttctctttcaatgcctgatgggaaaacgtgctactcagctaaagaactgcagtaggaataatgatcattcaagatgtcttcaaactgagctacagatatttaatttaaaagcacattgcctgttttgagagtcagtatttccttctgaaaagaaatatcattaaagcatagtgatgttaggaacttagggattttaaaatcatcattttccttgaaaacctggctgaataaaatattgaatcttggtatggagcatcaagtccttttacaatgtttttctctgaacagagagtttattatcatcccccctgagggcaggcaggaagaataaagccaacattctgctttactttgttggatctgatgagatcttgctagcttcctagatctcactttgggatgtaaaatggtacttccggactacccactaatctcagtttgttgttatttttggttagttggttggttttgtttttctcctctcactgcttagatttttatatgtcttaattatagttgtgaacacagatgaaaatagtataatttaaatcgacttaagtgtcttgcttttataacagtgatgcttgatttttgtgtttgttttccattgttctaattttcttttagggcccttcttttacctggtagccaggtatgacaaaacatcatatttgatctataatacaacactattagaactagaaggaccctacacacctcgtcaaagtccttcatttcacagacgagggccagcacccagagaagggaaatgacttgcgtaggccactgcggctacttagtggcagactcacgttcagaaatctttgtcttgctaaagggttcttgctacaactcttgctaaagatttctttttcctccacatcaaacttcctttgttctattctcaacttatataatgacgtttgaacagatctagcaacaaactctttatgtggacttccctgacttgctggttgatgacttcaaatgtttgacagtgcacatgacaatataatttatcctatgactgcaaagatgacatcttgtgaatactgcttgattcctccacaaaatcatccctgaaaggcttgtaggtgtctatagatccacagattccatagtgttcctttgaaataactgaaaatgtcattctcgctgttagttaaagacaaatgccagatatggtaacacagttataagtgctaattatgttattaataattttatccttttttcctctcaccactgtgctgtttctcacatgctgatctgtccatcctgttttgctattctaggtttgtgtgctggagaggcaaatatttgacttccttggatatcagtgggcacctatcctggcaaattttgtacatattattatcgtcattcttggtttgtttggaactattcaatatagacctcgttacataacaggagtaagtacattttctgccttttaaaaatcttattgaactagagaatgatgtgcaaactccaa

SEQ ID NO: 36960 - DNA, 2300 bp, Homo sapien
taacctaaccggattccacatgaaatcataacccataatgtgggaaccatggatgttgtcatgaataatttaataaacataaaatgtgtgcttgatgttctgcaatgtgggactttgaggacgaaaatcttaggccttgatccaagcagtgcaaaatccagcaagggtgagaaatactagctatgctatatttgtgaagtgtatgaagagagatattcatgaaccaaatattatcaaaacacagaaaggactaaatttccctctagcaatcagaaacagttgaaaacacatcacacatgtgcacaaaactggcatgggagatgattctactggtcactcataatggatttttgactgttccagcctacagttctttcaaagtagttattctcgacctgggccactgttggaggttttgagtcccctaagatttagagaaatcagtttttgagattcactggagatccagaacaagaagtttgaagtaaggattggacaataccccactggatttcccgctgggctatcccagcaagcctgatgagatctatccccaaatccctttctctagggcagtgactctttcgtttacaattaaagcatctggacgtttattagaaagcaaattctcaggctccatcctagacctactgaattagaatctctaggaggggagccagggagttcacatttcaataagttcttcatgtgattcaaggtgtgctaaagttagagacatactgctagtatttagttatgcaacttcagtgttgggtagatggatctaccacaggtaatcattagcccccagattcagaagggttctccagtaagtagaaagtttcaaggactgacaaatcttaattcagtagttcagtaaatatggaattttcagtagttttccaacttggctgcatgttggaatcaacttgggtattgaaaaaaaaaaaaaaaagctcatgcctggatcttacccacggaattctcatttaactagtcagttttataagctacccagatcagtccaatctgcagtgaagtttgagactactgcatcagaaagtggtggttcactgacctttatccactaaaagcctatgggagatagcaaaggaaacaatttttgacagaaaagaacataaagggaaataaaatttttaaatatgtcaaactttattctaggtttaaatcacatttttgagattttctgtctaggaagacgttcttaaagaatcttcctaaataatgactgagtagcacagatatttcagagagactgcaggtcagaatagagaatctttattcacattatatttaaggatatcaacattttgaagcatcaaattaaaccatgccctctgtactttaaatcattctgccttggtcactttgtgttgctgtaaaggaataccttaggctgggtaatttataaagaaaagaggtctatttggctcataattctgatggccagaatgttcagaattaagtatttacatccggtgagggccacaggctgcttccactcatggcagaaggtgaaggggattctggttgtttaaaagagcctagcacctcccacctctctcctcctttctttctggccagtgtgtgcagagatcacatggccagagaggaagcaagagagaggtgagaggtgctagcgtcttttaaaaaaccaactctcggatgattcataagaatgagaacacactcaccagctccccccaggaagggcattaatctattcgtgacaaatctatccccatgacccaaagaccccccattaggctccacctacaacattagggatcagatttcaacatgaggtttggaaggacaaacatccaaactatagcacttccctacttcatttttcttcgctttctctccgtctcgctctgtcgcccaggctggagtgcagtggcgcgatctcggctcactgcaagctccgcctcccgggttcacgccattctcctgcctcagcctcccgagtagctgggactacaggctgttctcgtttttaatctcctgattgcctctacctttagcatctgataacctccttctaccatcaaaaaatgctttcatttagagtcttctgtatttaattaatgcacttttaaatatttactgagcaactgttttgggggtcacagcattttcatagttatgcgatgatttcttcaaattgttcaaaaatgtttattgcattcctactatcttcctcgcactattctaggtacatcacggagcaaaacatccaaaaatcttgccattgaaggagcttaattctagtggag

SEQ ID NO: 36961 - DNA, 2300 bp, Homo sapien
actataagaggactttgaggggttttattccaatagacgctgtgggaatatactttttggcatccattattgttactctggtcttagcctgttgtcacctggaaaatgcagattacttttatatctctggaaagaatagtggcttggtcatcagatggcacactcaaaaggcacacataagtaggtttcttgtctctgtctttaaaacaataagcacttaaagtatcatttggagaaaacagcagttaccaggaaatcacttagctgagataaaaaagaaaagaatcctcgaatagcatttaatcttcaaaataagaattttccattcttgggtcagaccgatagatgacatggcatttagacatccaattcatacctttgcttgcaactgagcctcagacacacatatatgatggaaatgttctttggcattacactgctttcttagtttgcatcgctagtcacctttgtatcatttgcatctgatttggaaaatattttagaacaacccaataacaacttcgagattaaaaaataaaattctacacactttacagttccttgctattacatgaatgtgtaaattgaattccctctcaggagaaaaaaaacaaaacaagggctggcttcccaaaaatgttttcactggctttagggaactaaaacaccagtgtctgggtgagtaatacttcctgtaaaataaagatagatcaacacataattaagtcctggctcacatataattgttgttttggaaacagttttgaggataaatatggttatgctaatgaaactgcccatgatttccactaatgatccagtttattaattaggtcaggacatttttccaccttgtgctatccattttggaatgctgaaaagggttaaaaaaaaaaacttctaagagaacactgtaggcgaagaaaaagagagaaattttaaattagttatcaactcttctaaggattccagttggaggagtagatcgaaagtgctttttcgattatttatgggtttcgaagattcttcctactccactaggcagaaaaacagagttgtaatatacagcatttagaattcataatccttagcattatttctctgaactcgacatcctaaatagccagcgtttactaattccagagctgagtgtagttttgtaggaagttctactgaatgcggagaccaaaggggagcctgcctgctctgagggttttgttgaggctgagtgtgaactccgggcgagaaagcgcatctcagctcttagatcacacccactcagggtgtgcgtgtgtgtgtgcgcgggtgcctgcgcgcgtgtgtacgtgtggggaggtgtgcgccaaaggggtggggtgaggggcggcgaggagggctgtaggtgaagcgcggggagagggaggtcgcccgctccggcctctcccccaggggccctgcggctggccagcgctccggctgcacctcctggtgcgcgccgcggcggcgccacaggcccctcgaccctttgaccaccgccctcgggccgcgcgtccggcagccgggaccggtgatggcgcgggactgacggccgtctcctcccagacccctctgtcccgcctggggctcgctggggctgcggcgccgccccgagctgcatgtggggcgggcgcgcccgagcccagagcgagcggccctcggcgcccccgaggcggtgccccgccgcgccagagtacgaggaggagcggcgggccgggccaggctccccacgcgccgcagcctcggagcacgggctccccggaggggacttggggcgtcccagcccaggaggaaggacccggaagcagaagcggagccgcgagtcgagccgagccactgcccccgctgcccgcgggcgccgggtgggggtcccggcggctggatgggcagcggcggcgcgggccgcgggcggcgatgggcgaggagcagagcacggtgagcggcggcggcgggccccaggagtcgcagaccctggccagtggcactgcgggccaccctgagcccccgaggcctcagggggacagcgcccgggcgcccccgctgcgcgccgcctccgcggagccgagcggcggtggctgcggaagcgactggggctgcgcggacaccagcgccccagagcccgcgaggagcctggggcccccgggctggagtaagagccgagcaccggcgcagcctgcgggactggcactcaccgggcctctcaatccccagaccttgccactgcagttggagctggaggaggaagaggaggaagctggggatcgaaaagagggaggggatgaaca

SEQ ID NO: 36962 - DNA, 2300 bp, Homo sapien
ccctctgtctccctactaccattactaaaacttcctaaaactaacttatgaggtttaataaagaaaaagaaaactgctttggggaaagggcccaccataaggaaatcaaactgctaggtaaagtaccccaagccacaatgactacctcccttgaatttctggaatgtgtatccagcatttaacaggaagtgctatctggaattgttactctattgacatctcatcccatgctaccttgtattgttcttttgtacacatctgctctcacagtgacttccctggaggcgggcttatattttggaaatgtctgaatcccatcgcagggcagcgaaatctgttttgaggatgatgatacagaaactaccacaaccagcagcagacattcctcctgttttaagaatctctgtagataaagcatgaaagaaacaacagtctctcagaggcttttaaataatcccaactattttagccaacttactgtttatgtaacataccgttttaagtctttgtttgcatttttagttagggactgtacacactttcagtctagacccaagcatgagttagccaaaaaacatagaggaatcacatggtacggagccctgttcagtttgtcccagccaatgttattaaaaacactatgatgggcaagggactcaacatgaagctaccacatatgggactctaagacattgtccagacagtctaacaagacaagcagacacgaaagaaacaacttcagtgcatgtaagataatataagatactgtgaaagtatataagcagtgacttggagggtgaggcaacgcttcacagaagagttggcacctgaacacacagggttttgaaagatgaataggcctaggacaattggacacaggatcaaagggcatccaggattgtgcaaaacactggcagaaacatcacagattgaaaactgctggaagaacgcattcaccgtcagtgaaggaaagctggtctggtgcactctcaagctttccaagaaaaaaaaccaagttttcaaataaaagcagaggaggaaagtttcaccagtgcttgttctgagaaacctcttagcctctctttgctttgttttgctctttctgttttgcttccctcttaaagagtgctggcttaaaacctcagtgaaagaaaagtacttcaactttactgtggaaaaaggaaactgaaaagtaggcaaaggccaagggatacatttttttaaacattcactctttcctggaatatacaaatgaagcaaaattacaaattcatgtattatgggtctgaaatatttattccaattcttttctccaccagctccataaatatttattctatgcccactgcttgttagtttctgggataccaggccgatgaggcagtctcttcctctcctcctttgagcaagcttgtgcttgcaatcctgtataagaaataagaggagggcaacaacttgtatcttgtgccttctacacatgccaaccatagcctgaagttcacagcaaagttaaattccagttaagtaaaccagtgaggtcataatacacttaaataacaactgagacgtgagaaactaacagagatcctcagtaagtgtgtcggtcacctcttcgcgcgagcagggagatcagatcgagagcaggacctcctcgccagtgatttggaatgataaatggggaagagaagggggtgaagttacctgggcgctcaggtagactttgaggcactcctcgcacacggccttcttgcagcaaggcaggggcttgatgggcttgtcttccaggcacacccggcacatcagcaccatgaggggcacatagggatcccctacaccgcccaggccagagtagggtggagctcccaacaggctgggcatggagaacggctcgggcgccaggtagaactccagctcgatgctgccgccgtcgggggagagggaatccgttgggagggacagtcgggggctggggaaggaagagcgggtgctgggagggttcaacactggcggagccccaggtggcgacgcgggcggcgagagctgctccgaggcgggggcctcgggcaggtcgctctccacgcagtacacggagcagaagacttgtctcttggcgagggacgggcgccgctgacccagcacgtccaggaccagtccgtcggcggcccccacgcgggtcctgggctccagctcttcgccggggggcgcctcctgctgttcatcccctccctcttttcgatccccagcttcctcctcttcctcctccagctccaactgcagtggcaaggtctggggattgagag

SEQ ID NO: 36963 - DNA, 2300 bp, Homo sapien
ccccatgtgaacacaaaatatctgagacgggtttcagttaatttagaaagtttattttgcgaagttaaggatgcactgtggcatatccccaggaggtcctgacaataagtgtgtccaaggtggtcggggtacagcttgcttttatacattttaggaagacatgagacatcaatcagtatgtgaccaaacattggtttggttgggggggcggtgactttcaggccataggtagataagagacaaaagattacattcttttgagtccttgatcagccattcactgaatatacaatttagtctggctcagtgaatctgcctttttacataaacagcaaggcagagaaagcaatcagatatgcatttgcctcagctgagcagagagatgactttctgtcctggacttgtgaagatacgctatcatatattgccagggtgaaaatcaacacaactgtttaacatagagtaaagatcttggccgagggcggtgactcatgcctataatcccagcactttgggaggccgaggcaggcagaccactaggtcaagagatagagaccatcctggcgaacgtggtgaaaccctgtctctactaaaaatacaaaaaaaaaaaaaaatttggccgggcgtggttatgggcacctgtagtcccagctgctcctggggctgaggcagaagaaccacttgaacccgggaggcagaggttgcaatgaaccgagatcgcgccgctgcactccatcctggcaacagagcgagactctgtctcaaaaaaaaaaaaaaaaaaaaagatcttgaggcccacaaggaatttccttgtgggcaaattgtgagggaggtatgtagctatgtagcttttttatttttgtagctatcttatttaggaataaaagggaaagaaggtttgcctgatgtactttccaacttgacttttcccttggcttagtgatttttggggtcctgagatttattttcctttcacactcatattcatctttctgtcaagaatcaactcacttcaaagtaaattcaatgtttgcaagaagtttctctgtaaatgtgatgggatttaatttttgaatcatgacagtttagcatttttcctcaaaagtaccaactttactgaaaaatagaagatatttcatagggtaatacaagatactttttcaatatttatctcactttccagatacttggatattttctatagcaaaaatgtggtcattggtacctcacgtatgggaaaattctgtagtctaatccccacccccagcctccaaaaaaaaaaggattcctgcattgaattttgtttcagtaacacattttacataataacttataatcattgccgttttatagatcatttattaataatatatttacatatgagtctatgctagatcttgcctgaaaacaaagtattaataaacaattgctttatgtgcctaccctctaaaggcatttggtttctagatgatatgcaaacactggtttctcaagtcatctttggtatataattgatacatttataaagtaaaatatgtcaaaagttgatgactttatggtatgtgaaagtaatttactcacttcctggtgagaagaataggaatggggttgcattattcacctgtgttacctttgatgagtacattgaagagctgtgaagggaattcattcatctttccttggctagcaggtttgctgctggttcatgaaagggaaagaaaagggaagaagcacatataggtgtcacagtaaaaggatcacttcatagagtaatttgttttaaggaaaagctttctatatatttcttcttcaacgctcccccctcaaccacaaatagaggttcttaacttgagagtctatttatttatttattgtcttcagaagggtcataaatgctcagaaattttatgtaaaatcaatttttatcttatgagtgggcccataacatttattaagtctttggaccattacccaaaaaggtttagagccactggttttaaaaggcttttgtgtcttgtgatgtagagacaatcagattctggtaattatttggttttcatggtaactaagatgtgggatagaactccgactgtgtactttatttagtatacagaggaggacacaaacatgagaagattaaggtagagagtgaaatatggtcaggacaaatgtgaatttagagcctgagtgatggtttagtggatttatgtcctcacttgtcactaatgaaaaggaccttacaggttatataattaaaggtagatactaaatactgaaactaataccagtcattctattcc

SEQ ID NO: 36964 - DNA, 2300 bp, Homo sapien
aaaaactttttattcctaaaagctatacaacaaggttttattttaaagtaaagaaaaattttcatctctcaaccttttcatttctcctttcacagaactcttctctttttcctggatgattttatcccacctccataatcattgaccagtttttttaatgcagttataactacactacttcagacattcaaataaatacactgtattaggggaaggaaaggataattttaaaggaaatatgcagagttttagcttatggctaagacttgactgacaagagtcaaacaactactgaaggatttgacacacttgttaattgtaaaactcccaattgctttaaaacattcactgacactctagtcccgaaacaacacaatgaatagaagcctccactagtcaaaatggtatcaggagcattttcaataaaatttctaagcaaagaactcacatgtgaatgaataaagatgtgacttgagcaagtacctactccaagtgcaagcttgtccaacctgtggaccacttgctgcccaggacagctttgaatgcagcccaacactaatttgtaaactttcttaaaacattatgagatggtttttgcaattttttttagctcatcagctatcattagtgttagtgtgttttatgtgtggcccaagacaattcttcttcttctagtgtggtcaaaagattggacacccctgccgtagtgaagtagtagactatttttaggaggtctcattttagtaacaggagaactgggcaattgtattagtccattatcatgctgctatgaagaaatacctgagactgggtaatttataaagaaaagaggtttaattgactcatggttccgcatgcctggggaggcctcaggaaacttacaatcatggcagaaggcacatcttcacagggcagcaggagagagaatgaatgcaagcaggggaaatgccagacgcttacaaaactatcagaacttctgagactcactcattatcacaagggcagcatgaaggaaactgcccccatgatccaattccctccacttgaccctgcccttgacacgtggggattgttacaattcaaggtgatatttaggtgggaatacagagccaaaccatatcagcaatgtaaccaaaatattatgtattttgattaaataatgttaagttaaactatgttgtcttttatgattattcatgcaacaaagtacgcacagataaagatggctctaatttctatacaatatctttccatgaggattctgagttgagtttccaattttatcgcaaagagtaaagtcttgattataacatggtctcactgcttgaggcggtgactaccacactgtatgttatatatggtgtatgtatatataccataccaccactgtatggtatatatggtatacatatatatgtatatatggtgaactacccaaaaatgaaatccttgttacatgatgggtgaagctgtgtttacatgtaacttgactgcaacaatagaggaaggtgcttagttgcacagatggtattgtacaaacagttctacaaacaacacatttacaaataatattagagctgaaaactaaaaaggtattgcaaatacatttatatctgctataatttccttcaacaaagagacctctgctttttggtatttattcacaaaaacttttatgtaatcctttcttttaaggaatactgtttatctctgcttattcccccaagttggctcattcttgctgatcatagcataaacaaaatatactttcaaagcattttaaattgcctcctaaccgttgaattaggtgtatgtctggaaagataaatgtgtcttccttggaatgtgtttgcttttatattggtcaagataagccaacagcttgagtacctgaaatattatcaagctttgcacacatgaaagtatttggtaaaaggataatcttggagggtatgattataagcaaattcacagcctcaggagtgctgtgagagacttttattttggtgaaactggtaagtgttgtttcataaaatttgcgattttgctttttaaaaactcagctaactctttccttctccttccctctcttgctgatacagatccacatccagcgaactgaaggatgtgaccatatgacctgctcacaatgtaacactaatttttgttaccgatgtggtgagagataccgccagctccgattttttggagaccacacatcaaacctcagtatatttggatgcaaatatcgctacctcccagagagacctcatttaaggagattagtgcgagggtcagtc

SEQ ID NO: 36965 - DNA, 2300 bp, Homo sapien
ttctctgagacacaacaatattgtagttacgctcattaataaccctacaatcgcctccaaatattcacatgaaaggaagagtcacatgtctctcaccttaaatcgaaagctagacatgattaaatttagtgaggaaggcatgttgaaagctgagataggccaaaagctaggtctcttgtacgagttattcaagctgtgaatgcaaaagaaaacttcttgaaggagagtagaagtgctactccagtgaatacacaaacgataaggaagtgaaacagttttcttgctgatatggggaaagtttgagtggtctggatcaaacccgatcaaagcagtcacaacattctcttaaccacagcctaatccagggcaaagccctcactctcttcaattctataaagcctgagagaggtgaggaatctgtagaagaaaagttggaagctagcagagactggctcatgaggcttaaggaaagaagtcatctccataacatgaatgtaaggtgaagcagcaagggctgatgtcaaagctgcagcaagttctccagaagatctggctaagatcattgatgaaggtagctacacgaaacaacacattttcaatacggatgaaacagccttatattggaagaagatgctaccaaggacttttacagctacaaagaagtcaatacctggtttcaaagcttcaaaggacaaactgactctcttgttaggggcaaaagtagctggtgactttacattgaagccaaagctcatttaccattctgaaaattttaaagcccttaagaattatgctaaatatattccacctgtgctctataaatggaacaacaaaacttgaatgacagtacatctgtttacagcatggtttattgaatatttttaagcccactattaagacttactgctcaaaaaatgtttctttctaaatattattgcttaatattggttaataatatactttgtcactcaacagttgatggagatgtacgaagagattaatgttgttttcatgcctggcaaaacaacattcatcttgtagcccatggataaaggagtaattttgactttcaagccttattatttaagaaataaatagatagctgccattaatagtgattcttctgttggatgtgggcaaagtaaattgaaaaccttctggaaaagattcaccattctagatgccattaagaacatttataattcgtgggaggaagtcaaaacgtcaacattaacaggagtttggaaaaagttgattccaaccctcctgaatgactttgggagttcaggacttcaaagcaggaagtaactgcagatatggtagaaatagcaagagaactagaattagaagtggagcctgaatatgtgagtaaattgctcaatctcataagacttgaatggttgaggagttgcttcttatggacaagcaaagaaaatggttacttgaaatggaatctactcctggtgaagttgttcacagcattgttgaaatgacagcaaaagatttataattatataaacttagttgataaagcaatggcagggtttgagatgattgactccaattttgaaaaaagttataatgtagataaaatgctatcaaccagcattgcatgctacagaaaaatctttcataaaaggaagagtcaattgatgcagcaaacttcattgttgtcccattttaagaaattgacacagctattgcagccttcagcaatcactaccaggatcaatcagcagccatcaacatccaagcaatgccttccaccaccaaaaagattcccattaggtgaagatgatctttagcattttttagaaataaaatatctttttaagttaaggtaggtacattgctctttctagacatcgtgctattgcatacttaacagactacagcatagtgcaaacgtaacttttatatgcattaggaaactgaaaaattcgtgtgactcgttttgttgcaatactcgctttattgcgggggtctggaacctaacctgcaatatctctgcgttatgcccttatagcgccgggagtgggtgccttccgccggctgtacagagcgccggcaggtggcgcccagcggcgagcttgttccagcttggtttgggccaggtggactggaaggggcggaggtaaccagaagcggctagtggcggctgcctgcgtccccaaccccctccgcgcagcgctcgcgacacgcgtgccaggagtgggagcgagcggcggggccagctgcgttctgagcctgggcgcagctgccatctgctctgggaagcaccagggtgtccccgccgccct

SEQ ID NO: 36966 - DNA, 2300 bp, Homo sapien
tgaggcttaaggaaagaagtcatctccataacatgaatgtaaggtgaagcagcaagggctgatgtcaaagctgcagcaagttctccagaagatctggctaagatcattgatgaaggtagctacacgaaacaacacattttcaatacggatgaaacagccttatattggaagaagatgctaccaaggacttttacagctacaaagaagtcaatacctggtttcaaagcttcaaaggacaaactgactctcttgttaggggcaaaagtagctggtgactttacattgaagccaaagctcatttaccattctgaaaattttaaagcccttaagaattatgctaaatatattccacctgtgctctataaatggaacaacaaaacttgaatgacagtacatctgtttacagcatggtttattgaatatttttaagcccactattaagacttactgctcaaaaaatgtttctttctaaatattattgcttaatattggttaataatatactttgtcactcaacagttgatggagatgtacgaagagattaatgttgttttcatgcctggcaaaacaacattcatcttgtagcccatggataaaggagtaattttgactttcaagccttattatttaagaaataaatagatagctgccattaatagtgattcttctgttggatgtgggcaaagtaaattgaaaaccttctggaaaagattcaccattctagatgccattaagaacatttataattcgtgggaggaagtcaaaacgtcaacattaacaggagtttggaaaaagttgattccaaccctcctgaatgactttgggagttcaggacttcaaagcaggaagtaactgcagatatggtagaaatagcaagagaactagaattagaagtggagcctgaatatgtgagtaaattgctcaatctcataagacttgaatggttgaggagttgcttcttatggacaagcaaagaaaatggttacttgaaatggaatctactcctggtgaagttgttcacagcattgttgaaatgacagcaaaagatttataattatataaacttagttgataaagcaatggcagggtttgagatgattgactccaattttgaaaaaagttataatgtagataaaatgctatcaaccagcattgcatgctacagaaaaatctttcataaaaggaagagtcaattgatgcagcaaacttcattgttgtcccattttaagaaattgacacagctattgcagccttcagcaatcactaccaggatcaatcagcagccatcaacatccaagcaatgccttccaccaccaaaaagattcccattaggtgaagatgatctttagcattttttagaaataaaatatctttttaagttaaggtaggtacattgctctttctagacatcgtgctattgcatacttaacagactacagcatagtgcaaacgtaacttttatatgcattaggaaactgaaaaattcgtgtgactcgttttgttgcaatactcgctttattgcgggggtctggaacctaacctgcaatatctctgcgttatgcccttatagcgccgggagtgggtgccttccgccggctgtacagagcgccggcaggtggcgcccagcggcgagcttgttccagcttggtttgggccaggtggactggaaggggcggaggtaaccagaagcggctagtggcggctgcctgcgtccccaaccccctccgcgcagcgctcgcgacacgcgtgccaggagtgggagcgagcggcggggccagctgcgttctgagcctgggcgcagctgccatctgctctgggaagcaccagggtgtccccgccgccctcagctcgaagtcagccaccatggaggcgcaggcacaaggtgagtggtcgccgatcgccccgagagtcaggtcctggggcgcgcataaaggctcttttcctgcaccacctaacttcgctctcggacagaacagattggtgccgtgttgcacatccagaactccactcccacccgcgcctttggtataatgcctgctgcccaaactcaggatttgctgtgggtctggggatcaataaagtgacaggggatccgtaagtggagaggcccctcctcaggaaatgcgcccgtggaatgctctaccctcttccgcagccagtcgcccctggccttcccaacctcgcggctgcccgaaggacctgttgtgccgggtccggaaagcgtgtttcgctccctttcccttgagggagtggggagggaatgtgactcttttcgcccagcgccgtggactcgcggcttg

SEQ ID NO: 36967 - DNA, 2300 bp, Homo sapien
atgtaatggaacaacatggaaatacaatgaaagtcaagctttaacaggtgctctatggctccaaagcatctttatgtattttctgcatttttatgacctaagtaatttttaatttttcactatcttatttcctataatttgtgctataagtgctcaattctagcacatttaatttgtatattgcaggcaagctaaacttaatatctcctttacttttattttgattttttttgagatggggttttgcttttgttgcccaggctggagtgcaatggtgcaatcttggctcactgcaacctccgcctcccaggttcaagtgattctccagcctcagcctcccaagtagctgggattacaggcatgtagcaccacgcctggctaattttgtatttttagtagagatgaggttttaccatgttggtcaggctggtcttgaactcctgacctcaggtgattctgcccgccgcagcctcccaaagtgttgggattacaggcgtgagccactgcgcctggcctcttttactttcatttgactgaaaataattatctctgtacacagaatttaacatgtgactttttcttgatcctacatgatatgcaaatatcaataattatttagtaaatcatacaagtctagcaaaacattttttatactacattactggtaaaaattaaaatcaacaaaatccagcttagctccttcaatctattgtccaataaacaaatcgagtcattagaattatttaagtcaaaaccacaaaaaccttttactttctcttgagaatcaaggaagacttttctctcacaagaatcagattttgtttcatagcaaggtttagatttgataggctttttgtcctttaagtgctggtagaggtcaataatgttaatatgttaacatgttcttattcctaaggatgaaggaaatcagctaaactcatctcatcttgctatgaccatttcgccggatttctcagcctcagcactatggaatttcaggtaggggaactcattgttgtgattgtagggaactgtgtgttcactgcaggatgctcagcagtatatctggcctctgccaactagatacgagtagtactcatcccgtaagttgtggcaatcagcactgtctcgagacattgcccgtttccaaaattgagccattgacaacacattgaggaagctctgctcaacagacacagagacagctgcatgctcataattttggctgacacttgtgttcacaatgtgttaggcactgtgccaaagattttatgcacattattttatacacatccctaatttataaagaggaaaattgacgttcatagacagaaagtggttgagctgggtttccctgctttttctatactcaggtgaccaataacttccatgtgtccttggcattctcagctttggaagctggtcatgtgtttgtggtcacgtgtttgtaaatagatctctcttaccccatgcatgcaagtatgtatgcagggatagaactgggtataactctacccaaatgagtaaagatggacaatgaaggaaaggactttgaaattctcccatctctagtaagtagctgaaaatcacttatcactataggtttccaacactatacaagatgcctgtgaagacaatagacacagaagactcaaattgcctgaaagggtttagagcactgtaagaacctcccagtatctgatggcctcttgggttgttcctgctgtaatcaggaaactaactccagacctctgtccctgaaggtagacagagcttcggctccttctctcagagggcaaagcagagttcaagatcacactcagatcagccagagtgccctggtcttggcttgaagcccagggtataatcctagttcctggtagggctttgactgtgttgaccttcccagatcttggctgcttcttatttaactggagccaaggactcactcagaagttccagggctaaccgatcccttggcctgcctcacactgaccttgagctgcagcatttacccagcctttcctgagtgaactccagcagtgagctgctattaatcacaccctgttgtaacatcccctgcctccctcttccatttccttttctctggagacactagcgcctgtgctgtttcaggtaatggacacccagatgcctcttttagactctgaaaattggatggggcaacccctcacctctgacgcttagtgggctgttattttataaataacatgtttgtataactgattagtactttatattatattccaccttgggtgaaaaatagactttgcttaaaa

SEQ ID NO: 36968 - DNA, 2300 bp, Homo sapien
ccaacacaggctcttatcccattttggcttctttgcaaatatcttagatgaaaaacagtatctctgtgattctaatttgtgctttccctattgctagtgaggataagtgtcttttcatatttcatctcaccattgcattttcttgtctgtgacttgagtgaaacttttctaattcttgcatattttattcttgctcaacatgtcacgactcagaaacacatatttccatctcctttagcatttattttgctactcagatttcagaaggaaaaaggatttttttcctgggcattgtcagtagtagctatttggaatgctaaagatttgataagagacattgaagaaatgtgaatgttactgaaccgatttgcttaaagtaaagggaagactgtctatacgtctgaccaatgctttttgaatgttcaggcccctgaatctggctgcagtcccagtaggcatgggtccaggcgtgatgtgtttgtggttgcatcatggcatcgctgtctaaccctcgcctttgcattgaagttgtgcaaagattagagaactgtaaaaatctcaggcctgtctgaggaagtctttcttactatctatccctttctttaaacatgccttgaaaaaaaaagctacattttgtcctgctttgtgttcatagtgaatatctttcattgtcaagaaaattttttcctgaactagctctgaaagatgactcagcactttataagatcagtgagcctttaaggaatgacctaagatggaatgtatcctgtccagtgaagctcaaggcatgcacaggtcgtgttcacctcactccctcaggagttgaaggagataagaaactggtcccacagccctcaactctagcttgggtgcctcgcagctactcagctaaccaaagaaatgagtggaaaatcagttctctggtctatttttgatggtgtgagaagaaggaggatgaggaggagaaggagaagaagaagagattacttctcattttaattgaaatgagtgactttttattaatgagcttgaattcagaataatttattaccctggagttttcttataatataataagtgagactgttttcctttttgcttagggcaaaaaatgtaaggaggctgagtgttacatttggaggtttatcttttttttttttttttgagacggagccttgctcttgtcacccaggctggagtgcagtggcccaatctcagctcactgcaaactctgcctccccggttcaagcaattctcctgcctcagcttcctgagtagctgggattacaggcacccaccaccacacctggctaatttttgtacttttagtagagatggggtttcaccatgttggccaggctggtttcaaactcctgacctcaggtgatccacccaccttggcttctcagtggaggtttatcttgtcaggtttggcttccttttcccagttccatgaaatgtgaatttgaatatgtgtttgtgtggtcagggagagtgttgggaaatgagggtgggatacagagagaaggatgatttaaaggtttagatggtctggttatttttagtttttctattcccatttctgcaatagtttttatttttcctcatacactatgggagtttgttcacagaaggaagttcctggagcctatccatcaggaacattaactatatttttgtttgtttttttgcataactatttgtttagtttttccttcccaaatttgtggctgctgtgttcttgtgactttttgtcgggggtgtttttttcttgcttgcagtgttacccacaatgcatctattttgtgtgtattaaacagtccctttcaagagtacaaataatggtttgaaataggaagagtatcccaaatgctttaatcttatatttgaaatgtaggaaattggaggagctgaggatatttgtgacacatattttacatcttctcattgaaagtagagctgttgtttgtctgcatggttttgagtttggtcactgaaatgctaatgacacagcagaaacccttggtgtgtgcataaggccacatgacctcaggtcaggaataaaagcttagggctgagcagctcactctttggttgagaatccagttggctcccctggagtgaagttctacacagaccctggaggaaccaccccatctgtaaggaacctaagtttctgtatttctggctttcattgtagaaaacctgatgtcttctatacttgttcccttgacctacttctaaaacagtttataaacaatttcaataatattcacagtcaagtagagctgtcttttact

SEQ ID NO: 36969 - DNA, 2300 bp, Homo sapien
ctggagtgatcataactcactgcagcttcaaacttctgggctcaagtgatcctcccatctaagcctcccaagtagctgggataaaggcacaaaccacacctggcttgatatttcctttatttagcaccacttaccatcataaaaatggcttccaggtcattatcctaaccacgtttaatacaagccccaatgtccttggcatttatttggttcttagtcatatttaatcttgttgctgaaccagtcttcaaaaaaattatttcatgccttctttctccttgtattagtccattcttgcattgctataaagaactacttaagactaggtaatttataaagaaaaggtatttcattggctgtacaggaagcatggctgcagaaactcacaatcatggtagaaggtgaaggggaagcaggcatcgtcttcacctggcagagcagaagagaaagagagcaaaggggggaagtgctacacaccattaaccagatcccatgagaactcactcactatcacaagaactgcaagggggaagtctgccaccatgatccaatcacctcccaccaggcccctcctccaactttgaggattacagtttgacatgatatttgggtggggtcacagagccaaactatatcactccttaaacctcaaatgcctcctcctctattcacaaacattctagcctcctttcttcccagaggcctagcaagattgcactccacaggccccctttgaagttagacgtggcagtgttacttatttcaccaatgatacgtagacaaaaggtcatatatcacttccagagacaggctttaagagccagagtgccacttttcttttttccaattttggcaaaagagagcaaagaaagcctcctagctccctgagtaaggttagagcaagcagcatcctctagctgatctacaatagacacttagcatgagagagaaataaacctttgatgtgttaaactgctgagatacaggaaataaggaggttgtttgttattataacatcccagcctatactttgcttcctaatttggtgagaaaatagaagcaatcagaagagaacttctacaacctcccatgaccacatgtgcgactgattagtcaccctatactctgtcctcctccaatatttgaatgaattctccatattcctatctaaagcccatcttttatcttgtacaccagatgggaatatttttccttactcaaggccgacattcaaatatttctcttctttgtctcttacataatcaatgtttccctttctactagatccccttcatcagtaaacatacataatatctcctgttttgaaacaatctctccactagttaacagcaccccaaccccatctccaatgtgctgtaatacttgctcctattctcttcggaattatctcactaggttctgcttggcccactacactgaaaactgcttttgtcagggtaaccaataatattgaatttactaagtctggaagtcaaaccttggtcctcacattgacttggttgaccatattccttccttcttgaaatatttttgtacatggcttccaggacacaactatcctacctactaatcctcttcctacctcactggctgttccctcttgatctcacaaagcctaaatgttggggttcaggtcttgggtgtcttttcttcttcattcacaccctcttgccaggtgacctcatccagtttcatggttttacactgtcaactgaagaataacgaggttcataaatttagaaaggagagctttatttttcataaagagtactgagtgtcaagtatgtgccaagcaaggtgtctgccactgacggagcaatgcccaagcagcggacaccaaggccaagaaggcgaaggctggacagaaggtcctgagaaaaccgtgagaatatggaggagggggaggaggaataagaacaggaggaggagggggaggaggaataagaacaggaggaggaggaagaggagggggagagaggaagaggggcaggaggaagaggaagaggagaaagcggaagtgggggaggaggaggaggagttggaaggggaggaggaagagggggagcaggaagaggggcagaaggaagaagaagagggggaggagaaagagatagaagagtaagaggagggggaagaaagacaaggggaaggggaggaggaggaggacggggaggagcttcgccgcggcctgctccgcccagccggggtcggtggccgcatggcttcggtctcctctgcgaccttctcgggccacggggctcggtccctactgcagttcc

SEQ ID NO: 36970 - DNA, 2300 bp, Homo sapien
tcatgttgttgcaaatggtttcctactttttaaaagatgaatagttattccattgtgcatatataccacattttctttatctattcatccaataatgaacacttaggttaattttatattttggctattgtgaatgatgcttcaatgaacatggaataggcacaactttctttttaaattcatgtttgcatgacatacattttaccaccctttaattttaaactattcttgtctttacatctaatgtatgtctcttttaagcaacttatagttgggccttggtttttaatctaatctggtgaactttatctttgattgggcagtttatttcatttacatataatgcagtaattgctacattgtttataaatatgctaccttgtaattttttgtaattttttatttgtttcagattctctctagtctcttcccctttttttcttccttttttttggattgagtacatgttagtattttatttcatctcctctactggcttctggtttatcatcatatttttttgttttcatttacttttgtttgttttattattatacttaaagttctggggtacatgtgcagaacgtgcagttttgttacataggtatacacgtgccatggtggtttgctgcccatcaacccgtcacctacgttaggtatttctcctaatgttatccctcccctagctccccacccctacaggccccagtgtgtgatgttcccctcactatgtccatgtgttctcattgttcaactcccacttacgagtgagaacatgtggtgtttggttttctgttcttgtgatagtttgcagagaatgatggtttccagcttcatccatgtccctgcaaaggacatgaactcatccttttttgtggctgcatagtactccatggtgtatatgtgccatattttctttatccaatgtattattgatggacatttgggttggttccaagtctttactattgtgaatagtgctgcagtaaacatacatgtgcatgtgtctttatagtagaatgatttataatccttagggtgtatatccagtaatgggattgctgggtcaaatggtatttctagttctagatccttgaggaactgccacactgtcttccacaatagttgaactaatttacactcccaccaacagtgtaaaagcattcctgtttctccacattctctccagcatctgttgtttcctgactttttaatgatcgccatgctaactggcatgagatggtatcgcattgtggttttaatttgcatttctctaatgaccagtgatgatgagcattttttcatatgtctgttggctgcataaatgtcttattttgagaagtgtctgttcatatcctttgtccactttttgatggggtcgtttgttttttcttgtaaatttgtttaagttccttgtagattctggatattagccctttgtcagatgagtagattgcaaaaattttctcccattctgtaggttgcctattcactctgatgatattttcctttgctgtgcagaagctctgtagtttaattagatcctatttgtcaattctggcttttgttgccatgcttttggtgttttagacatgaagtctttgcccatgcccatgtcctgaatggtattgcccaggttttcttctaggatttttatggtctatctattttgttgagcttttcaaaaaaccagctcctggattcattgatttttgggagggtttttcgtgtctctgtctccttcagttctgctctgatcttagttatttcttgtcttctgttagatttgttttcattttattagcagttgctttacaatttacaacatgaatttttaatctatcagagtctacccccagtatcatactaatttatgtatatggtaagaatcttacaatagtatacttccattttctcccttcccatttttgtattattgtttgctatgtatattttattttttttttctttttttttatttatttattttttttttctttatttatttatttatttatttatttattttttattttttatttttattgatcattcttgggtgtttctcgcagagggggatttggcagggtcataggacaatagtggagggaaggtcagcagataaacaagtgaacaaaggtctctggttttcctaggcagaggaccctgcggccttccgcagtgtttgtgtccctgggtacttaagattagggagtggtgatgactcttaacgagcatgctgccttcaagcatctgtttaacaaagcacatcttgcaccgcccttaatccatttaaccct

SEQ ID NO: 36971 - DNA, 2300 bp, Homo sapien
tgaaaggagtgccaaatgaagtattaagaggtgaaatttcatgacattggtacactactttcagaaggctgggccaaaaagaagaacctatccacagagacatgttgttaacacatattcactgcaccattccttcaagtttttggtgagtttgaaatatctcaaagttatttataaggcatatgtatgtaacatgtaagcaggcatatttctccttattattctttcaacttttattttaggttcaggaatacatgtgcaggtttgttatgcaggtaaaatcatgtctcaggaatttgtggtacagatttcttgtcaccccagatactaagcctttttttttttttgaaagggttttgctctgttgcccaagttggagtgcaatggtgggatctcggctcactactctctgcctcccaggttcaaatgatcctcctacctcacctcccgagtagctgggaccacagatgcacaccaccacatccagctaatttttgcattttttgtagagacagggttttgccatgctgcccaggctagtcttgaactcctaggctcaaataatccacccacctcagcctctcaaagtgctgggattataggcgagagccatcacacccagctaggcatatttctatctcatcatatttaatgactaaatgagattctattatatcataacctatttaacaaatctctggttttcaacatttcgttgttccaatttttaactaatataaacaagtttcaaagacaattcttgtagttgtttgcatgtattcttcattatttatttaggattaattcccagaagcaactgctcaatcaagtttatgaacatttttaaggttttcagcactaacacctgcaacccaattattggattcagccctgaatattttctgtaaccctcaagccccaaaacctgttaattctctttaaaattactacaattgtcatatgataagacttctaacactggtattttatttcccaagttgttataattagtgctttcactcgttgacaacacttagtaaatttttttgtatacccatggacatttcaactctatacaaaactgctttcattgtaaccatagagaacctaggaactgtccatcatcttttcttgtcctgttcatctgctctaaaaatgtctatctttattattggcagcaacacaactttggtcattgtccccaacaaaagtggcactaccctggcctgaccagaggttagacccacctagcagtgtactgcagccttgtggcactttccatgacaaccactctggaggacaaggagtctgggtgctgccatggtctcgaccactatctccaggaagtcatcttccaacacttactagttgatacacacatcactacatcacacttattaagcagtattacgaagtgctattaagtgttattagcactattagtgttactaagcgctgtgagagcaaaccctagccaaacactttcagagctgttcctcacaggtttggtctatttaacaagccaagctcatcgttatctaacacattgagatgcagccagctccctttacttgctctgtctctcacacatacactcattttccccacactaaagcatgtgcagaatattctccaggacctcactctggctaagtgaccaaaaaggaaaggaaagttaagaaaaatatacatagccattttatgtagtatattttttgccagtagaagtaaaatcgttgacccaagaatccaaacaaattatgttttagctggatccctttcaaataataataataaagaaagtttcaaataactggaatgcaagttgccatttatggaagtgttgagataaactcatacccatttcaggcttctcacaagttgtaggatcaatattttctgttaccggttctaatgtggtatccaagcccaaatcacgttgactaatagcagaaagttcatccaaagaaaacagataatgagttatattaaaacctttcatccctttccagaagcaatttttttcctcagctctcatgggagatcagatttccaacccctctttgcagtggttttggctgctcctctcacactgaaagcacaggggccttggtccttccattgattcataagtacaacaccctacttcttggatacagagccatcgcggaatgttcgctggagtgaggcagcgtatggagcacatgggacatgcagacccaggtaaggtgtacaggaggccgggatcacctgcaatgactgtaacctcaggcaaatctcacaacttttcacagccatgg

SEQ ID NO: 36972 - DNA, 2300 bp, Homo sapien
ctgttagatttttttttttcagtgatgatctcaggttttgcctcaggcgtttggacgcgcccgctaattgcccgtgtggcaaacatgagttgcacctgcaggcatttgaattcagaaaaacgtgcagccctcacggaaagttgtgacggtcgagcttgagcctggcgggccgcggagcgttcacctgcggccgggaggtactggcccagggcgctcggggcgggaggtggcaggcgaccggcgcgcgtcaggctcgtcacccgctggattgcggggccggagcggggacggggtctgggtcctggcccgccctcgtgcagccgatcggaggccccgaaccccgcgccgacccagccatccgccctgaggccgacaggggagctggggttcaccgacccccgcggccccgccgtcgggcgcggaccccatccagccccacctggccccgccgagtgtgtgctttgcctggggttaagtttcagaagccaagatggaacgattcgggtttctattcacaaggttattgaaggcatggcggtggggaccgcgcaaaagagatgagagtgtggggggaaaggggtttctgttctaataagggcttagcacgctggccgcaggtcctccgcgccgaccgggctccttcccgctctcccccgggccaaaccccgccagggtcccgtctttcccagtcgcgtcctttcctcttctccccgccccgcgccgggcttgtgtggacagagaacggagtgtcaaagggacgccctgggccgatccccaggaagctatgaatccctccgtgacggaggggtctggggatcgatagacggccctttctcagaggctctctccactactgaccaagcggccctgccaacgtgtggtttccggctggaccccaacccagccgccgccagtctcccggcgcccctggctgggtctcgctcagtccctgccctcgcagacgcacagcggggtggccagttcaaaagtcctacataacttggagagaaccagcagctagaaaacctgttttaaacacacagcttgagttttatacaacccacgttgtccaaggcacgaactgttggacacgaattcatactttagaaaccaaatctaatttccaagcgccaatcttcacctcccggactctaactctgcggctgcgagtgcatacaccagggggactggaggagactggaggcaattatctggataatccaagcccgaaaaactcgaacttgaaaatatacgattatgtcctgaaatgcccgcgtcattgatctagtctttcctaccatcagagctgacacagctccagtccacgggcttctccgcggggtctaggatccacagtccctgggggctgaagacccaatggaagtaactgatggatcgcaaattggaaatcgtaacgtggccgacagacctgatcaggaaaactcgcgtccttatatgaaacagccccgaggccgcgaaagtagcctcaggagttgtcagattcaaaagcaattttgatttaaggttttcaaaagccccagagggcaaatgtgaccactcgggtcagccagtcagcagtttggatccagacaggggaccaccgagtggggcggccgaggagccgcggcgcctcccgacgtcacacgcgcctgctcgcacttagccacgcgcttggggttattctttacactcaggactgaaacttcgcccgcgagaccgcggggcgcggaggagggccgaaacccaaggtccaggtccagggcccgcccccgcgcgcccgcgttggcgcccgcgcgctccctccgcaggggttagcaagattgcgctcattctcgccccggctgctccccacccgctcgctgctctggggtaccaggtccgcggccgcgttcccacgcctcggctggagccttgcggcgggcattggcgagcgcggccccgccccctggcccagccaatcgcgagccacgccgaccagcgagggggaggtgccgggcggaaggcctgggccggtgcgcgggggcgggtgaggtggccccacccgctcgaggggggggcgtggccggcgccggctcttgcggccgagcagagttgcggcgtgggaaagagccgctaggagcagaccgcgccgccgccggagccgcgcctgcccaggcccggggagggaggaggcgggcgtcagggtgctgcgccccgctcggcgtccgagcttccggccgggctgtgccccgcgcggtcttcgccgggatgaagcgcccctgcgaggagacgacctccgagagcgacatggacgagaccat

SEQ ID NO: 36973 - DNA, 2300 bp, Homo sapien
tgtttcaaaacttcagttagtcatatattgcaacaggaaaaaattgacaaacttgatgttttgcatactaatcttccaaaaatatgccctaaatatgccactgataggaaaattaaaactcattttattactaggtgaatgttttactttgaaaatgaaactgtaggtgtgtctcagactttaggctaagcttaaatctccagaagctgcaatgcaccttggatttactaatgaaaatatatttttatattgaaggttcaatcaaagtattatttggtcacataatttttacaatcctttctagtttgtatctgtttctcttcataattcatggatactatgcttctttgtgttctcaaattccccaggttcctgttatttgttctctttcattttagaaatgctgcacacaccaggttgctattacctcaccttctcacttctggatcttatttctgaattacctgtccccctcattttcaccccttctttacgggtttcacctttcacgtgatagcttctgtttttcagacctcatttttaaagacggcacaacaacactttaatgatcagatacttaaacctttgctttcgtgtaaatatctttgctcttgcagattttgtgctttgctttgtatgtattagaataacaatatgaaagaaaaccagttttccaaaggtaggaagaatttccctctttgagtgacagctgcagataaataattaaggtgcttctggggatgccaattagaagcaattatcatttgacccgccttggctctaaaatgcctcggtaatctccctctgtcacaggaaagtggaggtctggcttctgtgattacgacgccgatctcttccagacttgagaacaagcagtcaaagaaatgatgccctttccgatgcttacatctgtcactcactcttgcgttagccaagtcacacacggtcaacctgcaaagttcaacctacgtagccttgacatcgcaggttgctttaattcctccaaaaatcaagttgtgattttggtatctctaaaaatcaaaaatcaaattgtttttattttctcctgatctattttgaaagtgcccccaaatacggtttcagtggctgggacatcgcctgtcgcccagacgctgccgttcgcgcgtccaactgtgacagccaggaccctccctcgccaactcctgcgctctgcctttcagtggcgtctcccatcctggctactccacccctacggtgaaaatccacatcccttgccccatcccaactcacgctctgcgagcgcccaccactcaaactttctcaggccaaactttccctctctacctagatgctgcggagaccagcctcgggatttccagggagccacgcattcacaaagctaccccaagctcccgagctgcgggccgctcccgcggagcccgcgctcaccccgagtaattgttctcgctccccacgtcgatggtctcgtccatgtcgctctcggaggtcgtctcctcgcaggggcgcttcatcccggcgaagaccgcgcggggcacagcccggccggaagctcggacgccgagcggggcgcagcaccctgacgcccgcctcctccctccccgggcctgggcaggcgcggctccggcggcggcgcggtctgctcctagcggctctttcccacgccgcaactctgctcggccgcaagagccggcgccggccacgcccccccctcgagcgggtggggccacctcacccgcccccgcgcaccggcccaggccttccgcccggcacctccccctcgctggtcggcgtggctcgcgattggctgggccagggggcggggccgcgctcgccaatgcccgccgcaaggctccagccgaggcgtgggaacgcggccgcggacctggtaccccagagcagcgagcgggtggggagcagccggggcgagaatgagcgcaatcttgctaacccctgcggagggagcgcgcgggcgccaacgcgggcgcgcgggggcgggccctggacctggaccttgggtttcggccctcctccgcgccccgcggtctcgcgggcgaagtttcagtcctgagtgtaaagaataaccccaagcgcgtggctaagtgcgagcaggcgcgtgtgacgtcgggaggcgccgcggctcctcggccgccccactcggtggtcccctgtctggatccaaactgctgactggctgacccgagtggtcacatttgccctctggggcttttgaaaaccttaaatcaaaattgcttttgaatctgacaactcctgaggctactttcgcggcctcggggctg

SEQ ID NO: 36974 - DNA, 2300 bp, Homo sapien
cgcctgtaatcccagcactttgggaggccaagacaggaggatcacgaggtcaggagatcgagatcatcctggctaacacggtgaagccccgtctctacaaaaaatacaaaaaaaaaatagccgggcctggtggcgggcgcctgtagtcccagctactcgggaggctgaggcatgagaatggcatgaacccgggaggcggagcttgcagtgagccaagatcgcgccactgcactccagcctgggcgacagagagagactccgtctcaaattaaaaaaaaaaaaaaaaaaatccaacagctcagtaagtggcaaaggttaggatggtttagaactttcaggatcaaaaaaacccttaatgtctatataacactatttttctttttttgactccaacattgccatattttcctttgaggaactcccagaattctactttaccctgaatgtgggaattactaatgataagtaggtgcatttttgaggggcctatatggtttatatagtgggaattgatactctggatgtaacacatttaccatatttgtgtaaatctcttagagaaaatttaaagttagccaaaaaaacattaactaaatgggttattaaaacacaataaactagctatgtccaaccatacatctcagaaaagatctcatatttatagagatgagagtaggaatagctccaatataggcaaataatctccaaagtacataatcttaatgtacagaaaaactaaaaattaactctaagcatgatactgaataagtattattcctcataaaactatcttcctcttttattagtcaaacaaaatcaaggttaaacaaaggcttaactgactgcttgtaaacacatccaaattatttttaaaaactgaaaaatacaattttagaatcacagaactttatgttatttgattgattataaattacattacctgtaaatagagatggcgtattttaagccttagattaaataaacttttaaaacggtcaatttttaatgattaaaaaaccccaacaagcgaatgaaaagtacataaaacttatgatttaaaaagaaaaaaaaaactataaagaaaaaaaaaaactatgaaaaaaaaacccaaccagcaagtgaaaactacacaaaactcttgacttctaaattgcatgaaggatacgaatgtcaagaaaaacaagacttccctgaccgggaatcgaacccgggccgcggcggtgagagcgccgaatcctaaccactagaccaccagggaacttgcacaacgcttcttcctaaatatatttgttgtgttaaaaatctgcacttaattcctctaaccagtaggggatagagtattgcgtctaagccacacccactttgttcttgttctgagtcctggtccctgaatctatttcctgaaattgaagcaaattctcggaagcgccgggatggccccttaaggaaaaaacctataccctccaaatctaatcctcttcctattgccatgctggaaaatatatcctggaaattctcattctttacgtaacatgtaaatctctttaccaagacaagtgttgtctggacgcgtactgtccagagccttgtaatttgctttattattttattaaccattttagctgctctttccaaatctaagttctgtccctctccgtctttcttcgttctctgtcacgcggatgttaagtccctctaaacattttactaaatctaacgatagattgccaccagctgagagcgtttctcggcgaagagccggagcgacgcgctgtcctgggtgcagagcgcgtgctcaacaaatatgggtgatgaagggtcacgtagcctcatagcacgcggttctattttatttatttggcacacgcaggctaacgaggctgagagagctgtgggtggtatgcctagtgaaggatcaggacatctgcccaaggctccaagcaagtccttcaaacccactgtgtttgttatcctcctactttccaaactgtgttattatctgggcaattgcttcacttctccgcgttatatactagacacggccaggaaatgatgcaattaccaaaggagtcaagacaccttacagcccagccttaattcagaaaccctcataaagtagatgcagagggcagtaagatataactcaactttgaaaatgtcagccgttatagttgaagaaatctgacccaagagacttcgctccgctgcaagatggaaggaagcttaagtaagacataaatttgtaatgaacttgctcacaacatccgccgccactgtgacttgcagtcatcatccattac

SEQ ID NO: 36975 - DNA, 2300 bp, Homo sapien
ccagaagactgacgttttataattgatggtcacaactttaaaaattcatactcagttataggtttttgtctaataaaaacatcactgcttaatttatttacaaaacatggagtccatagagagaaaaacaacaggggcctcttgatagtaaaaggatgagaaacagggaaaacttgtaagtcaatggacacttccttcagaaactacattcaaaacttaaaaattttgttaaagagtaagcaactgccaaattctcctaagtgacttcaacgtgttacttatacatcagatatgtacatacatattcctataatcaagtaattctaagtttgggaaaatatcataaataataatagttatcttttgaaaataaagtggggctctagatcaaccagtgtcaggaagcagccaagtcacaccccactgggtgcttcctggacaagcgcagtgcagctcccacagggcctcacacccaaccttcaatttgcttaaaagaactatctcaaaaaatcttagctatttagtcacaatttgtccttgccagggaacatgtttttcttttgcctgattttcaataaccttagattgcaaaatcataaaagcactcatcaaagaactgtgagagcagctcagcttccctggagatctcaaaccatgttcctttgatacaatgcaatcagctctttatactttaggaacctaattttcccttactaaatgctaaacaatttacaaataacacaatggctacagaaaaaaaaaatccaacatctttacattcaaatcccaaagatataaacctgacgtctaaattaatacgtgcttagtgcaaaactgggcaattattccacatttgcaagacagtataacatgaccacctgctgctgaaatgccaaagccaccactgttaacgctttgctccgccttccagagaggttattacagcttaagctgcgtcaacaacccagaggaggctgctatctagtttatctgtgtggaaggcctgtaacacactgttaacagagtagttgcaggcccttccttgggatatttttctgcgtataagagtgaatgaactccacggccagatcctcctagtcatgttgcagtgctggtcatgggaccgcagagggaacagcacccaactggggatggggagctcacaggcacaggccccgcagctgatgcaaaccttccccctccaaggttctctcgagtctctgccaagagtcggctggagggcccaactgctatgttcttattgctgtaatgactgcaatttggcagcatccaggatggtgtaccgggaacgggagggggaaggagatggtgggcccctctgttaaacgcaacgccagaagggacacaggatgaatttattgtggccatcggtcctgagctggaaggaaagtcaaagggctttaaagctggggaaaagctctaactcctgctctgctgtcaaagccttacttcccacgaagagtaggggccaggcgggccaactgtaagggggaagcggcccggggtgaggtaagaggaccctcctaggtgccgctgccaggcggcggttcgctggggcagcaaggcgcccgcactcgggaggcgccacaaagggccgaggcctgcggaggccgcacgcgcagctctccggggcggagccgccgggatcgcggcagcggaggctgcagcagccgcgggtagccggggtgcccagcctcccagctcggaggtcgcggggggcggggaggatgccgcaactgcagtccgagcggcagagcccggcgcgagctcccaggcccccgcaaccgctgtgaggcgcagcgcgcgccactggccgggaggagctagaggcgggcgtctgcacagcgtcgcgccacccgtgactgcccgccttcagccgggcccgggaccccgtagcggcccatgccctgacggggggcgcagctgcggggctggcgaggcgtcgcgcgtgggaagaggcctaagacaccccgactgcggcggctgcgcacacccgatccggacgcggggccccgcgggcgcgcgcctcggagctcccgcctcctcctcttgctcctcctcggcgtacggtcctcccctgacccctccttccacccgccgagaggatgcgctccccggcgcccagcagcagaggccaccgctcccagaaatgcatgcgaccgatccccttctcccggaccccaggagccggcgcccccgccctgtaggtaggtggtgaggcggggcccagccctcgccgccgcccgccgctgatgctgccgccgagaggccgcgagcag

SEQ ID NO: 36976 - DNA, 2300 bp, Homo sapien
ccttccatgtaccttggggatgagaaaattagttttatctcatggaccagctctgatggatttggtaatggctctgcaaatgctgccgctgggttcagcatgagcaattgatggcctctgacaaggtgcagtgaagggggtgggctgcacatagccagctaggattaagtccaagctccttagagcagcatacaaggctttccgtgacccagatcctgcccatgtcttcatcctcagctcactttaccctggaacagaagggaacaattttgtcttcttgcttttgttcaattgaaacctgcttgctcgtaccctttacctgggaaatgcaattttttttttttttttttttagacggagttttgctcttgttgcccaggctggagtgcaatggagtggtctcggctcactgcaacctccgcctcccaggttcaaatgattctcctgcctcagcctcccaagtgctgggattacaggcacctgccaccacgcccggctaatttttgtatttttagagagatggggtttcactatgttggccaggctggtcccgaactcctgacctcaggtgatccacccacctcggcctcccaaagtgctgggattacaggtgtgagcccctgcgcctggccggaaatccattcttaacctacaaccttagtgtgtgctcaggatacctggggtgggccttgcatagtgttaagtgttatttgtttttaattggcaaatagaaattatatatatgtttttttaatgatattttgaaaatatacattagaaaatggctaaatttagctaattaagtattcctgaggtctatttttcagcagtacatatcacattgtcttgaaatcctaagtgtctctcctgaaagacaatatatactgttagagcaaatatcatgtctttatctttgacctctgggacttatcacactccctttcatgtagtatgtattgtggattaatttgtttattgaattgaaatgaattagtaaataattttgattgtgaatacactttgctttatttatttatatttactaatttttttttgagacagagtctccctttgttacccaggctggagtgcggtggtgccatcttggctcactgcaacctctgcctcctgagttcaagcgattctcgcgcctcaacctccggagtagctgggactgcaggcgtgcaccaccatgcctgtctaatttttggtatttttggtagagatgtggtttcaccctgttggccaggccggtctcaaactaccaatctcaagtgttctgcctgcctcggcctcccaaagtgctgggattacaggtgtgagccaccgcacagcctgctttttttgatttaaatttgataggtgaacaaactattgcttcagggtgaaaggacaaattttaggaatgttagtgctctgcagaaatttagactggtgaatcactgaataagtagacaattggaaatttttgagcaggggagtggcatgataaaagtggtatttgaggaagcttgatctggagacaacctttttttatattataggcttaagccactgctggcaagcgtgggtgagggtcgcaggggtggagaagagggagacgcaagggtttaaagccatgctgaggaacagcttcctgtgtctttgtactttcatttccacatttgctcaagtgggatgtacttgctggcatgtttccgaaaataaaatagagtgctgaagttatttttatttttttaaaaaaacattcttgtaaaacacctaagtgagccattttacataattatctgagacatatgccttattaattgcttgggaagagtgattatgagttcaatttttttttaaataattagcatctacatagttaggctacaatcttccaaagtcagtgaaggtttttattttggcatgttttaaaatagttgttagttgtgaggaaaatactgcagtttggttttccatcaggttttgctttatagtttaacatctccattctgattgtagtttctcccatggacatttgcatttcatatttgactcatgtgactgtttcctggttaaagtttatttttcatttgttttagtccatgtagttctactccattttatttttcacattggccagtgtaaacttttaagtttacagttgctttgttatcttttcttacagggttacgactcactgattaaaaagagggactttttcaaatactttgcacttttgattgtgtattatggataccaaggaagagaagaaggaacggaaacaaagttattttgctcggtaagcattcatt

SEQ ID NO: 36977 - DNA, 2300 bp, Homo sapien
attgttttctgtgtgtttttgtttttttgttttcactaagaacaaattcagcttttactgagcctctggagaagggactatcttgataaccagtgagttcctgtggtcataggagaattcataccagttttagataataggaaaaatatgttattgatgtgcatttataaaatttgcaaacaagaataaataatgcttgacataaagaaattttttaaaagacagctttattgagatgtgattcacataacatacagttcacccaattacagtgtaaaatccagtgatttttagtttcttcacatagttgtgcaaccatcaccacaatccattttaaaacatttttattacctaaaaagaaactccataaccattagtagttactccccatttcacactctcccaccctattctttccccttccctgccaccctcatctccaggaggcaatcacttacctactttctgtctttctgtatttgcctattctagacaatttattattccttctatctaactgtaagtatatgtcctttgaccaacatctcccccatccttctctttcccctaaccacctacacctctttttttttttttttttttttttgagacagagttttgctcttgtcacccaggctggagtgcaatggtgcgatctctgctcactgcatcctctgcctcctgggttcaagcgattcccctgtctcagcctcctgagtagctgggactacaggtgtgtaccacctcatccggctaattttatatttttagtagagacggggtttcaccattttggccaggctggtctcaaactcctgacctcaggtgatccacctgccttggcctcccaaagtgttgggattacaggccagaaccaccacacccggcccacccatacctcttagtcatcaccattctactctctacttctaggggatcagcttctttagattgcacatatgagtgagatcatgcagtatttatctttgtgtgtttggcttatttcacttaacataatgttctccaggttcatccatgttattgcaaatgacaggattgcattctttttttatggctgaataatttgtgtatatatagcacattttctttattcatctattgatagatgcttaagttgttttcatagcttggctattgtgaataatgctgcaaataaacatgcaagtgcagatacctgtttgagatatgatttcattttctttggatatatacccagtaatgagattgctgaatctacaaaactttttactgagataatcactagactcattaaaagtaccaaaataaattatttgcctaaaggaagttatctgtatcctgctgttcatggtagataatatccgtatggccattaaggtctcttttataatttgagcaagcttcagacttcaaagacttcaccaagctacgactttttgctttaatctccatagttcagctatattcactctggctacaaaagtttcatgttcctatttactttgacttttgttggatatgggctttctaaatattttaaagaaaaatattgggactattctttggcactgtaactctgaaacagctgctcccttagcacagaaccatgcacttgtcagacacatggtgaagacttgcagagtgaattgtaaagccctgtattctcgatcgggtaagcacttgggcagcccctcccattttgcagacagagaactagaaaatctaggaaatctgagacgtgcatgtgagaaccaggatcactccacaactgtgctgttgcagcagctgtgatagaaccaggctcagctggttgcctcagtgagccacatctgttttctctgcctcaccacctagcattgcatttcttcagcctgtttttctggtcctcacaaaggggatgtaattgtcacataggatactgtggttcacaaagtccatggagtggccatctgagttaattaaagctctgtggtagttgctgaaagcatttctgcctgaagtgattctgtcctgttgctttctcctgcagggtgtggttggcggtgttatgatagtgactcctaacaacatcatgtttgaccctcataaatctgatcctctggttattgaaaatgggtgtgaggagtatggtctcatctgccccatggaagaggttgtttccattgcgctctacaatgacatttctcacatgaagatcaaagatgccttgccatcgtaagacatttatttgtttaccaggaaaaaaggggtgttgagagagctaaatgtagcttaaaaatgagggcatttgcatgattgag

SEQ ID NO: 36978 - DNA, 2300 bp, Homo sapien
cgttttgtagctccggctgccacagtgagtaagaaggtaacaactgaaaggattgttgatcatcattaggtgccaggctaagtctagaaaacattaattaacaaactagccagttgacagcattatgtatgcttggcaactgcactgcagaaaaagcagatggtgaaattaatctcaagtggggaatggacagtttggattaggtaaaagaagaaaggggtagacaaggtaatctagaaagctaattagagtgcagttgaaggtatttttgtgggggtcaagctaggtagagaaggtgaagaaagttttgcttattaatcaagtatgtggaaagttgggtttctttgttgcaggacttcttacaggctttaatatgccaaattcagttttgagttccaatagggagattatgctacatttcactaacttgtttgactctaggatggaagcatttttgacatctcctgggatgctgatgttaggcagaacattttgtgtttgcaagttcctgcagaacagagattctttcacagttgtatttcagaatatagcacttaggggctcaatgaatgcttattaaattgaaatgaattataaattatgaaggctttttaaagcatttgttggagccaaccaattacataggcttttattttctattggaaaaagcatgaacctttcatgcagatgatttataaaatcactttgggaagacagtcttttggaacttcagaacttcctggtactttgttgctttattgtcataaccatttatgtcaaagccaaaatagcagataaagttttatctgaagatgatctgacctttttagaaaatacaattatttctgaaattgaaatgttattctttaaaaggtttttatatctctgcatttcaacccagtaatagtactactagtagtagtggtaagtggatgggtttactcaagatatttccagtcatatttttttcttacacatatttgaaagtattactatttttatttattttcaacttttattttaagttcaagggtacatgtgcaggatgtgcaggtttgttacataggtgcatgccatggtggtttgctgctctctagtcattttttttaaatgtatttcttgatcatttattttacacttgggagaacatgtttaatcaatattttcatgtaattccgatctgggaagtaaagcatctgttattaaggaaaaataattgactgcatcccaggacaatatgtttcagctgataaacgagctgcaccattgctataaagtaaagcgatattgttatgaaatatttacttaagaaatgtaagtactatacataagagctttttagataagatttacttttctatacatttttaaattataagatggagcaactgccgtatacccacaataatagtggaagcttcctcttgcatctcctttgggagtagagggctgtctatgattagaagcatcagatcctaagccatgaaacccagaatcagggttcaaggtcagtgactttatatggagcagttaagtgagtagctactaagtcaacgagcttttcaaaattaatgtagttgttttctacactatttgataaaaaggaaaatgtttgcacatttaaggaattttagacattggtactaaaatatttcctctcctttatcctttccttcatgaaagtcagaaacattattatttcatatttagaaatcttatgggtaacatcttcatgttcatgtataacttccaattccatcatgtgcttccagtaggatatgcaactctcatggttcattctttctccatttcctttagttgacctatgttttattttgaaatcaatttcttgattttatttttttattctgaaatcatttgaacataaatttaagttgtgatatatttatgtattggtttttggttgagtttctgttttgttttttgcctttcctccattttgtttttggttttatttttaacattccatgtgcacccaccatttctcccccaacagtgacctacctcaggatctttgtcctctgtacaggcctggagaatgggaagacctggcttcagaaaaggatatcaacccattcagtaagttcaaatctatcaacaaggaaaaacgacagcagaatggagagaaaattatgacttcggattccagaccaatagtacctttggagaagtccacaggacatacacctacaaagccctcaggcagctctgtgtcagagaaattaaagaaactggactcctctagggagacatcccatggttctcccacagtgactaag

SEQ ID NO: 36979 - DNA, 2300 bp, Homo sapien
caaacagttatgttttggaaacactgacctgtagggtaagttttaagctccttcgtggcatcagggctcttctttttctctgctcctcctaccttttctgtctcatctaccttcctcatcactgctttccttgctgtctcttctccagccaatgtgaacccagaatccatctctgcattcctgctgtgccctgtccctggaacatcttctcacaccctatccttgctctcaaactgaagcaccatctcctctgtgaataagctatctcagaaccccccaggtcaccccaacctcctttgagtgtctgctgtagattttggcatctgtatcctataaaccaaaaacaatgcctgagacagatctcaatcaatttagaggtttattttgctaaggttgaggatgcatctggttagggagggaaaaagagacacaagccacagtaggatctgtgtcctgcactttttccaaagagggttttgagggcttcagtatttaaagggggaaaagtgggctggagaggaaggagaaaagaggagggtagaaaaaatgagacaaacggttactttcttgtgagtctttgattagtgtgcactgaatccaaatgttgcatgtgcaaaggagagggtagaggaaccctcaatcatgtatgccttgtgcgcagtaaatctgcactttacataagatgaagtaaacagagtcgtggaagaagtccagtatgcattggtctggaggtgagcagtaaggtcaatttctagtctgctcttgtttccgacttgtgaaaataagctgttaatttacattgtccaggtgagggagaccacctggggagacagctgtttagaaacaaaaggaaagatggtttttgtttgtgtggctcagtttcaaagcttaattttccctttttttgtagtgagtttgtgatcccaagattttattttccttttacaatcacatggaatggcacccatttatttagaattgtttctctactgtctcctcacctgctggagactgtgagcagctttatgtctctgtgcctggcaaagcacctggcacccaccatcatataggaaataataaatgtccgctgtcctggagtcccaggggcccagaggagagtgttgtcttgctggcattctgtcccaggttgtgctcaggctgttgcattgagagtcagttctgctggccgtggactggtctctaagtatctgctagagtcttctttataacccccagtgtgagcaatacaatacactctgatccccgcagctgtgcccaagactgaaaggccacttcggatctggaagaatcacagaaatatcactgaaaattgatccagtgctgatctgtatttctttctaacctcctgacatgtgatctgaagtgtagaggaggactcatcctgcttattagtcattaaaactaattccaaaatgtaaaaagataagtattactctgccaactgttttataaaactacatgtaagatgacatctttcacaacctcatgtaaaccagatgttttcccattcttttaagtccctcccaccaacaaacatgacatagtattgaagtgaaatgccgtttgttctaactgtaatgaagcctacctccaccgaaggctccttttcatccttcctttgagattcaagcttataccagggatcacacgtaccattttaaatggagctttagccttaaagaaggtgctgggggcgggggagaaaaaaaaaagaaaaaaaactctgaaaaggcagggctagaaaagctaggttcactggagggacgattaggaaaaaaagtataagaaggaaaagaaaaaaaatgaacaatggggttttatcatagtgttgggaaaccaccgtttcaaaggtgaaagtgtccttttacagtctcacagcgatgcctggcaggaagtgtgtttgctctaaatcctaatttgggtgtgttcctgtagaaatgttgaaacttctcctgagggaaacagaaactcaatcatgcaggaaactagatactgagaaaacagttgtagctcagcgtggctacaagtaactgtggtgtggaagcagagtagagagaaaacttgttcctcattagagagagagccacacttctcactgctcacaatgagaggccaaagattacccttggacatccagattttctattgtgccagacctgacgaagagccttttgtgaaggtatgttggagtgcgtcccgagggctaataaggtgctggtgaattctcagtgatgtacctccgagtttcttttgaaagtcgttctaattagaaaggattg

SEQ ID NO: 36980 - DNA, 2300 bp, Homo sapien
gaatcagcacactcttatctgtagtatccttgcacactgtgaaacctgaacactctcatgctgtgaccttgctcctaaccattcttcattagaaaattgttaaatgtctacctccatgcaaagcactgtgttgcaggattatttaggaatcagaaagaccgaggggttgaggaggatttattatttaggtgcaccggcacagtcagattaacatccgctgagccccgaacaaagggtcaggttaccttttaagcatttcgtgggcagggggcagttggggggagatctgtgcagggggaagcatattacagaagtaagaaaaatgacagttatttaattgagatatgcattacataatttcttacttttcaaggaaaaacatattttatgacttgagtttatctgtctagtgactttgcagctgcacagctagagaaacagggtcttcacaatgcctgggaaagggagagataaggctcactagccacagatagaaaaacaggcagttaatttttaaaggactctacctctttctcctcctcagggggaactgggttttcttacatacaactgagtttttgcttacatattctttaattcctgttccaactgtactaggcattatggaagattcacacacccaatcttgttgccaagaaacataattcctagcaggataaataagtacataaatagctataagatacaaagagacaaatcctacaagagaaatattgaaaacctgttatatgaatttgcaagaggatgtgcttatgtcagtttggctaaagaaaatttcatgaaggaggtagcattggaggggtggcttggaaggtagaatttggagtgaagagatggaaacaagaatatttgagagagaactgtgtgaataaaagcagtgatgtgaaggtgtagtacaggcatggaaattgtgaatactaaaatttggcaaaactctaatgtattgattctgaactctgctttggggtgctgaaaggcagtgaagctattgtagtggttccccaaactacgggccaactacaaaaaggaatgaaaaatgtcttgaatgtatatgtacaacaattcaaaacacatacaaccactttttattacaacataaatccattaaaaatcattactgaattcccaatttgttatgtattttctaaatcagcaaataccaagggtgtaactactatagtgagctagtccaacaaattttttggtgttaaaaaaggagtgctgtatgtcaaaaaggttggtgggttttggagttagacaaaccttgatcttaaactctgtcactattaattagttgtgtgggactgggcaactctgagtttggtccttcatctctagagcggtggttataaaaccaaccttgcgttttttgacaattagagaaatatatggcatgttttagatgctcagcaagtgggaagtatcacaaaacgaaaagctgaggtcaaatcagagtccaccttgaacaccaagctaaggaactggtactttttctttgagcacatagttacagaaggttttgtctgagtgacaggaaaatcaataagtaagttagaaggtgattgcgttggtctaggtgaggcattatgaggcactggcattgaatttctgggatatttcagagtattgactataggactccacatctacttgtatatgaggaatgtgagattaaaaaaaaggtcgctagtttgatctaactgtgctgttaacaacaataaaaagtcaacagagatgtaaaggtcagttttggacattttgagtttaaactcctacaattatcgtggctgaaaaagcagcaaacatgatgtctgttgaaaacaaggctttaggaattttgctcattctttaaaaacctacgaattttaaaaatcaaactttaaaaaactttttgtttttttttttaaaaaaacggcagcgtaatacaatatttggacacgctatactatgggctttgaagaacgcctgtccagaacacccaacaagctccattatgtcaaacgctcccgcgcctctgtgatgtcaccacgacgcgctgggcgctctgcgacttggcagacgtcgtgcgtcattaccaacgaggcgcaggggtcaggacgactctcggcagcgccattgcgcgccctctagtggcagccggttttgaggccggcctccggctttgaagttcctcaccgcgtctccttccctctccccaaagcctggatcaccgcccagcgtcaggcgaggggcgacgtctcgaggtaaaacggaggaggtgcgggacgcggagactgcgc

SEQ ID NO: 36981 - DNA, 2300 bp, Homo sapien
atgtcctctgattttttagtaacaggcggcctataccagaggctttaacgtttgcacaacagctgtctcacagaaggagacaggttctaagaggtctgccctagaagatggaacatggatggaactttggatcagttcccagaagccagactatgaacctccttgctccttacagtacaaaaaaaaaaaaaaaaaaaaaaaaagcaagtctctggatgcagtttgatcaccaaattccaaagtccttattctcctgctgcttcttaaccactcttgtaagctcaagaactttgaacaggtctggctgtgagtccctcaaaggcagtttcactgatgtcacagtagttccacactaactctagtggcctgtgcaaggttaatctctacttctccagaccaggtatccaacaatttagattcatgatgtaaatactctcctgctggtttctgaggtggagatttagtatagatttagtcctgaactgtagcacaaaggagctgggtgaaaaatcagtgacacctgattccatttgggttctccaggccttgtagtctcatttgtctctatatagcatcatattaatccaggcatgaaaatcagcaattctttgatattctctataaagttgccccatcaaaattccatattaattttgctgaagatttgacaagttctggggatggggcatatcaagtactgcacatcatttccccaacatctcattggttttctgtcccaaccttggcctctcttctcaaatagtaaacaacttttcttgtctcaaagtacttttacccccttttctgaagttttggggtcaagagacagctatgcttctcagagtcacttagcacaagtgaacttgagacatattcctaacaaaaacagatctcttgctaacaaaaattctcatgtgattttcttaagaaaaatgtcaagtgccacttattggccccattcaatatgccagatgttatattcaacactttatgaacattattccacttaatccttgtaacaatcctttgcaggaggcagtgtgtttttccatttttaaaagaaaactcaagctcggagaggttaagagcatatacatggtaaatggtggaagtgaggtttgaatctaatattgacaccacagcctatgttcttaatcactaccactgcgcatcaactacgtttctggcacatgccgctggggatatgccagatacatactcttttgcaccttgtacaataccacagagaaatgcaaaataaataatttttaatagggcaaagggctcggtactctcaaaagcagaaatagcccagagggagggcttgagcccgtaattctagcactttgggagactagggtaggagtatcccctgagaccaggagttcaaggttacagtgagctatgattgcgccactgcactcacctgggtgacagagcaagattgtcttaaaaaaaaaaagtcacatatatacatagaatatgcaattaaaatatatttcataaactatctgctatgaaatctgtgccagtgtgagctttctccaagttttaatttatggctggctgtggatttagtcctgagtctaacaaataacacaacctaataattattgcctactttgaggaagatattcttttggtttttgttaagaatagagtgaaccataaaagattatatcagacctcaagagtttattataattgggttataaggcatgtgctctcgaaaagttgttacataaatacgaaaaatatactgttaaatgactggcccaactaaatcagttcccaaagctgtgctggttagacaaacctacaaggaaatggtgaaatttccaaggaaatggtgaaatttcagtccaattttgaagaacaggttttgaagggctgtagagaaagctggaagcacactccaagtggaacgataacttggaaatatactgtcttattatcacaggctgctcctgaaagccacgcgtccccgctcaccagctaccagcgctgggagacccctaaccaccaggcattcacaggtgaggaagcccctcccacagcggccggagtttcggactcggagcgcgagaaacgtcgggatagcgcctgcctcgcagagcttccgcttccggcccttcaggctctgtctctgtggagactgggctttgggagggagaaagagggacctagcgcgggccgcgcaggcgcacggtgggcagctgcaatggcgctgtcgtgtacccttaacaggtatctgctcctcatggcgcaggagcatctggagttccgcctgccggtgagtc

SEQ ID NO: 36982 - DNA, 2300 bp, Homo sapien
ttaagtaattggaaggttggaagtgctagcacataagataggtaagagactgggagaaacatgtttggggagcaagggcagatcaagccctaatttttgacatggtgttaggatgacttttagaattctaatccatcagagaaatggatatacatgcctgaagtttaggggagaatcagctggagatgtaaatttggtatttaaaacctttatactggagaagatcacatggggtatgaatgtagatagaggagaaatctcaggatgtggttgtggggtactctaaaatttagagatcaaaaagaaaaggaagaaccagaaaaggagactgaggtgctatcaagtacaaagaaaaacaaaagagaatcatatccaattaaatatgttgttttatggaaggaaaaatcatgaaactcaacaaatacttctggtttgatgaataaactgaagcctgaaaattggccataggatttgcaactatgatgctattggtcacgttggccaaaacaattttggtgaagagatagctagaaaagtctgattgtactggatttaacagagaataagcgaagagtatttggagacactgaatttagccaacggtttctagttttgttttgttctgtagaaggacaacagcaaaaggtaggattaagagagggttttcaaaagcctggagatattataagctgtgtgggtgctgatggaaaaaaattggcaaagaaggaaaattcatgaagcagaggagcaaggagaattgctacagaaatgtccttaagaaaggggaaagggcttgatctcgggcacaagtggagtagttggcatctcatccatgggagcaggtggagactgatggatagatggggtggtgaaagcatacagaaagtctccatggatttttttaaattttattttgttgttgaagcaatgtcatcactggagattgagaatggggtaggtaagaaatagaaggcatgacatagctatgtaagagaatgagtaaatgaatgaatggctttaggaaatatcaaaggattgtagcagtacttagagcccacatgagtggtcatgaatttgaattgagatcagacatatacctgtgagtgttgttttcttatgccaatattaatacacagatacaagtgttgaatagattgagattttaacttaagcagagttggaatattgccaggttagtgtgaggataaaagagaatggctataaagttgtggagaaatacagggcagtattatgatgatcgatgcataatggactacaggagggaagataaggcatagagtggggtggcagagctggggggtgtggtgagaggaactgaaaaagataggacagtagtcccagtagcatcgaagaattgttggagggagtaaattcaaaagatagaagatacggttgaagagagacaactaaattgaaagtggcagatcaaaccgaaggtaaaggtatttagtaatgacaccgcctagggtatgaccacatgcatgaataactcaagggtgtagaagatgactggcagagaggaggtctcagaaatgggaggccagatagtagaaggatcacttgtgtgcgtgagatcacaataacataatattgaaatctcaatagagatagtattagagataattataattaaaatcacagcggatctcaaagattggtctgcagactagcaaatgccaatgtccctgacttgttagaattgcaaattttgagtatctcctagatctagtgaatgagaaactgggagctgggccctgcgaacagtagtttaacaagtcccccaggtgattttgatgcacattaaggtttgataactattaatacttctataatagcacagataatagagaaattaacagcttgaagaaataacaaaaagttcagtgagttagcatgaaactatacctgaaagttattgcaaggttaagtgagaggaaccttaaaattaaagggagcagcatttgtaaagaaaagctagaatcatgaaaagacctaagataagatcaaatgaaattacgtagaagtgtaaaattcttaactgttagtatctgaaaatcatgcattccttgctaggaaggcatggcattagtgctgtcggaatcctgataaaacatcacaaacttctgttcgttggtattagggacagtatagagtgagtgcttgaagaactgccttggcttaccaatctctctctccacaacttccaatcatctctagggaacctagcagaaacacttccacagagcaaaagttataatacagaaagtgatgaaaggagg

SEQ ID NO: 36983 - DNA, 2300 bp, Homo sapien
aaatgggagctcttaaaaagaaggcaaaaatcataatcctgttgaggtgtcatcttcctcataatatcaaacctaaaggagactatgcctactttcgaaattccaacacgagcatgcaaaataataaatgatatttaattaaagaattaacatcaaaaggccatctctcagattctaatttttagcatcttgaaaataatgcatatttcaagttcccttccttttgcatccaggccactttatcgcctctatcctacttttgggatgtataacaaatataccactaaaggactccagagacatacaattcacagcattgcaaacttacaaaatgctctaattcatgtaaatttacctaatttacataaattgaaggcaatccagtaatagggattacaaatggaggaaggagatagaagtgcaagtgtcacttgctactctgcaaggctttagcaattgacttacactgaattatttgagcacaaaaattagcaaagcacctatgaatcagggactctttcaaagtgacctcccagaagtttgctgctgtgttaacctgtagtgctagtgtagtccttcagatattctgttaaatataatacatagggcaggcttatgttaaaatcacttgaggcttgtgactttcgactaaatacttcttcagtaattactgaaaagttcatcggctggtgctaccggagaaaagacgtggaaagctcaccatttactaacgacagccagggtgtgccccactcaggggtgccggccctctgttctcccatccctgggtgggccagagcatcttactctctgctgccttgggcctccacttgggctgggaagataagaaagtagtggaccttccccttccttccccaagactgggaaaatctttccaaatcttattcccagtcttccagatgcgagattagaatgtacaacagatcctctcaagaacactgggagaccgagggtgggagagaaaactccaaggggggcgagctgactatagagggaattgcctgagcgggaaaggaatcttccaaagccacagaaaagccttggtttggaagaaagccgtagcacagctgcatttccaacgggaaggtcctgagcgcacacacttctgggtcctccccgctcggagcaggtaaacctcagagtagctgaccggcagcacccacagagtttcctccccaccacccgcctggcgaccaactgcagccgaaaagaaagaaagaaaggaaagaaagaaagaaagaagaaggaaggaaggaaggaaggaaggaaggaaggaaggaaggaaagaaagaaagaaagacaaagaaagaggaaggaagaaagaaagaaaagaaagaaagagaaagaaagaaagaaagaaagaaagaaagaaagaaagaaagaaagaaagaaagaaagaaagaaagaaagaaagagagagaaaaagaaaaagggagaaaggcaacagaggagaaggtcaggaaagccgggaacaagtcagcagccagaaactctccagcgatctgccaagggggagagggtagttgcgcgccggcgctggggatggggtgggggcgctggggcacaagggcgcaggggcgcacggccaccgacagccgggtgcgcctagcttgaggccgcggagaggagccgaactgggatgggtggggggtcttcggcctcaacactgcctgccagccccagtgcgcccaagtctccccgccagagctgcccttctggaggggctcttcgcacgcactgctttccccattcttctggctggaattctccggccgtcactgcagtgtccagagatgctgcgctgtagacccgggaccccttaggcgcctcttcccgtccctctgccaaagcgcaacgcctgtacttttccagctccctctttccctcttgaaattgaaagttattgaggtcgctcagggttgttgctccagcagtttccttccccgcccccgagctcccccccgccccccacagccatcccccctcctctccccctccctgccctcctctccctcccccctccctgccctcctcctcctcctcccctatgtggtgctcccgggagcccagcccaacactggagcgtctcctgctcgcgcacgccagaagcagctcggggtctctccgccgccccttggccatggccgctgtgccgacggcgcccgctcccctgcgctccaggggcccccgccgctgcagccgcagccgccgcagcttctgagcccaaggggccgccgctgcagccgccgccgccgccgctcgcccgcccggatcccgcc

SEQ ID NO: 36984 - DNA, 2300 bp, Homo sapien
tgattttaagcttaggaaattgaaactatataactacaggccagaagactccttaaatattcacttaattgtctcttgaagaaacaattaggatagccagcctcttttgaaaacacgtttgaccacatgttttcattttaaaaacttttcctagtccttacttgagaaacaggaactgtgaattgaatctttttgttcgtttttttcccccagagatttcaaaacaaacggtatatctgagtttgtgcacatgcagtttgaccttgagtttctgggcatttaaagaggacctctctaccctccactccttcctccttaagtcatactgcacctgccaagagtctagtctgtctcctccgaggacgcaaggggtcgcccctctaccaggattgcaccagcaaaccaagccgcaaacgcagactcaagtgcgaaggagcaagagcatcgctgtgggtgctgtctcccagtcccactcccacagaaaaattggaattgcaacccagttccactattccttctttcatcccctcaacacaaacagaggtctcctttgacttggccttgagatgattaaggcaggtcgaaaagcagtttgccttttgactcctctcggcccaacctagaggtgcatcatcccacagctccctgaggcagcgcccggggaaagcttcctgcgccgtggtcctcgctgggggaggtgggcacaaaaggactacaagctttctttcctgtgtcttccttcagaatcaggggccccaaaactgcaaagcgagacgcctctgacactcagtaccctgtccctccttgacaagtgtgtggctcccagcccgggggtcctcggtgggggtaaaggagagagcgtgctctgggacgcccaatgggcacgggctggaagagcggatggaaagcagagtgggttgcgctccagcccgggctccctatgcccactgaccctgagactcaattccccaggccagaccctgggaggagaggaggcggggaccgccaggcgcgtggacaccgctgaaccccaggcctccccttccgcgtccgggccggaatgaaagagtgggtggggagttaccagagtacacaccattcggaggccaagaataataaatcggatgccctgacatatttagtttgggctctcctgccccctgctaggtgatcctaaaggcggtgaggcccggccagggcccctgtcgctctggcactgccacctttttaaaaggcaattttcaggtgaatcaaaccttgtctggccgaggccagcaatacaaagggagctttcaggggaccctcatgcccaggggcagggcagggacaaacagcggccgagaagcgattactaaatttccatctcacacaagccggtgttgtgtcctccgcgctgccccgacgtctgccccgaaaggcttcccgggcgggacgctgggagagggatccccttgggaaaccaggtggggccgctgggcctgggctgcacgccgcggaggtgcgagagcccagagcagcagcatcgcttcctgcccctcgcgagctccaggagaagtttcctcctccctctctccaccagcgcccccaaccatagagccagggtcgcccctgctctgagatctgcgaaaggactccccatgggaacacagacactagagcagcgagggcgccaggctaccctggagcgaggagaggtgacaccttcgcatctgtcccttcatcttgggaagattctacctttcagacagaccaacccaggttgaggctgccgtggtggtgtccgcttaattccagctaggacaccgtcttaagaagccatcacaatccaaccctccaaataacagcattaagggcagcgaggaggcgaatctttagggagaccccactctctgtacgtgtgtgtcccaggggacacacttgaaagggccagagatggtacagacgctcacatgtgacaagagagaacctggaaactccgcacctccggctccccacagctggggttttgctgtcttcaaccctcgggcgggggacgtccggcagctctgcaaacgcgcagacacgcgaaccccatcgcctcgcgcgccctttggctccgctggtgcgtgtcggggatgcggccgcgcaggcgctcgctccctggcttcctggccgggtagcgggcgttcggctaccggagtccagcctaagggcccagccgaggtctccccgcgcgaggcggttgcgctaggtgagcgggtaccgcggccgcgcctcccttgtcatttactcagcggtcagaggcatcctgcgtctgggag

SEQ ID NO: 36985 - DNA, 2300 bp, Homo sapien
ggcactattcctggcagttgagatacaaaacagaacacacattcctggcctcctgtgtcttgcgtcctaatgtgatgagaaatatgatgaagattagtaagtaaaataaattatccattacactgtgataagtattaaaaagtaaaggaggaaatatgaaatattgggaatggaaacatcatgacttaaaatatgctgacaagtagagggactgactgaagagttggacatctgagcacatatggagggagcatgatggggaagagtgttctaagcagaggaaaccacaactgcaaagactatgaggttggcagcttgtggagagctttctgggaatacaaagctgggtaaacagtctgtggggtcaaagaggtaatgaggggaggattttaaagccatcgttaggactttggtttttacttgtgttgggaagccacaggagactttgagcaaaggagtggtacgatctcacttctttttaagtagatttatttaggattctgtattaaggatagagtcaaaagactagttcctggtctaccgtaacactataatccaaacaagagatgatgcagattgtagcggaggtggtaagtagttggatatactttgaaggaagagccaacaggttatatgccaaatgcatataagacataaaagagaggagttaaaggtgggtttgaacaaggaaagatgcaaccatttactgaaatacaaagaccttgggtatgagtgagaaggggttgaactagctgacatcttacagtctgtgcctggattcaaatctcagctgtgtgtgtctctctctctgtaaaatgggaataataatagtgcctacctcatagtttattatgagaattaagtgggtatatatgaataaagcacttagagcaacacctggcacattgttagttaatattagcattacctcttcaagctggaatcttcgagtacatatcaaattttagctattctctgttcatgggctgtgtaggatagagggacaaaactgagtggctaataagaagataaagatagaaaactaagcttaaagttaaaggatatacacttcaatatttctacatgtatggaacagtattgcatacacgcgcaagcatcactgaactagatgcacccttcaagagattgggttacatattgatatatatgaatgagaaccctgaaataaactgatttcagaggaataacagaaaacatatacatttctatacctataaggacactgaaaacttccaatcctgaatcaaacagttaatgaaatcccaaaatgcaacactaatgcaaatgagaagacgctgtcatagaatgttgaaatacatactcttctaaagataaaaggtctgctcttccaccctcttcattttcctacaaattaggaaaatttaatcagttctgaaaaaggaaatgtacatgctaaaatggtgaattactgctagagttctgatgtttaaaaccacaggcttgcgatcaaaataacctctttaattttagattatcatgcagattaatttcttcagtttctcaggcactattctgttttttttaaaaaaagggtggggtttcaaaagaaaactaatactcattttttccccgattaaattgctcaaccattaaaaaggagaacaaattggaaagtcctacagtactctctcccctccgtcccccccctccccattttttttcttgaaagggaacaagcagtacttttgctaagggatctttaagccgaaactcagctaggcgccccagagcttcctcaggatagcaaagctggatttttgagcagcaccacctgctggtcctacacacgttttacttcctccaccccaaatctctttctgttggaactgcactctttcagagcctctgggccctaatacaaagcaagcacactctaaagaagccagaagaatgcaagcagcgaagtcgccgctccccacaggcaagagagtaccggcagacagcggcgcgagacaggggcagaacgatgaggcgccggagttagctcgccggtgcgggtgcgggtgcgcggcgcgtcgcggcccctcctccgcgacgcgccgggtggtcacgtgacggccgcgcgcgttcccggcagctgcgggctccgaggccagagagaaaagactgcgaggtggccgcagctgtggccggagaggtgggagtcggagcgaggccctctcgggggagcagggtgaacgccggccactctaggatcctcactcggggagaggaggcatagctcgcggtgtcacctccagccgcaacgtactccgggt

SEQ ID NO: 36986 - DNA, 2300 bp, Homo sapien
aacgtctttgaaagtaaatgatgtattatacttattaatagaattggactaacgtcactccaaatttctgtgtattaaattcttagtttagtaaactggaaataaattccctttttcaaaattagaattttctgagacatttatgagatagggaatacctcttttgattagcattaatacttgctctacacaaagggaggggaaaagctttcttatttacatattggtatgatcatctgcatacatttagtctcccacctattttaagatcattggaactgcaaaacagagactgtgtagggtagattaaaatggttttttaaaaagccttgaagtatgtcttataggtagactagcagtttggggttactttgtgtctatcttgttacacattttatctctatcttacttattgcatgtgcctcattcagaattaaataagaaatatcactaagtttttctgcccatttgttagttggtgatagactaacagtatacttgatgggctaaacagaatcagaatttataaattgctatggcaaattgatagttaagagtgcttcagatgaaataatgaccatttagctgtctggtgtccattgtttgcagattaactttgtccaacttcacttcattctgatgatggaaccaaaatacctgcacaaacaggattgttttgcctttccaattatgttattataattcatgccttctcctgggatgattgtaattgctttcttagttttgaaattatgtgttttggtttattcataaatgcaagagtaagagtcatgcaaaatattaatcatattaagtagggtggaggataatgtttttaggttggaaacttttttttctgtagataaacgagctgtatgtgatggaaaactgacttcttgggcccattttacttaaagcaaatacaataggtttggaattatgtatttaaaagcatggcattggtccacgtgacatgttgggtgtcttgttttcattttaccagactctgtttttatttatgttttcagtttatgatcctgtcctttgttcataaggtacttagatggtttaagatgtagacttcttatatgaagatgttgctgttgtttttccaaagtaatggtggtcatcagcccatttttctatttagtctcatgaatagaatcatgagtagaatctttcttaaattattacttgtaaatggatcactttcttgttttctttttcttaattggagctttaaataaatatggaacttggaacaaaaagattttcaggaattttatggaaactaacttttttgacctaaatcgaaagggatgaaagtttctgaaaacctaacaaaatgtgtgcacagccaattcttttaggggaggaaataggcagggaatgtgtaattggctattttaaaaacatatgccttcttttgtaacttattgttgtttcaagttacaagatctttgaaggcaagtgtttatctcaaaatatttgaaagcttttatagtgcttaacatactaagacgtcctattagggtttacttagaacaagcttatccaacttgtgggccacatgtggcccaggatggctttgaaagcggcctaacacaaattcataagctttcttaaaacattatgtgatttttttttttagcttatcagctatcattagtgttaatgcattttatgtgtggcccaagacaattctttttcttccagtgtggcccagggaaaccaaaagattagacacccctgacttagaactttccataggttaggagaaagttgtactttcttgatgtctataacctagaatttctggtaaaggaattgattggaaatgttattaaaagttgaaaataatttggaaattaaacattttagtgatcagttcttccattgagactgtgttggttcctttactagatatgtgccatctttttaaaaacttactgtgttgcttcctttactagaaaattgccatctttttgagccttgtctattgaggaaccaagaacacagaaaaggcagtaaaaagaaaaaaaaggattgtttgaagattgaatgtgctgtgatgatagcctaggattattgtttttcaatttttgatgagcgtaagcattcttgttgactatatcttttgtaactactgacccatttagaatggcagaattagctggcagagagattgtcattcattttaagctttcaatctctgacatcttcatctttatttctcagtcttttttacttatcagtggtttactccattattttctccccttttaaaatgtctttttttt

SEQ ID NO: 36987 - DNA, 2300 bp, Homo sapien
tgtgttttggtttattcataaatgcaagagtaagagtcatgcaaaatattaatcatattaagtagggtggaggataatgtttttaggttggaaacttttttttctgtagataaacgagctgtatgtgatggaaaactgacttcttgggcccattttacttaaagcaaatacaataggtttggaattatgtatttaaaagcatggcattggtccacgtgacatgttgggtgtcttgttttcattttaccagactctgtttttatttatgttttcagtttatgatcctgtcctttgttcataaggtacttagatggtttaagatgtagacttcttatatgaagatgttgctgttgtttttccaaagtaatggtggtcatcagcccatttttctatttagtctcatgaatagaatcatgagtagaatctttcttaaattattacttgtaaatggatcactttcttgttttctttttcttaattggagctttaaataaatatggaacttggaacaaaaagattttcaggaattttatggaaactaacttttttgacctaaatcgaaagggatgaaagtttctgaaaacctaacaaaatgtgtgcacagccaattcttttaggggaggaaataggcagggaatgtgtaattggctattttaaaaacatatgccttcttttgtaacttattgttgtttcaagttacaagatctttgaaggcaagtgtttatctcaaaatatttgaaagcttttatagtgcttaacatactaagacgtcctattagggtttacttagaacaagcttatccaacttgtgggccacatgtggcccaggatggctttgaaagcggcctaacacaaattcataagctttcttaaaacattatgtgatttttttttttagcttatcagctatcattagtgttaatgcattttatgtgtggcccaagacaattctttttcttccagtgtggcccagggaaaccaaaagattagacacccctgacttagaactttccataggttaggagaaagttgtactttcttgatgtctataacctagaatttctggtaaaggaattgattggaaatgttattaaaagttgaaaataatttggaaattaaacattttagtgatcagttcttccattgagactgtgttggttcctttactagatatgtgccatctttttaaaaacttactgtgttgcttcctttactagaaaattgccatctttttgagccttgtctattgaggaaccaagaacacagaaaaggcagtaaaaagaaaaaaaaggattgtttgaagattgaatgtgctgtgatgatagcctaggattattgtttttcaatttttgatgagcgtaagcattcttgttgactatatcttttgtaactactgacccatttagaatggcagaattagctggcagagagattgtcattcattttaagctttcaatctctgacatcttcatctttatttctcagtcttttttacttatcagtggtttactccattattttctccccttttaaaatgtctttttttttttttttttaccatggggaaaaaaattagatgtttccttggcagggcacaataacacaataaggctttcatgacttaacttttgattacctttacaccttcatctcctgctcttccattgcttgtatgactatttgactcagtgtcttgcatgtgcttctgcctggaatctgctccactgcccagcccctctgaatgaacactaaactttctaacctatgtccatcctctcatctctctcttactgttattttagtaagtatgttaacacattttgattacgcaggaatcaggccatattgtaattatctgcatgtatgtttccttatttaacagagtagttgtgtgtcttatttatctttagacccatcagtacttagtattgtatctggaacatggcaggtgtttagtaaatgtttatctgaatcaataaggcagaaattataaattttatgtcagtgtttaagctagatacatccaatttgacaaatcttttttcttcttcctcttcaggggatcttcaatattcatgttattttctcctttggtcttatatgattgttacctttatgaagctttagtgattacaaagcactttttttgtccatttttacctgagctttgtaaactctgatttgcaggtaaggaaatttagactaatggtttaactgagtgcctaagagcacataattaataaaggactctaaaactcagatttttagatttcttgtctagcattcatttcactgtataa

SEQ ID NO: 36988 - DNA, 2300 bp, Homo sapien
tcttagaactgtccaatacaagtaacaagataaatatcttgaaattttaaagaaaaccattgatgttacaaaattaacatgatgttatacatttaaagtttggaatcactgatttaaatataaataagctttagtgtagggccagaaacggctagtccttttacactgattgcataaagggccaaagacaacaaagtaaacttgctcgcatggggaaatatagcatagaaaattatagaattcgcaacagcatctctgaccacaaacaatactttaaaattatgcctcgaacataaacttacttgttcacacgtatattttcctggcactttctcccttttgttttctaccatctataacatcacaaaacaatggaaaagagaaagaacccaaaaattctccctataatctcacctttctgatttccaagtctcagatgattggcttcatgagtttccattcattatatgcaaacagactgcttgagtaagaaggtatatagtcgaatgtgtgaaaacttttatttgttgtgtggttgtgagggggggagcagatataaaaatgttttgtgatactgaagtctgattttaacatttagtaatcctggcatgatcagaggtaaattttcttgatgtcacagctctaaagtaagaacttccaagtaatgtgataactacaaaacaaagcatcatgggcagtgtgactacttcctgaggtggacatctcctattcagagtaaagttacttccaaatcaaaaatgggatttgttatttttgaattggggtgggggcgggattgtgtgtgtgcatgcatttatttgtgtgtgcaagtgtgtgtaatattgtactttatgaagccagtattttttttttttttgagacagagtctcactctgttgcccaggctggagtgtagtggtacaatcttggctcactgcaacctctgcctcctgggttcaagtgattctcctgcctcagcctcccaagtagctgggattacaggtgcccgccaccaagcccagctaatttttgtatttttagtatagacgaggtttcaccatgttggccaggctggtcttgaactccttacatcaggtgatccacccacttcggcctcccaaagtgcaaaaggctaccttgtaagttcccttgggataagaacgtttacagctccctttctttataatatactttgaactaatggctagcagctggaaatgctaataccttggctgagggttatttatattgatgaaaacagcattagaggttgaaaacagataggcaggctctaaattggatagttgagaattttatttcactagggaggaataaaaatgtgcttttcatttggtgtataaacagctcaatatcccaaaggagaaatgggaaaagaaaatgcagagaattcatacacatataaatcaaccaacatatgaaaatttatgcatcaccaaaaatctctaaaaaggcaaatttaatttttgattatcaaaattataaaagatatcttaaaagattatactcattgtaagaaaggatgctctcaaatagacacttattttctgctggtggtaatataaattagtagaatctttcctagaagataacgtggctattaccaaaagccttgaacactgcatatcctttcattaagtatttgtgctacttacatgattttttcaggaaataatctgaaatgtggataaagccttttgcataaggtaattatcacagcattaatcattttagagaaaaattggaaacaacagacctaactgcaagtggaaatctagtacacgatcaggtgttacctcaaatcactggaacacagaaggcagaaggctttctaaaacaaatagtgttgggacaaattgccatttggaaaaaagatgaaataagatccattactcacagcatacatgaaaataagctcaaaatggattagatatataaatgtaaaacacaaaaccattcaagtactagaagaaacacgcatgaacttttctataaccttgatatatggaaaggcttttaaactaccacttgaaatccagatgcaacttttaaaaagattgatagatatgactacttttgtgtgtgtgtgtctgtttttttttagacagggtcttattactccattgcccaggctggagtgcagtggcacgatcttggctcattgcaacctccgcctcccaggttcaagtgactctcctgcctcagcctccagagtagctgcaactacacgtgcgccatcacacccggctaaatttttatacatttttagtagagacagggtt

SEQ ID NO: 36989 - DNA, 2300 bp, Homo sapien
ccaccctgaatgcacccaatcttgccgatctcagaagttaatcagtgttgggtctgattagtccttgggtgggagaaagcaaagccatcttactgtactaatcaaggcttgagtaacacaggtatgaactaatgcagcagcagcaaaaatataaaagaagggattgatatttgaaatatttctaaggtagatccgaggggaagtacttggtaactaactgagtgtgggagaattgtgaaacgggaaagtcaaacatagtaccaaaaatctgagccttattgaccgctagctcagaactcttacactaactttttccactaacacagaacacttatgcaatcttttatagagtttctaggtatattttcatctttctaaacatcctttaagtcaaatagtgcaattttttttaatttctcatttcttatgaatgaggaaactgaattacgtagtcatgacttgctcaatttcatgttgttattaagtggcagcactaggattcaaagtcagttcttttactttcagttggttttgccgtgctgagtttgaggtgctatcagaatgtgaaaatgtctagtagattttagcactttatatggaagtagatgagacttccaaaaaaaagaaattataaataaagaacagagaaaatcatggattagaattttgaaactgcatggatttaggggattagctggataagaagagccaaggaagaagactggaaaagaacaaacaaagaaataagagaaccaggtgtgtaaatgttgctagaaagtgagagcaaatatgagaatgaagaaactgattaaagaaagatactacgtgttatggagagagaaaaggtgaataaggaaaagtcatttaatttgacaagtaggagattattaaaagcttttgaggagagattttgggataaggcagagggccagattacactggattgaagaaagtatgtgagctaaaaaaaagacaaggcaatgagtttggactactcttaggaaatttgtttgtgaaaattataagttgtggcaataccaagataaagccttagaaatatttttttaaaaatcaaagcttaacataacttttcccttctttcccttcttctcttatatgtttatcatcttaaggataacagatgggtatatcttatgcctttcccctgtcattaccctgagtagaactccatagtgatctagggtatgtgatctgtctcttatccctacatctttgctaatacctcatgcaaagctgagctcaaggagccctaggatatcaacagtcaaatacagcattatttgcatttcagacaacatcaaagagttttaaatggaaatgtcattgtttaaaaaagacatatttttggcttcattactttctaaaaccttaatttaaaaaatttaatgtaatatatttgcattatacctttgtgtttctgcttatttttatttaaaggatggaatggccgtatgcatgttcatgcaaaacaccttaacaagatttatgaggtaatgcagccttctttttaaaatatgatttctaaaagaccaaaaatagctttttgctattccattatttgtactagttaagaaataatagctaattttcaaattacatctattctaatgatgtactatttttttgtgccgtagaggataatcatttaattacatgttaatgaagtatatacatatgtattttaaaaataagagaaatgaaagataagaaaaatttaagacatatcccctaaagagcttatataactagctgtatttaggaatagatactgggaaagttaaatactggtattagagcagaataataaagacactgatcaagacatgacacataaagtttacctaatattccaaattagtagaatgtgtggtgaagtggtctgtatccagaggagatgagaaaaagaactatggattggaaagtttttacagctttctgaggaatatgaattgactttgcacctaggtaaagaagcaaagaggaaaaattcttcttggcctatcaaggtatgtttgaggttacaaactgacatgttttggttgattagctttctactttcacattccgaatgtagacaaatttaaaattatgaaaagtaaggaaattcttatttaagcaaggttattaattggacattactgtatttttggtacctattgtatctgagagtctagagagagtaatagaatcataacattactattctaaaatagtatcttcattgtttaaaccctattcacctccttttcctattgcatttgactttttcatagataaat

SEQ ID NO: 36990 - DNA, 2300 bp, Homo sapien
agagactatcttagacaaaagctcagtgatgagatgacaaggtgttagtcattattaacctactatagtatctaatagtataaagtgaacaaagcttaagattcaggttctgtagaagtatgtagttaaacgattggttttttttggatttcttccagaatcacaggaagatgaaaaggttctgaagcatttacaattttataagctttcttcggggtaaaacttatgtttaaaacttgccatgcaggatgtcttgcagccccaccacaaagaagattcagtggagctgaacaagctcactaccaagccactgaaaagaggaaagaaagtccatctgagatcaaaggtcgcacttcccatttttttcaagttctgcaaaggtgatctgtttccctttagtgcacaggaaataagtgagatgttctctaaaagcctttacctgtttcaccttatactgtaatcactaaatccagaagactaacgcaaactcatacttaaaaagaaaacaattagcctagagcacgtaatagaaatcagaagcatttgatttcagactgtctgtatatcgcctgtttgtaaaagttctgattcggttgtaggctgtcataacataaactacctttcaaggttcattacatgccacccacaactctctccctcacacagccaaaatgcacaactttcagttcctgaaatccttttgattttttcgccatctcaagctttcgcatatgcgatctacctgttacatttttgtcttcctcagagtaacttcaaatcatctcctctaacataggactacataaagtccccttattgtctgctctcagaacatctgtatctctcatcaccactctcactcactctttgctgtaattagttttttaaccagttcttcccattagtcttagctgcaagagggcatttgcagtgcctaaagataatattcttaagactaaacaggggcttaagaatctggccacaaatcaactctccaactaccctgtttataatcctcacaactcaccctgtttcaatgccatgcttcttcacaggctggcttcccttcctggaatgttaatcattgcaggaatcccagctgattatacagtcgcctttcaggccagaacccaataaaaaatcaagaaaggatcgcccgttctattactgcgctgctccctcccctcgtagatttcacaaatatacttctcaccacaagcttgtctgttccaagagaatgctagctcttctaaagaaggagccctttgttttccttgcccttgtccagttcctctgcatacctctagcacctagagcaacaactgctatacaggagcccagatgtggaacagagcaaagaactgagtgttgatttaatgttgcctgaagtccttaacagcaccttcaacctaaacttaactgtgtttttaatcccctacacgtgtaatccctgtatgtgtgcgcagcgttaaaaggattattgtagctcaaaaattctccaatgaaagaacctctaccagaaaggagttgctcatctttcgttcttgaaaagttggctgcacgatacaagtaagaaaagttttagttaggcaagacaacttatacataaaagacaattatagggaacattacctaacttagcacagggcctcgaatgtattccgaaattaaatcagcatgtagaaagcaagcctcctcatgctttttaaagtgtaatctcgcgacctcgcggcgcgctctgggaagaccgattcatctcttcccctcgccctctttccccggccggcgcacagccggcccgtggcgctcggcaccgcgtctccacgtccagcgcggggcaggcctgcgcggcgcttgcaagggacaagccgcggagccggggaggctcgccgtctgggacacgtttggagaagcgagcggtacagtccattccacggcgacattttaggattctcccactgacaacactaaactgaagcgctaagaccaacccttacgaccacttaccgtcgcaggccacggtggtgacttccttttccgctcccctacacacgcttttccgttttgcgtgcctttgtttccgctccccccgggaccatcgtgcgcccctgtcctccgttcttgtaggtcctctcctcttctccgcgtcttctcttttactatcccacgctctcctttcctttctccgggaactttatcccgttcccctgccggttcccgtgaccccggaaatcccgctcctgccgcgaggcgccctccgcttcgcgctccctcgtgtcacgagggagccagggtgggcg

SEQ ID NO: 36991 - DNA, 2300 bp, Homo sapien
taaccagcacacaactgatgataggtctctgacatccctttcttagaacgtttactaaagggcttgcaattgtaaagacttatttcttgccactcagaagttctctctcaaggaccagagagtcattcctttgaaatgtaatcgagaaggataaaatcctccgtaggaggatagaatcctgcggtaactgttaaaacgcgcgcacacacaaacacacagctggcctaatcacatttacactaacaactctgtaggttcactttctctactgagcgcccgcatatcccctttctccttttaaaacgtccctttaaaaatgcccagatgatctctgcacgaatcgaaatagagctcagctctttcctgtcagtagttaactgaatgttttcaccgctttaacgtccagctgcgcttatctttgacatcgactacctaaggtctacctttagtcccacgactctgacaaaatgatctcaatattggtgtaaaatcacctcccctttcaagggtcttccaaagcacttcctgtctgcggcatacaaaatgtattggcacggaattttaagcttactgagctttataaacacgtcacattcacacattcaagacacacactggatattcggataaaaacaaacaaacaaaaaactggctaaatacccattcccctcaataacttggataagatacctaaaaaaggtcgaccttcggtacctttctgtcttctcccctctcgctatttgcctacactggcttcctcacctccactttttctcacgtttatctgagcgaaaacaagcacggttcggcagcctcctttcccagccctacctttgtgctgcaaaagcgaaaattcaaaagccaagtacaataggagaccgcccaccctggctccctcgtgacacgagggagcgcgaagcggagggcgcctcgcggcaggagcgggatttccggggtcacgggaaccggcaggggaacgggataaagttcccggagaaaggaaaggagagcgtgggatagtaaaagagaagacgcggagaagaggagaggacctacaagaacggaggacaggggcgcacgatggtcccggggggagcggaaacaaaggcacgcaaaacggaaaagcgtgtgtaggggagcggaaaaggaagtcaccaccgtggcctgcgacggtaagtggtcgtaagggttggtcttagcgcttcagtttagtgttgtcagtgggagaatcctaaaatgtcgccgtggaatggactgtaccgctcgcttctccaaacgtgtcccagacggcgagcctccccggctccgcggcttgtcccttgcaagcgccgcgcaggcctgccccgcgctggacgtggagacgcggtgccgagcgccacgggccggctgtgcgccggccggggaaagagggcgaggggaagagatgaatcggtcttcccagagcgcgccgcgaggtcgcgagattacactttaaaaagcatgaggaggcttgctttctacatgctgatttaatttcggaatacattcgaggccctgtgctaagttaggtaatgttccctataattgtcttttatgtataagttgtcttgcctaactaaaacttttcttacttgtatcgtgcagccaacttttcaagaacgaaagatgagcaactcctttctggtagaggttctttcattggagaatttttgagctacaataatccttttaacgctgcgcacacatacagggattacacgtgtaggggattaaaaacacagttaagtttaggttgaaggtgctgttaaggacttcaggcaacattaaatcaacactcagttctttgctctgttccacatctgggctcctgtatagcagttgttgctctaggtgctagaggtatgcagaggaactggacaagggcaaggaaaacaaagggctccttctttagaagagctagcattctcttggaacagacaagcttgtggtgagaagtatatttgtgaaatctacgaggggagggagcagcgcagtaatagaacgggcgatcctttcttgattttttattgggttctggcctgaaaggcgactgtataatcagctgggattcctgcaatgattaacattccaggaagggaagccagcctgtgaagaagcatggcattgaaacagggtgagttgtgaggattataaacagggtagttggagagttgatttgtggccagattcttaagcccctgtttagtcttaagaatattatctttaggcactgcaaatgccctcttgcagctaagactaatgggaagaactggttaaaaaac

SEQ ID NO: 36992 - DNA, 2300 bp, Homo sapien
ttttcatatatttgttagtcatcatcatgttttcttttgagaaatgtccattcaggccttttgctcatttttaaattggatttttttttttttttttttggctattgagttgacttcttcatatactctggatattaaccctttgtcagatatatagtttgcaaatattttctcccattctgcaggctgtcttttcactccgttgattatacatattatgtatttacttatctttcattgtccacctaccccactatatagagtttaacttggatattttcccaaagtgttaaaaagaaagatggaaaatgggagccagaaatagaaagcccactgagtactacagttatcactgagaaagaagaatgaaagttattactgaaaaataaaactgaagaaacctctcagatgggcctggtgcctgggtccatggggacaaaagtggaacatcagtctagcagtctagtctggtgctggggaagacctaaagcctgattcttcagaggccatcatggaggctgggtttgtgggtggtagcctgtaggctaggccctctggggtagttctggtgccagggtctactggggtagacctggaccttgggtttgttggagcaggcctggaacctgggttcactggaacctggggctgtagggaccagcagtcagtggacctaaagcctatatccactggtgccaacctggagactggggctgtagggcccaacctggtgttggagcctggtgcctgaaactatggggaccaacatggggaatggagtgggcatagatctaggcgccatggagattagcctagcattggggtgatcttggagtctcagtgaaatggctcagtgatcttggagtctcattttataacaaactagaattaaatacagtacttctaataatgacttcttccaattagtccaaactgggctcccacttattccctatcatacacatctccgtatcgtaaaactatcctccctgttcggcgcgttggcacattctgttcctccgactagaatattccctgtacttattcaaatcatacctatgaccactgcagaactccaggaacatgaccatcccatctaaacccctgcgttcagagacttgaccaaactctagcaagctttagcagcataaggccctgtgcccagggcgactgcctcagaaagcttaactacgtgatgtaaccagcacacaactgatgataggtctctgacatccctttcttagaacgtttactaaagggcttgcaattgtaaagacttatttcttgccactcagaagttctctctcaaggaccagagagtcattcctttgaaatgtaatcgagaaggataaaatcctccgtaggaggatagaatcctgcggtaactgttaaaacgcgcgcacacacaaacacacagctggcctaatcacatttacactaacaactctgtaggttcactttctctactgagcgcccgcatatcccctttctccttttaaaacgtccctttaaaaatgcccagatgatctctgcacgaatcgaaatagagctcagctctttcctgtcagtagttaactgaatgttttcaccgctttaacgtccagctgcgcttatctttgacatcgactacctaaggtctacctttagtcccacgactctgacaaaatgatctcaatattggtgtaaaatcacctcccctttcaagggtcttccaaagcacttcctgtctgcggcatacaaaatgtattggcacggaattttaagcttactgagctttataaacacgtcacattcacacattcaagacacacactggatattcggataaaaacaaacaaacaaaaaactggctaaatacccattcccctcaataacttggataagatacctaaaaaaggtcgaccttcggtacctttctgtcttctcccctctcgctatttgcctacactggcttcctcacctccactttttctcacgtttatctgagcgaaaacaagcacggttcggcagcctcctttcccagccctacctttgtgctgcaaaagcgaaaattcaaaagccaagtacaataggagaccgcccaccctggctccctcgtgacacgagggagcgcgaagcggagggcgcctcgcggcaggagcgggatttccggggtcacgggaaccggcaggggaacgggataaagttcccggagaaaggaaaggagagcgtgggatagtaaaagagaagacgcggagaagaggagaggacctacaagaacggaggacaggggcgcacgatggtcccggggggagcggaaa

SEQ ID NO: 36993 - DNA, 2300 bp, Homo sapien
gtgtacaactgggctaattcagttaaacgtatcattaaacgatgtcagaattaacagtgtggcgttttgcttatataatcatgttctactaaaatatttaatgcttaagagcactttattttgcttcaattcgtgtttatgtaatggaggcctacatacttttcagaacaacatattgtaaatatgtacacatgtacgcgtgccacaaaaaatgctgtttccatttggaaacagtatatacttaataacagtaagttttagccaaattaacaaatatattggaattctctacaagtttagtaaagatggattattctaggatcaacatttatctctcctcgtgggtcagtaggcttcctacattcccttatttttcattagttgttaggaagctcagaaagaatttttgtgctgacttgcaatagattttcttagccaatcatgttttaaacataactttgtcctctatttgcctatttagcttttctattctctgttaataggtatttatccacattttattgtaagctatcccataatcttttataatttgaagaggtataaatatgatttatatttatcagtgtgattaagtttgaattgcgatatttagttttttatttaatataactcagaaaagacttacttgccaattttcttttacaaatcacacctaatataatgttcttattgtcaccccatggactttagaacaaggttcaagatatttgtaattcaaagacattacaatttgacataacctaatgtttctctctcatttttcattatcctccccactctgctttataattaatccatatcaaagtactcattttccttcgagtagccatagtatttaatccttttgccttttacttcaatcctatatgccttttactcaagtcatccaaaaaatttttactttttttcaagaccaaatgacactttccatttggaattactcatatctcattgcacttttattcagatttgtatctgactacttaaaatgttatttcaaattcaaggagaagaacttgagctcacattacataatgaataagaattcagcaggcagagagaaggtaagggaatggcaagataaaagctacagagagagaaatgccagtagcagaaacccaggagactacatagtttaatctgagggtaggtgaagtctcaggtaatagtgaaaatgagagacaagtttggaaagagtttgagtcagagtgtgtagagcattgaatataacactgagaggtagacttcattccaccataaaaggacttgaagtttttgactgggagatttatgtaaaaatgatgtatgaggcagttgtgaatccttttcttatagcagaaactcattgctttagctatgtttgcttttgagagcttattctaaataaagttataaccaatacaccatgttttatcattgtttaggatgaagtcagattcttttctccaggaaatgccaaatgtaactaatatacctcatggggaccccatgatcaacaatgaccagtgcattcttccaatcagtttagaaaaagaaaaacagaaaaacaggaagaatctgagctgtaccaatgtgctccagagcaattctacgaaaaaatgtggaattgatacaatcgatttaaaaagaaatgaaactccaccagttcctcctccaagaagcacctctcgaaattttcccagctcggattctgaacaagcctatgaaagatggaaggaaaggttagaccacaacagctgggtgccccatgagggtcgaagtaaaaggaattacaaccctcacttccctttgagacaacaagagatgtctatgttgtatccaaatgaagggaaaacttcgaaagatggtatcatcttttcctctttggtaccagaagtcaaaatagatagcaagcctccaagtaatgaagatgttggacttagcatgtggtcatgtgacattgggataggtgcaaaaaggagcccctctacttcgtggtttcagaaaacctgctctacccccagtaatccaaaatatgaaatggtgatcccagatcaccctgctaaatctcatcctgatcttcatgtaagtaatgactgtagctcctcagtagcagagagcagtagcccacttagaaatttcagttgtggctttgaaaggactacaaggaatgagaagctggcagcaaagactgatgaatttaacagaactgtatttagaacagatagaaattgtcaggcaatacagcaaaatcacagctgctcaaaatcatcggaggatctcaagccctgtgatacctc

SEQ ID NO: 36994 - DNA, 2300 bp, Homo sapien
cctggggggcgtctcggcgcccggactgccgcgccccgcttgagggaagcccccgctcagggccgcgctggggcctgaaacccccggcctcggcccaccagttcttccacactgtccttctgcagggctgaggtttttgtgactccatcacatagtcaccatttcttcctctgttttgtttaaaaggaaaactgaacaccattaccctcaattgttgtggaaagagtaacggattttgaggcacgttattattttagaaggtcaatatttttctctgttactctgctagcagatgaactgcaagatggtcctggataggaatatttaactgctgatatgtggtttttgagccaagatccatattgagtttaggatttaaaaaaaatgactagactaggaggccgaggagggtggattgcttgagctcaggagttcgagtccagcctggtcagcaaggcaagatccgtctctccaaaacatatgaaaaattagctgggtgtggtggcacgcacctgtaatccaagctactccggaggctgatgtgggaggatcacctgagcccaggcaggtcgaggctgcagtgaatggtgattgcactactgcactccagcctgggcaagagtgaaaccctgtctcaaaaaaaagaaagaataaaactaaaacagaattgatggcagggcactgtggctcatgcctgtaatcccagaggccaaagagggcaggaggtcaggagttcgagatcagcctggccaacatggcgaaacccgtgtatactaaaaatacaaaaattagcctggtgtggtggcgcactcctgtaatcccagccactccggaggctgaagcaggagaatcacttgaacccggggagagggaggttgcagtgagccaagattacaccactgccctccagcctaggcgacagagtgagactctgtctcaataaaaaaaattaatttaattaaataaaacagaactgatggataactactggtaaatgtagaaaccagtggtaaagagacatggttttgtgtctacaaccccctggaaaggaacaaatgaaagccacttttttttttttaccataagttgaaataacatgatcattatttccagagaaaatcactctcagttgtatagtggagaatctcaggactggggaaggagtctatacggtagcttgaaggcaacactaattcagagaaatagtaataactattccagaacagggaaaaccagcatttttcctccatcctgatttgtagaggcacaccggatgaattggactgagctgctttggccaggtatggtggccatttaaagaccaatgcattttgtcagagttaaccacatgaaagataatttatgaaacaaaacaggcaatgctgtttcctctggcaagcctggtgtcctgtatccattggagaacccacggaagtacaacagcatgcatggcttttaagacacggaagacatttaaaagccagtttacgtacagaagcatggttttagattaactgcctgttggtacagctagaaacattgcagccctatcgcttatttatcttgcatgttgctctgctttgctatgaaaaatatcgttttatgataaaacttgttgaattttgatatgtattcggttatactcttagggaaaataatagaaattagagtgagagaaagtgctatgtatattaggctttcagattttatagatataggcttaagggagggtggaggttcttttttaagttgaatgactacttaaatttgttgatgtgaatttaagttttaaagattattattaattaactcttctctttgtctttgcatttaccttcccagatgttccagcctatcattttacttattctcattcttgtattattttcatcactttcttacacaacaatatttaaacttgtcttcctttttacactgttttttgtactgtaaatctttcatcatttaccattcattgtagtattttcagtttgtttattttgttcacccttcaagacaagaagtaaaagaagtataatttctgtagtaaccaatgctataaaaacactgaagactgcttatttctttaaaaagatacaactcatcttaccaagaccaaattcaataagaagcccaaacactaaaatatttcaggtaagaaagtgtgacatttttctgtatgaattgttttaatttttacttctttttttcatcctgtttgtctcctcttgataaataattggcatactgaatataaaaatggactacatgtctcataattatttctcagtagttcacta

SEQ ID NO: 36995 - DNA, 2300 bp, Homo sapien
gcatcacctatcttgaaggactgatataagtatttaatactatatggaatgtaatgttcaggctctgcacacccagcagctctcaaacccttcatattcttcatattcccattagtagataggaagacagaagacctgtgccctgttctccatctcttccatctcaaaggctctgtgtggtatttactgagcatctctggcagaagctcattattctcctcaccttctcaccagtggttgctccttctttaccagaatgcatctcaaacacagatgaccgagtactggataaggaaagaatttttatttttgtttttttaatgaagaaaccaaagttcacagaagttatatgattggctcaaagtacacacttaaaagagaattttgagaaattgtccttgggagaaatgaccttagacataataacatgcttcagtaatatccctcagagaaagatttccattcctccttttgtacttttcaatttagttaatgattgggctctgaggttgtcgtaagaatgtgtgagaagaacttctatagttccactattcttttgccaggctttatccatttcagactgatgggagtacaacctattttaaatgtgatctagatggaaaacttaacagtttctccttggatggaccattccaatgtcaaactttgctgacttacaggcctctaaaacaattttcctttgaataaaaacagggggcagattatttcctaagtgacacagaaatcaagagcctgagcatttgtttcagacagaactggattcaaatttcacctttgtcctttgctattcattagctgtgtaaccttcgaacggttactgaacatctttaaaccaggaactgtaataactactcctaagtttactctgaatattaaattaggttcatatttgtaaaacacttttcagcacttggctcagtgtaagtgacaaaaaagtggccgcaaatgcatatgaaccacatgctcgttgaacagattttatatttattactgcaataatgaaacaaaagaaacactgctgaaatgatcaccaaacagttgtatgcagttacaacatataataatctctgaatagtgatgccacagttattctcttttcatattccttttcctttttgcttccaggatgtaacattgttctaatctttaatttgccagagaatttaagtgatctgaagaaaatacacagtatctgcttctgtttctctctgtcattaaatctggattgcaagaaaaattatttatccaggtgtcctcttttggttgtttccttgatttacataaaaatgatctcctatccttttccctcttttcccccaaatgaggaggacaatgaagatctgaagtgccagctgcagtttgttaaggaagaagccgctttgatgagaaagaaaatggccaagattgataaagaaaaggacagatttgaacacgagctccagaagtacagatccttttatggggatctggacagtcctttgcccaaaggagaagccggaggccctcccagcactagggaggccgagctcaagctacggctaaggctggtggaggaagaagccaacatcctgggcaggaaaatcgtcgaactggaggtggagaacagaggcctgaaggcggaactggacgaccttaggggcgatgacttcaacggctcggccaacccgctcatgagggagcagagcgaatccctgtcggagctgcggcagcacctgcagctggtggaagacgagacggagctgctgcggaggaacgtggccgacctggaggagcagaacaagcgcatcacggcggagctcaacaagtacaagtacaagtccggcggccacgacagcgcgcggcaccacgacaacgccaagaccgaggccctgcaggaggagctgaaggcggcgcgcctgcagatcaacgagctcagcggcaaggtcatgcagctgcagtacgagaaccgcgtgcttatgtccaacatgcagcgctacgacctggcctcgcacctgggcatccgcggcagcccccgcgacagcgacgccgagagcgacgcgggcaagaaggagagcgacgacgactcgcggcctccgcaccgcaagcgcgaagggcccatcggcggcgagagcgactcggaggaggtgcgcaacatccgctgcctcacgcccactcgctccttctacccggcgcccgggccctggcccaagagcttctccgatcggcagcagatgaaggacatccgctcggaggccgagcgcctgggcaagaccatcgaccggctcatcgccgacacgagc

SEQ ID NO: 36996 - DNA, 2300 bp, Homo sapien
acggtgtgtgtcggaagggctggaagcgagtttgattttgacacgcggcctgtcaccgcctcagaacgagatcgatgagctgagaaccgagatggacgagatgagggacactttcttcgaggaggatgcctgtcaactgcaggaaatgcgccacgagttggagagagccaacaaaaactgccggatcctgcagtaccgcctccgcaaagccgagcgcaaaaggctccgctacgcccagaccggggaaatcgacggggagctgttgcgcagcctggagcaggacctcaaggtctgcggcgcgggggctcaatggcgcgcggcaggggcggtgggtggggactttggccaagggctctttaggctgagaagtcttcagtggcgactggcaaggagccttagggacacagtttcgtagcgctaaccacaaaatactagggtctcagaagggagagaactggcaggtggctctaaagagtgcagagtgtgtggagggcctggcagcaaacgagctaagtgtgctctcctgggagcaaaggtggctcttcaagaggtgatgagaagaaggctcccttctgggcagaagcaagggcgtggcagagcgcaggctctagcctttgatctgcccttcagtctgtctactgagagaagtccggtggaatcgggcagtcaggagctgcactaaaaggactcctctgggggagttgaaacccaaaataggaactgcactgggaagatactagagttaagatttctttcagcaagtgtccactccacttccttcttccaggacttcttcctttctgcacttgccacttaggtgactccctgagggggaaaaaaaaaacagataaccaacttgcagcctgtttggtgtgaggtaaatgaaataatctcatttttttaaagtgcaattgttccttcagaatttcttccagtggaaaaatctcaaccttgaagtgcattttctagacaggtgtggtctccagttcagtttgactgtaggcagattcattgactatgcaaactagacattaacttaatctccttgcacaaccaaataagtatacgttcattgcattaacttcattgggatttaaagatcacgtgtaatctttgttttaaagaaagctatgtgtaaacattttatgaaagacgtattactttttttcttaacttttgtcgagtgcttagtatgtactaagcactgtggcaaacactgttacatacattattatttcatttaattctcaagggaaaaaaaatcctacaatgtagggattattaaggcaccattttataggtgcagaagctacaccttttacagaggttaagtgcccaggcctggaaaacagctaataggtgccaggctgactctccactcagtccaaaatcacaacctgtgtcctaagcctctacaccagtctgctccacttttcttccaaaccctagaatttccaggataatctcaaaatatgaggcaaaaatgcacagtcattcaaaaaataataatctcaaggactaaaactttcctaagattaagcaactggaattcaagctataagattgaaattcaagcccaacccactacttgtaaaaacttcaatttttcattctttaacatagattataatggaaacatctacctcatagttttgctgaagtaaaggaaatttgtgaaatttctctacatgtgataaaatgcaatagaacattttttaccacagagtagtgcagaagttaagggaacaaaatttagagccagattgccaggcctcttagcccagcagtgtctactcattagctgtgtgaccttgacctctctgagactcagtttcctcatctacaaaatagaagtaataatagtacctatcccatgggatttttgtagggttaaacgattgatatatgtgaatggcttatatgtatactttgtggaataatgcctggcacatggtaaacaccatataaatattgggttttaatgctttcaataggaatacaattttagcccttattatattgtcattaattatattttattgttacaaacaccttaattcaggttgcaaaggatgtatctgtgagacttcaccatgaattagaaaatgtggaagaaaagagaacaacaacagaagatgaaaatgagaaactgaggcaacagctcatagaagttgaaattgcaaagcaagctttacagaatgaactggaaaaaatgaaagaggttagtatttgattatttcatggtgtactatgtatttttagccctttaaaaaagaatcccaaggactaatatgactgtt

SEQ ID NO: 36997 - DNA, 2300 bp, Homo sapien
ataaaatgaggaattactgcatgctaagttgtgatgctaacaatagatgttaacaagaataatgcaagtaaaataactggcagtaaagtaatctgctctctgtatagaacaaatatttttaaaggagaaatttatgcctagtcatgcccctttcagtgctttagacagaaataattttaaggaaaaggcaactaattgactagctgcctggatccctagggagaggaacccatgaggcagtaacttgctatttttcagattaaagaagctagtgacggatttatcttggaaatacacatactggaaattgatcttaccaccatgagggaagatgcaccagccttctgggttctgtctcagaattgctatataggaggaaatgggcactttaaaaagtacaacttttgcctatgatatgcgatgtaagaagatggctaagaatgaaaatattttctatctagcaattacacttaaaactaaagtgattcataagactacaaaactgggtaagcataggaaaattcatcaccagaaacttaggaaactgcagaactgaccacaacttttccaaatgtattttaaaaattatttcccaaaagggaaaaaatacgtttttgggttgctaataactaacccatatagacaattcttaatgctattattttcttgaaactgagattgatttaaaggcattcattatttatattttcttttagttctattataaaggaagttgggtgcattttcccaaaaacaacattaagggttggagctgcctggggaaagtgtcatttatccgtagaaaatattctctaggaaccctacatcataacccttttcctctaattgaacttgggaatactaattaaatgaaaactttctccagtaaactaggctttacatatggatttgatggtaaggaaagccaaagttgtaaaagcagagttgacaactctaatatatggatatcttttctttctgaagcttcttttccactttatcctcttttcttttatatctccctttccatcaattcctgtctgactctgtatctcaccctttccaaagcctgctaccatgagaatgtaaggttcagctgctttcagatccgtcattttgctgaggtggagtgagatggagacagcgccaccctgggcaaaatgagaattgacagccctccatcctattcctaaagacagccctgcatcctattcctaaagtcaaagcttctattaagcgccatccaaatggagcaatatcaccctttgctctgcaaaaattcagacatgttgtcttcttctctccttttgtttctgtcccagcttaggaaggaaggttggcggcggtgaagagggaagaggatgatctagtaatgggctcttccaaatcgcatctggtaggttcatagccatgagtcagccaccaatcgggggcgctgcccctgccacagcagcagcttctcccgccgctgcagccactgaggctcgtctgcacccggagggcagcagcagaaagcagcagcgagctcagtcacccgctagaccgagggacagttcgctgcgacagacaatcgcggccacccggtccccagtgggggccggcactaaactcaattctgttcggcagcagcagctgcagcagcagcaacagcagggtaacaagaccgggagccgcacggggccgcccgccagcatccgaggaggcggaggtggggccgagaaggcgacgcccctggcgcccaaaggggccgctccgggagctgtccagcctgtggctggtgctgaagcggcccccgccgcgaccctggccgctttgggcggcaggaggcccggaccgcccgaggagccgcctcgggagctagagtccgtgccctcgaaactcggggaaccccctccgctcggagaagggggaggagggggcggggaaggaggaggagccggcggcggctccggggaaagggaggggggcgctccgcagccgccgccgcccaggggctggcgagggaaaggcgtacgcgctcagcagaggggcggcagcggcggggagggggcctccccttctccatcctcctcttctgcgggcaaaaccccaggaaccggcagcagaaactccggaagcggcgttgcggggggcggcagcggtggtggagggagctactggaaagaaggatgtctgcagtctgagctcatccagttccatctcaagaaggagcgggcggcagcggcggcggccgcggctcagatgcacgctaagaacggcggcggcagcagtagccgcagctccccggtgtctggcccccc

SEQ ID NO: 36998 - DNA, 2300 bp, Homo sapien
tgaatcttgacgttaccgccattgtttggagaaatcgagtgggtgtggaactgcggcgagcgagcccaaagtcatgctcagccggaaagtcgcatacaataatatgaagttgaactttcctcggcgcagaaaggcacaataataaaccctgagatccccggaatatcagaaggaaagtgctgttgatttgttcagctacttggaaacctcgcctctgctgagaagtgagcaagttctggatttctaaagggttggggatgaatgatggggtgggttagcaggcggataaaacttgagattaaaagtgttggtctaagccgtgcaggggttggttgggtgataattttcaccgggaaagccttgaagagatgcagcatcttgtcactttgtgggaaccacgtgacagcagccggatacctttgattgtggagcccagttactggaacacaagctttcgcctgggttaatgctgtctgagggctgagtttaaacattggcttctcagctctggaattattctgcctgattaaaaacaaaaataagtttgcattggcaatataagttagttagatagcccatgttagtgccacccatgatgataaactaggccagacattctagtagtatcgcgactgggagagaagatgtagaaaacaagttggtgggcaattttcccccgatgtcttctttgttcacctttatatttcaaagtgagttggaaggagatgccagaaacagaaagggaggtggattaggaacccttcggtaatatttctttataaaatgaggaattactgcatgctaagttgtgatgctaacaatagatgttaacaagaataatgcaagtaaaataactggcagtaaagtaatctgctctctgtatagaacaaatatttttaaaggagaaatttatgcctagtcatgcccctttcagtgctttagacagaaataattttaaggaaaaggcaactaattgactagctgcctggatccctagggagaggaacccatgaggcagtaacttgctatttttcagattaaagaagctagtgacggatttatcttggaaatacacatactggaaattgatcttaccaccatgagggaagatgcaccagccttctgggttctgtctcagaattgctatataggaggaaatgggcactttaaaaagtacaacttttgcctatgatatgcgatgtaagaagatggctaagaatgaaaatattttctatctagcaattacacttaaaactaaagtgattcataagactacaaaactgggtaagcataggaaaattcatcaccagaaacttaggaaactgcagaactgaccacaacttttccaaatgtattttaaaaattatttcccaaaagggaaaaaatacgtttttgggttgctaataactaacccatatagacaattcttaatgctattattttcttgaaactgagattgatttaaaggcattcattatttatattttcttttagttctattataaaggaagttgggtgcattttcccaaaaacaacattaagggttggagctgcctggggaaagtgtcatttatccgtagaaaatattctctaggaaccctacatcataacccttttcctctaattgaacttgggaatactaattaaatgaaaactttctccagtaaactaggctttacatatggatttgatggtaaggaaagccaaagttgtaaaagcagagttgacaactctaatatatggatatcttttctttctgaagcttcttttccactttatcctcttttcttttatatctccctttccatcaattcctgtctgactctgtatctcaccctttccaaagcctgctaccatgagaatgtaaggttcagctgctttcagatccgtcattttgctgaggtggagtgagatggagacagcgccaccctgggcaaaatgagaattgacagccctccatcctattcctaaagacagccctgcatcctattcctaaagtcaaagcttctattaagcgccatccaaatggagcaatatcaccctttgctctgcaaaaattcagacatgttgtcttcttctctccttttgtttctgtcccagcttaggaaggaaggttggcggcggtgaagagggaagaggatgatctagtaatgggctcttccaaatcgcatctggtaggttcatagccatgagtcagccaccaatcgggggcgctgcccctgccacagcagcagcttctcccgccgctgcagccactgaggctcgtctgcacccggagggcagcagcagaaagcagcagc

SEQ ID NO: 36999 - DNA, 2300 bp, Homo sapien
taagttttgcttagttgaagcaatataattttaaccagcaaataaaggaataaatcaggaaaatatccaattcagaagttatttttcttatggcatacttatgggtaaacaagcatgttaaatgttgcttatacttattctgtattattacagttttcaaccttgaaattgcataatactaaattataaaatgaaacatttagacacattgtttgatttaaggatacataataatccattcttaatatttattttactttttaaagttactatttgcacgaaataaatgataccgctttcggaaaaaaaatcaaaacatagatgcctgagcagagtaaaaattcttagagaagcaggactatgcatattctgtgtctttagactgtgtttacagtatcaatattttattggtaaagattgagctgaaaaatatttgtatctactttatccattttgattggatgagacatgtgcatcttgatatttcttgaggatattacagctcaagtttgggtacataataagaaattgcctaatataaattcaaaccaacttgtgattacattttcacttgcttttttttttttcctttatttttggtatgctagtcgaggtgtgggctttttattataaatgtcacagatgtcacttttcctgttcccaaaggtatttgaaagaaaataaggaaattatctcagttttcaccagtatgcttgagtgtccccagcacagggacaatttcttgattcagctttgcatcccagtaccttggacagtgccaggctcaaaattggcttttaatacctattttggaacatgaatgattttatcgtgatatcatatttgttttatgtgtctctaaagataagaataaccagagcttgagcatgtttttattttgctgtaataattgcttttatgcaaactactcctaaattgtttttatttcacttttaatgcaagatcaacacttggaaaattgaatctcttgagccaaaattcatgttggcacaaaaagctattattatttcaagatatcttcttccttttacttacaaaatcaccatataaatgtaagacaaattaaattttaaaatgccctttcaaaagcagtacttacttttattctcatactcaagctcacaaaggaattcttagaggtagaagggaggctcccatgccccccgcccaccactgaaagaagaaactgaaaagaaaaagagaaaattccacttaatttttaaaaatattattactgtgaaacagtatgggttagtgtaaattgtaaagacatgtatattctgaactcctctttttaaatgaattcccttttaggctgatataatgtattcttcctggtttctgttattgttcgcatgcactactataaagattatggatcccagcaattactcattttcacggtagaaaccggcactcagtagaaaacaggaaaacgtactgaaggcaaaccgttctgtaaaggatctctgtgggccgatatttatttcggtttgcactaaattagtcgtggcttcgcaagaaccctttgtctgtgggacggtgggtcccatcatggcaaccattatctattcgtggaaacgacatctgatgactccgcccgggctgggggtggggagggagcaccgcgtgtagagctcgactgagaattaaagtgagtgaacaaagagaactcccagcagccgccagccagctgcatcaggagatgttagtcacgcccggaaggctgttctagtccgcctccttggaaaagaagctcaagtaaataattgatggagaatgaccgaacccaggacaaagctttgcaggaaaccagtgcatccgtgttcgagcggttttgggatcctctgccaagtacgggataagagaatagagcaaggagtttgagcgctgctgccaatcttccatctcgggcgtggctctggcctttttgtctctttatcccgccactccccacccccgtcccccgtccccctccccgccttcttctctttcctcttgaaagtaacctctctttggttacttctaccctatcgtcccttgcaatcccgccttctctcctgcccagttcggtgaggtcagctcatgaacatctctgcacttcctggggagcgtctggcccagcttggtacctcgcgtgttagcctgctgagagctgcagctccagcccagccgcggaccgccgggaagtcacccgctctgggggcagctgaatcttgacgttaccgccattgtttggagaaatcgagtgggtgtggaactgcggcgagcgagcccaa

SEQ ID NO: 37000 - DNA, 2300 bp, Homo sapien
atatttctgttttatttaacctgtaactggtcacactattacatcaatgactgtggtgtgttactttaatttttgagggcttataataatcttctaatatctgttatggaaagtttcctttcactattattatccattattattagagtttttgtattttcttcataatttattttttaggcaaattttagcctcagtcctaaaaatctttccagaaagcacatctaaaaatcctgttaatatttctcatttattgtacaaatttataaattaacatgttgataatgttgagtctattgagaaacattgtatgactttaaaactgttcaatttttttgtagtcttagagatttttccaaacagatctaccataattatacatttatatgttggcccttttgttgacaataaaatgaggacttttcttccattttcacctattatatttcccaattgcttttatatataaaagctattgatttatatatagtaatttagttcttaaccactttagtaaattttttctttgtagttacccttctagtttattctcttatgttttctgaacactgtcatatcatctataagggaaagtactagcacatcttcattctcaattttatacctctaatttatttatctttactaactttattgtttggtatcctcaaagaaaagttaaatgattataatgctggtggtcatttttattttatttctgaccttaaaggagtgctcttaagatttctccattgagaacaatctggcatttggttttagagtaacacatcttacagtacatattcacgtatatattcttataaacatttaatatacttttaaaatttccagaatgattgcattcttgatctatagtagcaattcctaccattcccttttatattaatatatctggaaaatttattaattatcaaatggctattgggtaaataatatgacaggaaaaaagagtggaatcatgctgtaggatgtttaatgtggaccatgccaggaacaagcagtaccagtgacctactatgaagcatatgcatctaattgtgtaaataattgagattttcagatgcattacctattaataaggcaagaatttttactatgtgtgaataaaacttcaataacagtggttgaaacaagagagtggggtgtttcttgctcaggtaaaactcagatataggaattcaaggacatctcatggctccacagccctctgggactcaagccacctccagctttgcattctgtcatccctaagatagtgccttgcgtttaggggtcagaattgaatttcaatcatcacatcaataatccaagccacaacatggaggaagggaagaggaattgacatgtgcccttcattttaggacatgttccagaaattgtggatactatttctatttatgtctctgtggtccacacttagtcacatggttgcttgtgtaaagcaaattggaaatttagccttaattctgggagaccatattcccagctaaaattctacgattcttttactaataaagaatgaaaaatagatattaagaattaactagcaggttttgttccagcaggctgactttcattattgaattgagctaattagatattctttaagcttctttcttgaagcagaacattgtattacaactggatcacacatatttttagtacacatttgaagattattataaatcctagtatttccatctccagctatttaatattttccatgaaatatgttaaagtatttttattagagggaagcattctaaagccatttgtgatgtattttgtaatcacaatgcagcctgggaaacttctggaaggtttttgttgataaatagttttatctaatacattataaacaagcctaaccttgtatttaggttctgacacagtattctgacgctgaagagtctgggaaatttaattgtcctaaatgttagctaatacatcaatttcttctacattttcaccctatccaggaaaacaaaaaagcaaagtgttgatatgctgtgaggttagcaaatatcatgacttcctcttccattctccaataaaagccctgctacgatcgcaatccccagctctggcacaatggcttttcttccttcctgggtttgtgtactagttggttccttttctgcttccttagcagggacttccaatctctcagagacagagccccctctgtggaaggagagtcctggtcagctcagtgactacagggtggagaacagcatgtacattattaatccctgggtataccttgagagaatggggat

SEQ ID NO: 37001 - DNA, 2300 bp, Homo sapien
tattatttttttttatttttatgttttgagacagggtctcactctgtcacccaagctgaaatgcagtgggtatgatcatggttcactgcaacatttgcttctcaggctcaagcgatcttcccacctcagtctcctgagtagctgggacatgccaccagattcagctaattttttctaatttttgtacagagacaaggtctcactatattgcccaggctagtctcgaactcctgggctgaagcagtcctcccaccttagcctcccaaaatgctgggattacaggcataagacacagtgcctggccaatacataagtttattaattcaggaccatttataatgataagatgttgggtggtatatgaggaacaggtaaataaatgcaggacaatattttaagcatctctgtagtctcaaaggaagactcgtgagacagtggatgattggaaaaaatacagatatccattaaccccagtgacgcatgaggcaatgaatacattggtgagtactcaccagcatacctagggctcttgaatggctcctctgattgtgacccactctgcaccactcctttggtaggcaggtataatataacaccagtggagaaagaaagaactttgacattggaaaaatattgcatcttggtatttattttcgcatattaatctcaagtagcttgtatcttaggattttgcaatattgtttcaactcacaggatatgatttggtataaaggtttgttttgggtcaaaactgtcttctatgataatttgatatataaagtctggccctcaagaatatgacttaaaatgacctaataatttataaaccttcatataaaatttatgaacacatttacatacatattcacacacatatctatattcatgtatgttatggatgataaaagtataaatataagcacaggaatatttaacatgagaatcaggacagtgatcgtacgtcagtagaagtgaggatatgattttgaggaggttccctagagctccaaggtactggctaatgtccgcttcttaaactgagtatgggcttatgcgtgttggttttatattcaatctctttcatcttaaaatttgaaaaaaggaaaatcacacataagaaatgatatatgatgatcatctgagttctttattttgtaaaagaaatttatttatggcatcaggagagtatctcacagcaaacgttttgaagtacaaaaatatcatagtgatttattttttctttttagttcgaaaagatataatccgcatcctccccagtctagatgtcgaagtcaaagacatcactgattcttacgatgctaactggtttcttcagctgttatcaacagaagatctttttgaaatgactagtaaagagttccccatagtgactgaagtcatagaagcacctgaaggaaaccacctgccccaaagcattttacagcctgggaaaaccattgtgatccacaaaaagtaccaggcatcaagaatcttagcttcagaaattagaagcaattttcctaaaagacacttcttgatccccactagctataaaggcaagttcaagcggcgaccgagggagttcccaacggcctatgacctagagatcgctaagagtgaaaaggagcctcttcacgtggtggccaccaaagcgtttcattcccctcatgacaagctgtcatccgtatctgttggggaccagtttctggtgcatcagtcagagacgactgaagtcctctgtgagggaataaaaaaagtggtgaatgttctggcctgtgaaaaaatcctcaaaaagtcctatgaggctgcgctgctccctttgtacatggaaggaggttttgtagaggtgattcatgataagaaacagtacccgatttctgagctctgtaaacagttccgtttgcccttcaatgtgaaggtgtctgtcagggatctttccattgaagaggacgtgttggctgccacaccaggactgcagttggaggaggacattacagactcttacctactcataagtgactttgccaaccccacggagtgctgggaaattcctgtgggccgcttgaatatgactgttcagttagttagtaatttctctagggatgcagaaccatttctagtcaggactctggtagaagagatcactgaagagcaatattacatgatgcggagatatgaaagctcagcctcacatcccccacctcgccctccgaaacacccctcagtagaggaaacaaagttaaccctgctaaccttagcagaagaaaggacggtagacctgcccaagtctcccaaggtaa

SEQ ID NO: 37002 - DNA, 2300 bp, Homo sapien
ttcctttattacacccttctcctaatctgttgcaattgtctgcttaattgttctttcccttcaagacaatgcttctggggggaatgaataatgcattttatctctgattcctattgccaatcgccaacatagtaggtttttttttttaatcaaagtttgctgaatgaatgaacaggggaagttgatgtgttgtagtcatacaagaaagtaatgcaatatttcttctcatgaagtttaaaattgaattgggagtcataaaaactgaaactcataaaaaattaagtatagggtgagataatactaaagatataaaatgttagtatgtgattaattgccaaatgaggatcatagcaaataaccattcagagtcaattgggggaaaaatgtcactgtggatttattagtatttttaatacctcaatttgttccacaaaggacttgagcctgctgataacattaagcattaaagttaacgaaaatatgagcacatatgtagttaagggaatagtatgagacaaggagagggttatggaaatatgtaccggaagcttgaggaatggatagactatccttaatatgtattctttagatgtattcttcttgtctgcaaaaatgcttcttgctcagataaggacagtaatgtgggtgtgctggattttcatacccactctgcctgggaagctgacttctgtggggacattagtagctcgcttgtcctctggcttctggcagaatttggctaatgggatgcctatggagaagagtgaggtcaggacatttattttctttggttgcctagaactggctgtgcctctttttaaagatggcccctatgataaacttcctgaaattattctaatttgagtgtgccctgttacctattgggactctgatatgacctcagagttgttgtttagagctagattggataccaggcttactaacttttctggcaaccatcaataccataaaaatgttctaggtgcatgctacatatcaggaacaattctatgaggaggtggttctacacagaaaaattcagaaaacaaacaagcaaacctaaaacgctgtgctcatatacttcacatgtagtatggcaaagacaacgtaaatcatcttggaagtcaggaaaaactgatatatataaaagctcacagctctataatgtttatttatacttgccttaagttagtgttgaattgtaaagcaataatatgccagagatatagtttttgggttgtttccttttcactgggggtagattatccagaatttttgcctctgctcttggctgttgttcatcttgtggttattttactcctcactgtccttccatcagggaatattaaaggaaaataagtgaatgaaaacttagctgtagcatctatgataaaaggtttgtcaagaagacgattgaaatactgactaaaatgaagcttttcagtttatctgggttggtctgccccctatcgccacaaagatactcagaatggtttctagcttgtcaaaaaccaagagataaaaatgggcaaaaagttttactttcatgctaatgaagagaaccagatctaataaataaatatgaccctcttaatgtgaagccctggtgtgcagaccctctttttcatctccaattgtatgacaaccttgtttgcagttgttatttagatcatttttgagtcatatgagcttaattttgtgacccagcaaaaacagatcataaatctcagtagtggaagatacgtttgtagtttgaccatggtaagatgagctgagggtgctgaggaaatcataaattcaatttacaaaaataacaaaaataagatttatttatatttggcccagtgaataaagtgaaaatctaatatttttctggtctatgctgtacattttgccaagcttgattaaattcctgtttagcaggtagctaagagaggaactgaattaaaacactttatattaagcttttgagtctactttgtttttcactgttttctttttaaaaagctgttttaacttttctttccttttaggctctatttatgaaatgtttggaaatgaatgctgtttttcaacaggagaagtgattaaaattactggtctcaaagttaagaagatcatagctgaaatttgtgagcagattgaaggttgtgagtctctacagccatttgaactgcctatgaattttccaggtacagcacattgcaaccacttatcatttgtacaactatattgttattaatatgtatatatacacaaccaaaaacaagaaaaaaatggtctgtttttcactctaggat

SEQ ID NO: 37003 - DNA, 2300 bp, Homo sapien
ggcctgatggatttaacggctagagaaaaaaaatggcatctcacatgattctaagccttccggcttgggaaactaagagaatagcagtgtcattaattaagactgagaatacgaagatgattatcacagagagagcgtcatctgtcgcgagagcagaagcagatggagcctaggtaattgtaagagattggtgatacgaaatggctgtttggctagtaggatagaaatttgacttgggaatattaaaaaaataagtgatatccagcttgcattagatatcaaatgaaatgtattgtggcatcagttctaacggattcataatttttaaggagcagtccacagaagcctctttcatgtattcatccacatgaaatacactactaggctgtaaactgtggggaggggtatggaaggcagacagatcaagggtaggacatttttggacaaaaaagttgccagtgaggaatttgaatctaatgatagtaaacctgttgatgtggtcaatcgtaaattctacttttataaagaaagaaatgaagctggactgattattgaaaatgtcaaataggattacaaagagttgaaacagttttataagctccatatcaaaactaggcagtttttatctttctaggtcatttacatgatggccatggtagaactgagatgtcccctgaccctctgtatgtggctatgctctctgcagcctaaggccaaaacagttaatagataagtgcctgggtttggttactaaagaaaacgtgtagattcctgtcatctttcaagtgtatacataccaaccagtattctttatttttttttttttttttttttgagacagagtcttgctgtgtcattcagcctggaatgcagtggcatgttcacaactcactgtagcctcaaactccagggctcaagtgatcctccttcctcagcctcctcacagctgggactacaggcatgtgccaccatgcctggctaattttttaatttttttgtagagacaaagtctcactatgttgcccaggctggttttgaattcttgggctcaagcaattctcctacctcagcctcctaaagtgctgggactacaggtatgagccaccgtacccagcctcaaccaatattcttctactttaccttaaagagacttaggaactaccacctttaattgtatatattttaaatattgtttcagttacatgcaaaaaatagagaggggcaggattttgaagagatcaatgttcatgagttttctcctgcttcctttggtgctgatcatttcccctcctaaatttcaacaataagatcagaattgtggaattgtgaacttggaagaaattataaaatttattggactcttctacttcatctccatttagtaaataaaacaaatgaaaatcagagaagacaaggctgacgttagcctgtaaatcaaaagcagaactaaacccagaaaatgcaggtttcctgacaagtaattttaatactttctactatagtgtagagattagaaaactcattttaatgtactttgttaatttactgtatcattttgcatattctatccctaccctaccctcctttaagattcagcaaaatttttaatgtggaagaataaaaagtggtttcaatactctctccagagtatagtatcagaattctaaaaagagctgacgcaaagcacttttattaccaattttaatgtaaaggcactgacagtatgcaaataaggcacaaagccaagctttagaaatgaactagagagataatgaattcacatggtgccatttttaagattagactttagtcctatattcctgttctttgttggtgggcaagccacaagcaactctgacctcagttttgctaccatagtagatgcacacctggattaacaaaggacagaatgcgctacttagcacgtctcattttttgggcagtgtctgttcaccccacccccatcctgttcaacttcaatgtcagaaggaaatgaagccacaatgtgaacaaaaagagctataacattttttgtctcctgcttcccccctccctcttcattgtcctccccacatagagctactccaccccactctggctgtagtgtgacattcctgcctgcctgaggaagaaatggtgagcaggggctgcaattgcagacaagtgtcacccagaagccacaagtttctgtgagcaccaggtctacaaactacccaaggcatagcaatggcattatcactggaagaattcgtccactcccttgacctcaggaccctacccagggttctagaaatccaggc

SEQ ID NO: 37004 - DNA, 2300 bp, Homo sapien
tctgaataactgtgttactgggatggggttattatatttctgactcccagtaactcagacattagaagagataaggaaagtgacaaacctgtttttattctagtattataattcttcgctgtcacgaaagccaggctgttttgcttcctttctgtaagaaattgtcagttgataggcaaaacttcaagaataattaaagaaataggataggtacattcccttgggaaaatcaatcttctgtaaatgtattcaaatgaattcagtatcctttccttttaatagtgcttatctaggtgaaaacatttattttagattttgttatggcacccagaaaactatgatgcctctttaaaaataaattatagggtaaaagtcacagaggaggatgattgaaaagaaaaagtctcaggaacattccctgtgtgtctccctctgtcttctgtgcactcaaagcatggcaaatcaatctcagaacacttcctgttacctgagactctcttgaagtgtcttcgtaaatgtttaatgcatccctatctcttattcagtatgccaggaggagagagatttgtttttggcaggggttggctttggtaaatgccacaggttaattcacaggttctgttgcatctgtgtaaattgggaagatttgacagctgcgcccaaaatactggccattctctttgggaagccagactttgacacttggtttaaggcaaaatgaatgtcaatttgtcgtttacctcacctcctccacaaaaacactaaaagattgtttttatcaatataaagatccctgctttgagaatcctcgaagccatagtgtatgtgttttgaactggagatgggatggcagagttgtttagaggactaacatgagactagagatactgatagctactaccctgcaaaggtttaccatggactggtgcactatggatgtatgctatctcatttaactctcacagcattcataagcacttgtaaattgttcattcataaattgtatctcccgtggggaacatacaattactatctttttttttaaagatgagaaagccaagacttggagagtttattagtattattttattctttgtaaaaacagctttattgagacataattcatgtatcacaaaattcatccatctaaaatgtataatcaatgattcttcttatgttcacagagctgtgcaagcatcaccacaatcaatttgagaatattttcatcacaggaaaaagaaacaccataaccattagtagtgatccctccctccccaactatcctcttctccctatcccatcccacacactcaccccagattaacgtttttagattccacatataaatgagatcatggggtatttgtttttctgtgcctggcttatttctgttagcacaatgttctgacttggagagtttaaatgacttgctgagggtctgcctagtgaggtgcagagctgggactatatggcttcatcgtctaggactctacctactacaacatatcatgttgtaaaacaagcagacaggagggaaaatggaattagtgagtttttgtgcagctactcatcaacctcatttagtacctatttatttagagcaatttaccatttagtaaaacatggaaggagttagatttgcatagctgattttatatagttgccctcaaggtggagagtaaaggaaagtagcagttgctcaacactaaagtcaaaaggtttggatttcactttcagctctattacaaactagctgagtgaatgtgggggagctacttaggctctttcatgacatacagagaaaacaaaaaaagaaagatggagacagcacacttcaagttccagaaggctttcaatttgtggttccagtttttacctgatccacaacagcatgcttgcctttaaacaattctgaactcttgtaataattttaatctttaggttaaataactggaattggttgctgttatttccagctagcattgcaggaaatactgaatctggtacaacatgggtttaaccacatcaaaatttagaagccccacccactttgtagacacaacaggttcacagataaagtgttctgcagactcaaggtttatacttacaattacgagatttatatttgcattagtctctttggctggtgggtaggggtgagaggctcttcctggatcccttattttctacaggagaggaggaaaacacctgggatgctccagtgctcttacgcagataatgatcattaacatcagcctctctgatcaaaggtacagctctttgtgggataatatctcttg

SEQ ID NO: 37005 - DNA, 2300 bp, Homo sapien
acatgactccagtctctacctctgtggtcacattgacttctcctctgtcaaatcttcctctgctttgctcttataagaatacatgtaactggatttagggcccacactgttaatccagtataatctaccttgtcaagatcctttacttaatcacatttgcaaagaccgcttttccctaaaagataacatttacagcttattgggattaggacctggtatcttccagtagccattattcagcctactaaaatctatatgctttccaatgtatttttaaacagaatttttcaaggtataggctttaaaaaattaagagaatcccaagagatctaaacagtaagagagagaggcctaagtgatgatattgagtggtattgaacaaaataagacaaagaagatcatctgccatatttgacagatgttggtagacaacatcttctcttcatgttccgttgtttgtaatttgtttttactgctaccagaacctcttacaattctctactcactcatgtaaatactagctgcagaaggtctggcaaaactttctcctatttgtatatgtgtaaagtggtctttcccttacatcaagttaaagaaaaaatacagttgtaatagctacttcccaatagccaaagggttgtatttgaaagagggatgaaaatcactccaggtaccaagaaaaactactgtgtgatctgggacaagttatctgctttttttgagacccacttttctcatctttacaatgaaataactaaattctgctctctaggcttgttctgaagattactgaatatacatttaaagtacctagaagtatttgacacatagcaggaacttaatatacaattactggtattactattaaggattaagaaagcactggcatgcaacatattatatatttgacaagattacatcatcttgaaaaaatataagaagtattctttttgtatagtactttaaggaggatattattcattttatatcattttccttctcactgtgatatgtagaatatatcacaccaaaattgtggttgacccaacactccaaccagtgtcctattttattcactctgtatttcttaatctattcaataaatattactaaatccatttgctgtgctagatgctgagggaggtgtgtgacacagcctgtagtctagtaggggaggtaggcattaaataattaactccagtcaatttcagtgctatatatgaaaaagacaattcactcctttttatgacttgacttacagctcacagtgcccagaaaactgggattcttgatagaatgcgccacatatatcctaattagcaacaatcactagtttggccccataatgtacatacctaacacacactttcacaggcaagagaagaaaatacctatcatcatattatgatcaaagtattttgaagtaaaaatacttcctcattatttcttagaatactgcatacagcaattcctttaaaagcagactctactagcatgtttcccactgaacagaactgtttgtccatttaaccaaaaggtatttattgcccgggaattcattagttcattatttgaagaaatacgtatattgggcaagaatgtaaatcaggctgtttagttatcacatgaaaatgcataaaacagtacccacattcaaagagttcaaagagtccttcaggaaatcaggtgcctaaaagtcaaactgacctttaaaaaaaaaatgttcatagcttcctctgttaaatgaatgatcgtttcagagctttctaaatgccaaactcttttaatatattatttcaattagctttcacaagcacttatgaggcttgttgtatgttttttttttcctttgagacagagtcttgctctgtcaccgagtctggagtgcagtggagccatctcaggttactgcaaccttctcctgggttcaagcaattctcctacctcagccacccgagtagctgggactacaggcgtgtgccactgtgcctgactaatttttgtttttagtagagacggggtttcactctgttggccaagttggtgcgtactcctggcctcaagtgatccgcccaccttggcctcccagagtgctgggattacaggcataagccactgtgcccagctgtatcttcttttaccgatgaggacactgacaggttggtatcacctctttcctagtctatattgcagccactcccttattgaagtttctgactccaagtcctactcatcctaatctacctgcagcttttaaggtgtcatttttctaaaacttaaatatgatcctatcattgttc

SEQ ID NO: 37006 - DNA, 2300 bp, Homo sapien
tgttggtttgctgatttcttttgagaatttcctttcttctctttgcatcgcctcccccacttctcacttaagtatgtgtctttgggtaagttacttaatctataaccttgttttcttatttgtcaaatgggaataattgtaccaaagtcttcacggaattgttgactgaactcaatgaaacactgaaaatcttgatgtctcagtgtgacattgtatactctaagacagtgcctagaacatttgaagaactttctaaacattacctgctattattattacttccatgatagagaaattaataaagtttcatgaaatgaatcttctatcagctgtcccccaaaatgggcaaggtaagaattgtgtgcactttgtcctggcactgtgtgaaaatatttaaagaagttttttgtttgtgtgtttaaacaaacaaattaccacgtcatgaacttcttttacatttcttacaagagtagaacagatgaattagtatacagacagtagggttttgtttgtttttactgggaaaaattgctgctaaattttaggaagttctgctgtcctcaaaaagaaaaatatgtccctcagttttttgttacctgggatctaggaatgttctctaattaaagaaatggaatggtgatggtgtgttgaaaggtataggttaatgagttaaaaaaaaaaaatctacattgcaccctaaggaaggatgaacttaactatgctgaactgaattgacaagggttgagctagtcagtgtgctaatgagcaggctactattctcatagaatttttaaaagtcttttctgcctgatatgtatgtgtgtataatatgtatttatatatgtatatatttgtgtgtatatttattacatttttgtttccacaggctctgtcataagtctggtcattaatagcatatatttgattaaaagaatatgtggcttggtaaattatgtgaatgttatattaaaatgaatttcacattgtcttgatttacaaaggctaagatgtctgagaaactgagagatgtcaatcaacagactattgttttagcaattgtacataacacataaaaattctgaatcaaagttattatgttattcaattgtgaccatacctattttttgtgacattttacaaaaatgaataaagtatgcaccatacagtcttaccacagaagtaaggcagggtggcatatggcgaaaccacttcaagctgctgaagtagttaactgtgaaatattttactgtcataatatagcattattttctgccagatgaatcattccgaagaagctgttttcatggtcagtgtaaaagtccttttgttaaatacttatgtcttaactacctactagatattaaaaaaaacaaaaccacacacacaccagacctaggtgcaaggaagggataataagccctgatgcagttcttaggtgagaactggaaaggggccggagggtttcagagcaacaagcaaagtcagtgaagcagagtaaatccaaatacttggccaatgacaaataaaccagaaaggagacacgccagctgttcacgctggaaagttactgatcgtttattctggttcaagttttatttattctatgaataagggacaagttttcgatgggggtggggtgtcttattccttattacaagaataaggaacggggagttttcaaggcaggcgggtgtttcctcagggcgcttccacactcccctttcaatcagcaaccgctcggggggacctccaccttgggacggaaccccaggacgcctctcctcggacggcgggggtttctctgcgcgcgtcctcggtcgtctggtcgcacggcttaccgaactctcgcctctcaaattctgagttctggaacagggcagcgagctgcgccggctcccctttctcgctcgctccctccgagcagcggctggcggcggggcccaggctgcgaacaaaggcggcgcggggcgcgcggccggggctggcgcgcgtctctccggcaggaggcggtggcggcgccgcgcccgagcccgcattcctcagaagcgcccggagcccgcggggcgacgtcacccccggctccgcccccgtccctccccgagcaaagtaactcttgactaacaggagcagcctccgccgagcatggagagctgccgccgcggccggccggcgacgctggcgacgctttcgcccctgaggtagtttggcgaccgcgaagaaggaaaaagggcgggcgggcggctgtcctctcaccgtcctcaccccgcgaggcccggcccgctcctccgtcgtggatttcg

SEQ ID NO: 37007 - DNA, 2300 bp, Homo sapien
aatattgattataaaatcctgggaaaatgtaaagaggaaggggatagagggaacatggtatattttcattccacaattagagttagcagctgcatcattctgattttcctttttataaatattttttattatttattagattaactaatttgagttgaggccacaacatggttgagtaaaaataatcattttcctttttataaatattcaataaaacttttcctttttataaatattttttattatttattagattaactaatttgagttgaggccacaacgtggttgagtaaaaataatcattctgagaatagcaataggtttagaaggttaatttagggtgcctctctgctattagatgtacctgaaaaacacttctaggcaaaattagaccaaattaaaaacactggggcttcaattataataaactctcaaatataagttttattattgtttattataataataaataatgtataagtgtgcagacatgggcagactacattttgcaaatttccacagtaaggtaaaaggattacaaagctttctggtataatattaacagaactaaaagacatgaataatattaaagaatgggctttggctagtgattttcaatcaattctcttcaaagcaatactctcttaattttactgaaagaaaattcaactttaatataatatttagataaatcaatacatcttaactataaaaaagaaaactatctatataagacaatatgtatttcaacatataaatgcttgggtaaaacttccttaggaggcaaaataaaataaaagtttgcacctattcttagatgaccccagtgtaatcgatgggatgttgatattgtgctggtgactcaagtaccatgggcaaggttgttatcagtgatgtgcttctctgaaagtacatctttacacccattgacaaatgggtgtaaaatccaaaaacacaaagtaaattatcttctcaatgtatatagtagatgcatcctagaaaaaaacaaacaaacaaacaaaaaacacacacaaaaatttgatgtggaaacaaacttaaattaggtttcaaatataaggcaaggttttgttgttttgtttgtttgtttactcactacataaatgaccagtggcccattcagaagtctaaggacaaaatatgttgtaggactgtcctgaccactgagggacagctcacaccctgacccaacagtacactaatgcctgcagtacccaccgttcccggagtaaaccaaaagacatcctgcgactcacaaaatccattatggagttgttttaaaccttatgagaaccactgacctaggccataaaaaacaaatgaaaaaacaacaaaaactaggaatggcagtagttctgttgagttaaagaggagaaagaggagaaaccaggactggaagagatgaaattgtgagtctggaaggaaactattgcaaaggcctttattacctttaagtaaatgtctcctaactgaactgaaagccttcattctaaccattagtttggtcaggaacatttcagggacgccagggtggctgttttattttgcacttcctttactgccctcccagcagcctacctagcagtaagttccccagcctgcagtgtccccagagggcaccttccctcggctagtaacttctcagacactctggccttggggatgtcttggatcttctaggtacacagtggctgcacacagttttgccaggcctttctcaagaggtaaaagttcctagctgtttgcatttcccagaaataatgttttccatgtgtagggattttacagatttcaaagtgctttcatgtcaattactttctttaatttaaaagaagttcagataccaggtcaagctaggaatgatccggtctcagagggaaggagcgctctaggaaaggaggatcctttaatagagggccgtcctggggccgcgtgcccatggaaggcgagagtggaggagtgtcctctttctcccccaccctcaggcggcggcccggccaaagccagagggggctgtctcctcctcttccccagcagctgctgctcgctcagctcacaagccaaggccaggggacagggcggcagcgactcctctggctcccgagaagtggatccggtcgcggccactacgatgccgggagccgccggggtcctcctccttctgctgctctccggaggcctcgggggcgtacaggcgcagcggccgcagcagcagcggcagtcacaggcacatcagcaaagaggtacagtcgaggcatgggcttgggttgcatcctttgccg

SEQ ID NO: 37008 - DNA, 2300 bp, Homo sapien
gtaaatgatagagccacaacttgagctcacttgccatgcccaagtctattcctatactcaatactattcgacctcattgcttggagacacaagaaaaagcacttctgagaccctcaacattgttcattttcataatattgcatctttggcaaccaaatgtcactgtggtgattttgtttctccctgtttccctgttactaacatccagggcccaaagttccctctgagctcgctgtcgtctcttactaatttagcaagaggtgtggaaagacctattttctcaacctaatcagacagtgcagagggtagcttcttatcctgttgtgcttaggtcaatgttttatcggtttttaaataccttgttttagatataatcaataccttatttccttttaagcagtagctctgtaattttgtattaggaatagataacacagagttacaatgccagtagccagcactgtttatgtacccaacatggtgatttatgtgtattcttactgaatcattgcaaaagctaggtgaggctgataataatgtgatcttcatttgacagagaggaaactaagactcaatacaatagcaagcttctatcaccttgactactgcatcattctcccaagtggtcttttcacatattctcttgctcttcactcttttcccacattattgcaagagtgatatgtttcaaaatgtatgtcttattaggccactttcctatgtaagccctgtcagtggtttccaatttcccttagaaccaagtccaaaatcctttatgtggcttaggagaattgccgtgtttcaccctggaccaagttctcactcttgtctcttagctctttgatcaaaacttctgtaacccaaatctactggttttctttctatctccagtaggtgcctaaatataaattatattatttgtctcccaagttatttgaataaagcttgaaccccaatttggctattccttattgtgcctgctccactggcaaatatagttttgtagtagtttcattcacatctgttcagctgttgtagttttagctgtttctcatattcaacctggtaggttgaatattatccttccacccaaaagatgttcaagtcctaagtcctgggacttgtgaatgttattttatatggcaaaagggattttgcaggtgtgaataaattaaggatcttgagatgggaaagttatcctggattatctgtgtgggcctgatgtaatcacaagtctaatggctctaataatggccctactaatggccctaatcacctcaaccatttactgcttctttaagatactttaagagggaggcaggagatcagagtaagagtagtaggaaatatggcaacagaagcaagaaggtggagtgataagaagggactatgagccaaggagtacagggaatctctagcactgaaaaaggcaaagaaacagagatctgaagtccccagaaggaggacatcctgctgaaaaccttattttagacttccaatctttagaattgtaggaggataaatttatcttgttttatgacacaaaattacttgtcacttgttagaatagcaataggaaacaaatacatgccatgacccaactttcaagattctagaaaaccgagagactgaagtcatttatttaacaaatatcttctgagtgccaggtactctatctgagacattgtccttgtggttttatttttgtatacagaaagacagaaaaaaaaataaagaccatattggagttattagtactatacatttagagaagattaaaaaaagaataagaagaagatacgatggatctgtagtgccagggaggggaattgcaattttaaataggatggtcagtgcaggcctccttcagaaagtgagcaatgtgaaggagttagctatatggatctcttagggcattcaccaggcagataaaaaaactagtacagaggtcataagaagggaatgtgcctggatattcacagaacagtaaaaaggccagtgtggctgaggcagcgtgagttggggtagaagaataggataatgaggtcatagaggtaccagtagaaccagctcttgtcaggctctccctggagtactgtgggttaccactggaggggtttgagcagagccatggcatatactgatgtaagtttcaaaaggctattgtgtatcctatgcaatagatgttggtggctatgacgaaaatggtagctgtagcatcagtgagaagtggttagactggtatttgttttgaagagtagggctaataaggtttcctgatagaatgagtgtggaaatgt

SEQ ID NO: 37009 - DNA, 2300 bp, Homo sapien
tattaaataagcatttgctacccccagagcagggtatcttcatcccgctcttcctcctattccttctccacctagatggaagtctggtaaacttctccatttacctcacttccgcccccagtcctcagcccctttccttatgcttggggatgtaatctggatttcaaagctaactatttctgtttcaccttcagttagtttttatcatctctttaagtatcaagttcctcatttgtaagaatggaccagaatagcatctattattgtaattaactaggaaaatgaccatgcagcatatagcactgtctgtctgggccgcatagtaagtgaaattctgagtaaatgtttatatatttcttccaccacattcctgtgcttcttccatttgtattccacctgtgctggggcaggtagaaactctatatccttccattctttttctcccccacctcgtcaactgaagccaatggacatatgaatgatatacaatatatgtataataaatcgcacgttcattcattctttggtaaaggattgttgcctttaacgatgaatttgttgattagcattacgcaaaaatctgaatataccaggaaatctagttcctgtttctttaaagtagaacacaggtacttgagaatcagtctgacagcaatatctaactagatgtttttctttaaatcaagtctcctgaaacattcaatttggttttcacagaaatagggactctctttagacctatagtagttgattgtgttatgtactagattaaaaacaaaaataataatgattaaattatttaatttaaaagataaacctacactgtagttggaaacaaagtggatcagatgcagtgcagcaggtggaacatagcgtgagggcccagagagccctgactgtccagtgtgccagggacacagggcagggagagaaaggaggagaaccagatgagccattccatgggtggtgaggagcgctgctgctgtaccatgctcttcctaatggcttgaatacaagtcagacctgattttctcttctcagttccagagagtgtgtcttcagggccttatcttagtggtccactaaccttgccatgcttcagaatccactatagagcatttgaaaagcagtttcttgggctttatcctagaccagttaaatctgagtttctagagctctccatctgaatttttagcaggtttctcaggtaattcttttacagaaagataatgacataatttgcttccactctgagggtctgtgctgccctcatttgcacaactgacagaagagaatggcttattcttttttttttctttttggagacaggatctcattctgtcacccaggctggagtgcagtggcacaatctcagctcactgcaacatccatctcctgggctcaagcagtcctcccacctcagcctcccgagtagctaggatcacagacactcaccaccatgcacggctaaattttttgtattttgggtagaaatggggttttgccatgttgcccagactgggctcaagcgatctacctgctttggcctcccaaagtgctgggattacaggcatgagccttcacacccagtcagaagcatgtcttattcttcacatgcatcttgcacactactggagttgtcagcacagcaaacccatgataaatacttattgaataagagtaatgtgaaaactaaagtggaaacatttaatagttttatgaggaccattttggcttgtatacaaagtggataatcatattaataatttgattggcagcggaaatgttacattaacttttcttttgaattttacaaatttagatactggtttactactttgccttcagatgtataattccatttgtttattttaatttacaggtgtgatacttttattacctattgggtacatttaacagatgggaaaatacaaacgtgtagataattacagtgtgtctaagttatgaattttccataccagccagaattccccaagcacgttaaagtgatttacttgcaagctgtttgatgatacaactaatcggtttgttttgtccctcatagtggggttgcccagactctcaagaaaggagaagtttttttgtatgaaattggaggaaatattggtaagcacttttttttctctttacattttatatgctgttttgatattgccagtggttattatttatgtctttggaggaagaacaggaaattagaagtaaaatataccatgctttagataagttgctgaatattgtggatttctttaatggtttgacctttctcttcaggctct

SEQ ID NO: 37010 - DNA, 2300 bp, Homo sapien
cacccagtggttatttgggatatccacttgtgttaaaggactggactggtttccagctgaagaaaaatgaatggtaaggaaatttagtattatgacattttcttcccaattggagaaccctcactaagggagttaagaggaagtgaaaagggggagggaatagagagctgagcctaagcaaaatataaattgtgggatttctgccagtctccaagaggatgttgctacttggtgctagaaacaacatttttccagcaagtttctggcagtgtcacaaccacatggtttgagtccaaggtaattggtggattgtatcatctgatggagtcattaagagagaactagcaaaaggaaattaaaataatgttaacttgcttacactgcatgcctttaattgaaacactgccacccattagaaaagtgctttatctcccccatgcctcaagcaaacttgggccagccatcttcacttgcagttcttctacttttgagtgagtgtatattcagctcttccatgttaaatgcttcctcatgaaggccttgctgacactaggaaatataatgcagaaatgaacaccatctgtactgccatcttcaattgctaaggaaaataattccgaccacatgctccaaaatatgtgttcttttgtgagactggaatcactctgctcattgtgccatgcagggccagcctctgccggcttgtgggaggagggaaggagaatgggactgctctgtgcttcaggggattaaagtgatgctgggtacccacgtaccacttctgtgacttggtagtcactgtaacactttcctgggttttccccatctctaagtggtgcattaatagcctagacgtccctagcctagtgcttttctaggctctttttagacttcaggtggaggatgaagtccttcgtggacaacagcttgaggtgaaatgtgtggtgagactacaatggccactttctgtctgagataaaatacagtagaattatcaatattattaaaataatttgaatagacctctttctgtggttgatccagactcttcttcctgacctctgaattccttctgaagccttacctggaaaggaggaagtactctctggccacatttactgctgagcagagtcggccatggtttaccatctccataaacctttggaaggccccgttccttgggcgtcactgccccgaccccttgaaaacaggaattccttcagatgttttaggtcttattgctggtttggtaatttagttacttatctcacatttatttcttgcttttttttttttaacttgaagaatttctgttttattagggacatgtacttttatagttttataacagcatgattgagatataattcacataccatataattcacccacttaaagtgcacaattcagtgttttgtagcatactcacagttgtgcaactatcactacaatcagttttagcacatttttattgtctccaaaagaaagcctgtatccattaacagaccttccccatctttccctccctactcttaggtgaccattagtcagctttgtgtctctgtggtttgcatattatggtcagttgctataaatggaatcatagaatatgtggctctttgtgactggttcctttcacttagcatagtattttcaaggtttctttatgttgcagcatgtatcaatacttcatttctgtttatagccaaataatattccactgtacagatagaccacattttgcttatccatttgtcaattaatagctactactaattttttaacatgtttgtcctttctcctcccctccatagtagcattcttgatgacagggacccactcgtgacttttttaatatttcccactgggcctactattgtctcttacaagttgtaggtaataaaatattttttggatgattgcttgttgattattatcttagtgcccctttttcactgtgattgttataattctgagtacatgtcttgtactctaaagattaataacaaaattatttacagtaccattttctctggttttgagttggagatgactaaatggcctgttttctatgtttaggctccaggtggcactgaatcgcagtcacttagaacaaatgaaaacaaataccaaggaagagatggtatgttgaacctgttctcttgtttttttttttttccgccctttaattagtataacagttacagtcttataaaacattaccttcaattctagtaagcaaattctattaaaatgttaatgtaaggtctcaagtggatcattatgtgaggctgagcata

SEQ ID NO: 37011 - DNA, 2300 bp, Homo sapien
agccgagatcatgccattgcactccagcctgggcaacaagagcgaaactctgtctcaaaaaaaaaaaaaaatttagtagagttttaaaggatactttcaattcattcaggttttcctccattcagtgtttactgaaggctcagtaggtacaaaatttaagttagctgtcagatgaagagaaaagaatcatagtaggacctgaaaagattgtgtctagcagatggaaagacttgtatgtataaggtagcaggaatgcccagtgatctgctcaaaagcctggaactggctctgttagcaatagagagccaatgaaggtttttaagcgaggagagggatcatgagtgccagggtgtgatcataatgtcaaagcaatttaaaggaggtgacagggagatgagctaaaagggctgttgtaatattggagctaagactgcattataggatccagaggtggttgaggtcatggggataaaaaggagacagcaagtaaagtcctatggaagtggaaatgggaaggttgagcagttgtgcaggggggagggaggaagatataaattccttttaaggaagacttttgtaaattataagaaagagggttcaaaaataaatttcagatacttctagagtatgtaaggaggaagaaattatttttcatgactgttttaaataatgataaggtataagcaataagtttatgtaatgatggaattggaaacttgttcaagaggaattctagagagttgaatgaatcataaaaatctaaaaaaaccttcagactactgggtatgtcagagtagaagccaggcgtggtggctcatgcctgtaatctcaatactttgggagcttgagccaagaggattgcttgagcccaggagttcaagaccagcctgggcaacacagtgagaccctccctctccacaaagcataaaaaaattagctgggcgtggtagtgcatgcctgtggtcttagctattggggaggctgaggctggaggatttcttgagcctgggaggttgaggctgcagtgagttacaatcaccactgtactccagcctgggtgacagagtgagaccctgattcaaaaacaaaccaaaaaagtgatttttttttttggaggggagatggggagaaagaacagagctgtcttttgtgtttatgataattttgatcttgtttcttaatctgcaaaacaaagaagagcatactggtgaaaaataaaaggaatgtagcctagaattctgttcaaatccagcttctggcactagcaactgtgttatcttagtgaagttacttaactcgtccctcagccttactttccttgtgttatgtataacacagatgatagtgatacctatcttgtacggtgtgtgtgtgtgtgtgagagagagagaattgaatggaatgagataatacatgtgaaacccccgtccatgagagcttggcatatagtaggtgctcaacaaatggcagggacttctcttgttctcagcaataacacttaacagagcattggtaggtctatccctttttggtgctgaaaaatattttgctaaaacaagacgtatatttgagattggctttatgtgaaagacgacgacattccaggacacacaatttttatgagggcatttttaaccggacacaaggatcaagcctttctcgtcgtctggattgcagagttttgccgcgggttcgttgttttttactatggctaattttaacgctgaacatgaaggggttaagaaatgcctttactcatgttacattaagtagcagaaattataagatagaggaattggggagggaaaaaaaaaagccttggcagcaactcatggtttcctaagtaagacggcttgtagttacagtgatgagttgaatatacgttctggcagtttaatctgatcagactaacttgggggtgggtgcaacccgtcgcttccacccttcgcctcctttaaccaaagccgcccagagtgcaattgtccagagttgaaaccatgctgtgagttgcagcttctaattggagaggcaggaagcccttccctggacagaccccgcccctccccgtgtgaatcgccagcctgcggggaggagctggccaatgctaatgagcgagttgccaggcgagacaggaacttctttccccttctctgtgtcaggatcgcagaaagtatgtcccttctctcaccatgagctggctctccagttcccagggagtggtactaacagcctaccaccccagcggcaaggaccagaccgtcgggaacagccatgcaaaggcaggggaggaagccacctcg

SEQ ID NO: 37012 - DNA, 2300 bp, Homo sapien
ttaccagcaggcagaaaagtctttttctgcaagaactcacaatataagcagagaacagggcaaccacacattaaaagatttatctaaggtatattaataaaagagcattgacagtgttattaatatgcattatgaatgtcaaattcaataacatattcagatgaaaactatcaaggcctggacttgctgaaggcactcttttcacctttgcttttggtatgcaggtagatattgcagaatgtgctctttatagcggttaacaagatgctgtaatggaaaaaggattacagggcacagctaagttcccatctaaagttggtgccacagcaaagcaatcaatcaacaaagtgaagacaccaacccgcagaatgggaaaaaaaatactcaaacactacccatctgacaaggggctaacaaccagaatatataaggagctcaaacaactgtagaggaaaaaatctaataatatgatttaaaaatgatcaaaatatctgaatagacatttctcagaacaagacatacaaatggcaaactggtatgtgagaagtgctcaacatcatcgatcatcagagaaaggcaaatcaaaactacaaagagatatgacttcaccccagttaaaatggcttttatcccaaaacaggcaataacaaatgctggtgaggatgtgaagaaaaggacaccctcatacactgctggtgggaatgtaaattagtacagccactatggagaacagtttggaggttcctcaaaagagaaaaataggactgccatatgatccagcaatcccactgctgagcatataccccaaagaatggaaatcagtctatcggagaggtatctgcatgcccatgtatattgcagcatgtttcacaatatccaagattaagaaacaacctaaatgtccatcaacagacaagtggataaagaaatgtggtacaggtacagaatagaattcagccaaaggaaagaatgaaatcctgtcatttgcaacaatatggatggaactggaggtccttatgttaagtgaaataaaccaggcacagaaagacaaacttcatatgttcctacttatttgtgggaactaaaaatggaaacaattgaactcattgagatggaaagtaaaagaatggttaccagaagctgggaagggtagtgggagaaaagggggagtgtggggatggttaatgcatacaaaaaagagagagaatgtataagatctagtatttgatagcacaacagagtgactatagtcaataataatttaattgtacatttaaaaataactaaaagggtataattggattgcttgtaacacaaagaataaatgcttgaggtgatggaaatcccacttaccttgatgtgatcattacatattagatgcctatatcaaaatatatcatgtaccccataaactctatggggtatattactatattactatgtaatcacagcaattaaaaattaaaataaaaataataatagagttggtgccagtaaaaagatgggagaatgaattgtaaatgaaggattggttctggagcctcaggacgcagagagacagagctccaatactgcctcctggcagttcttgaaaacattctacccacaatattgtggccattattttagagtatgggaacccttttgtttcctaacaaaaagtcataagttttacatttctttgccatgatgtgaaaggaactgatgatttctttctcagaactctgtggcccttgtgagtgaaacagagaggacaggccacgcttcaacatgaatgcagcagcatcctttggaaacaatctcaagacctaactgaaaacccatgtttctaatttaagtatgagacagtaattactcatacagccagagaggattccaagtccctgcctatttgccgcactatctaaaaacaatcaactcatctttcaaatctgaccaaactacaaatggtatgagaactccatcgtttaataaggatgttcattttggcacttagcagcttacgcgtggctcacagatggcatctgtctcgttttgcgtaatccaatcatcctgcactactgcgtctcacacttagtctccaggagtaattgaaaagctcacggtgacaattgtgtcttcttccagatgtcatcgctataaggagtggggctttcatcacctccttgacgtaggatgtgtacatggctctccaggtcagagttgctccaagcaaggtaaagagaaattacttctttgcattgcctttcagttgctgcctagcactggtgtaaatgaatatgttctataaatggcctctc

SEQ ID NO: 37013 - DNA, 2300 bp, Homo sapien
tcaggacttctctgattggttcatgttcccagacaccttctgggaagaagaatggcatcatgtaccctggatgtttgtccttcaagaatcagcttagccatcacttctaatgtaaagcctttccttattgccactggtgctcaactgtgtttgctctacatacctctgctataacattttccatataacattactgtaacataatgcccaatttactacactgtctctccaccaggctgaatttcttgtagctggggcctagttttggtcacctgtttatccccagcaccttgcagagcacttagcacaggtaggccattaatacacatttatagactgttgaaccagtatcactgaaaacataagtacaacagaaatatcatctagaaattatcttgagagaaggaatctaaaattgatttttcagaaagaggaatctaaaattaatttagtttccatgggggcaaggtcttagttttgtacatagctcatgccctttctttccttctcctgcagtttgcctttggccatttcactgcttattattcaagggctagagagaaaaggagagaagctgaaattcagatcagttaattaagctgtttgggaacagctctgaaaagggttgaatgtggtgggtgaaatcaatagtgaactggtggtttgagatcatctacagctctcactacccagccttctctacttcacacccctcagccaacggctgttcaacgtatgaagcattttataagttcatttcagcttcacaggatttgtccgtttgttctggagtacatgttaaggcatatggcctgatttttggtttggagaatttggtcactacaccaacattagatatatcgggtggtctgcttctatagggtaatttcatggtcctaaggaaagaatttaagagtttatgttctgaaactggttcaagaaacattccttaagtgaaaaaattcaatcaagaataatattccctacactggagaaggatttttaatatagaacttccatctgtgatatatttaaattctaggcctcaggcagcagtttcagaaaagggcctcctttaccctttattagatgcaaaatagtctactctggggatgggaacttccttttacctccccccccccgcaaaatctaagacatgcttccctcattcctaaaatcacacatgcttttttttttcacacagcaaactctgctattgacatcaaaatgtttatcaaaactttaattactcgaattattttgtaagtactcctattaagtggaaaagaccagtgaagctgtccaaacggcggcccgcagtcaatgcgccgaaagctgtcaatactgaaatgtaatactctcttgatctagttttgacgctttaacaaagacaggttttgccatttaggaccgctcagccatcttgactgaataccttaagagggtagtcctggacctgcttattgccaagggactttcacagtgttctaagttactgtaggaatctcagcctattactcgacagaggcctaacatgttggagctgtcaataaagatccgcacttaggaagcggaaagaaggcacaagttttatatgcacactttctttattatgcattgttccagccatcaaagagagggagattgtactctcccaaagcttacaactttgttacttttcatgacctgtagcatgtatttagcctttgggcagtgtttgtgcaagactaaggcccactctttaatggctgaatgcatacatttcacagcacatggtggattcgctgctctgagaattgcctttaaaaaaagtaaagtgaaaaatagacaaagaaatctggaaccttagcagtgtttcctatttgtttggactgttcttgaaccagctctgaggcggtgaccgggctattgaaaagatgcacctgaaacaggatctgcgggcagctgcatttgccacccggctttattgctgctttccagcggcgaaggcgcagcagcagtaacagggaagccagagcgagcctccccggcagcggcggcggcggcggcggcaccggcaccagcgcagtttcccctctccccagccctgactctacgcgcacatgcgcattgcgcccgcagccctggaccatttgtcaggactactcgtgagacggagaaaaaaaaaagagaaaatttgggggtaagaagcggttgatcggatctaatctctaattaatctgaagatttgtccgtgcaaaagccattcatttatttttctgggtgaggatgaaagttaagagccctatagagggaaggaa

SEQ ID NO: 37014 - DNA, 2300 bp, Homo sapien
ggggtgaggagagctgctagggaggaagtaaaaggatcagtgtgagactagagtttctgttgagattgaggaagaggcatctgggggtaactgggtttgcagactggaataggagtatgtgtcccagggttggatttttaaatttaatactaagaagcagagcagttcttgttggggactagattcatgggagtgagggcttgaagtagagaggaagggagtcaaaatgccagggtattggataagtcatccatatggatgacgaaagtactcagatggaaaggaagagaataagccagggctaagtgtttgggtggttagcatgggggaagaagaggaggagagttgcttcagccatatggctcgagcctcggcaggggagaactggcctaggatccatggtgtggtgggaggcagcaacccgtcctgtgtctatgggaggtagagttgggaacatgagcacccttggggaaaggcttgagaaggacgagctaggtatgactgtgggcaaggagggtgaggatgtaggagattgtttctcaaagcatagctttccggtgagcctgagatagagactatggggagaacagagagagcttggctcaagggagcagaagctcagaacggtgtgcccacaaggaactagaggctgtaaattactatagggctgagctcttaggatcggccagatatagctgactgtgagagagaggagagaagcagccttctttgcatggggtggctgtagggagtgggggtagctcctgctttacctgagagattgtatttcccagggattccagtctcagctgtatggagagactctgttctctctggggggagtcagcttagttgtaaatttgatgtatgtggtatatcaatacattctaattgaaaaaatgctgatacataaaagaaaatatgaaaagtccatcattcccattttgccccttccttttcactaccacttcctagaagaaatcattattaacattttggcaaatatacctccggacttctttttactatgtgtttacatatgtatgcatatgtgtgtatattaatgtatgtatataaatgcatatacttatgtatatacacataatacacatatgtatacataatcatatacccataaatacatgtggacccccacatgtctaattttctcataaacttaactcattctgtgttatgtgttctaccacttgaattttaactatatgttttagagaactttccatgacagtaactgtacagctacctcactatttgaggattaattgccctggctctgcactctggtctaagttcatcattcagggttctgcaggacagacactcctggagcgggtagaggtctggcgtgatacgtgtttctacttgaacacatcttcttgtgttagtgggaagaagtctcaggggctgaaccctctctctaagaatccagggcagggtatgatccaactcaggtctcgtaagcctatatgaccttctaaatcagaatgtctctaagtggggccctgtaggcatatgtatggcatgtgttatacagagtacattcttactagcattcttaggagcctgtctcatccaagtaataaactaggagagacgcttttctttctttcttccaacccagctttggtggagaaaaaaagcttgacttctgtgcatatgcaccagctgtggtctgcagccttcagtgcagggcagactgtccactctggggccatgctagagctgagtgtgctgtgctggtgtgccttccagcttaccctggggacacatcttggtacaacatagggagtggagaaaggacctgcaattgtgggatattatgctttgccccctatccgtgtggttgtaatgtaactgagaatgttgccagaatgccacagctcagctcttcccactttaatagcttttgtctttagattctggttatttgtttagttgttttattactgttaatgtgggtggtttgattaacattaagactatatcatgcctggtgtccatgtttatttttgtgtatatatatatatatatgaatattctgagttaaaaaaaataattcaacctattttacctgtttcaggtttgtggataccggataaagcttcactttgatgggtattctgattgctatgacttctgggtgaatgcagacgctctggatatccacccagttgggtggtgtgagaaaaccggccacaaactccatcctccaaaaggttttgtcactttttgtttgatattttaaattcagtaaaaactcattttcttacatgctacat

SEQ ID NO: 37015 - DNA, 2300 bp, Homo sapien
tagagataatgcttgccttcacattttgaaatattttcgtatgtttctgaagctcagaataaagctaccagatatatcttttctcatttgatatatagtttatgccttcatggtgtagaagatcataaataatatatccattatttatgtgagaagaagttgtaaagttactactcaaagatgttacgttgtctagccagtgatattgttttattaactctccagaaaagctactaggcaaaaactatatgcttttttattttattatgtttgtatgatgttataatttaacctgttttgtttttcccagaagtagaattgtggtaaaaatctgcaaatttaaaaatacatgatcatttccaagtactcattttattttcaaatttccttttatccatcgatgactacaaggcagtatcttctgctctgcttacctttttatcttcgagtttagagaattcttttattttttctctattttctattttttccctaagtcctaatcttcgcaaggaagccagaagtgtgatagaaaggtgtgatttttaatttacaccagagtctcgcaaataatgacttttcacaccctgctattgctgcttagcctaggggaggggttctgtggctactgtttgtcatagcaaattaaatccactgctgaaattcagaaagatgttcttctatatttaacccttgttttcaatttttcaagttggtgtttgtgaacacttatgattatggggcttaatactttgaagtctacttgttttctaggaaatgattcttgaagactatctttccagcttgtcacatatgcaaggtaaacatgtttccccttttccactattctaactatgatgttggtaattgtaacttctttaaatatacaaaaatgagaaatacaacaatagttccatttaaaacttccatcaataaaatttaaattcacgactgataaccattttaatctttccttatgattccatttctccaagagtagctttttccttggtctttacagaatagtcagtatcttaatttgcaagtaaatctatatcatttagattaagatttgaaattgccaagtaaagataaaaggttaaaacgttttaaatttatttcaatccccccctccaccccacccctctccaagtccatcagaggtcctttggattgaattacaaaaacaaggaataagcttccttagggaaatagttttaagttttctaagtggttgcagacaagtggcatacaaaaataactgaaatagttaaagaatatatcttgcaaacttgcctacgcttctttcacgataattattaacataaataattactttccaattttgaatctgcccaattaagtaaaaagttttcagtcagtgtggtagtttatcctagttatcttaccaatcataacagtgtccaaaaaagttctagaactcagaggggtatgtaagaatagtattggaaggaaggacagaaacattcagattctccagagaaatgtgggtcctacttcctcttcttgctaacggaaaacaatgagaagcagcaagttacaatctccttctcctagccaggagaagcaaggggttaaccagtctactaaggggttaaccagtttactaagtatctctgtcaggcttttatctgatccttcctcccttcctctcctgcccaccccttctgtaaatgtcaaccacttcctgaggagcctggtagtggtgaatttcacacctttcttttctttgtgaagaaacctgggtgttaatggtacaggattgggtaccattgtatgtccctggctgtctgttagtaaagcttagagatgcctgtggaaaaaaagtaggagaaggtgaagaaatttgagaaatgggatgctaggaaataggtttaaatcaggtcttatttttaaagtgagtgtgtgttttgttagcaatttttaaatgtacattgtaaaaatagtaattttaaaaaagcttaacattgagaagataaaggagtctagcaaaggaagcggctgactgttaaaaaaaaaattaaggcacaatcagaaagaaaagctggagaattctctgaccttttgctctacaggtgtatttacaggagacagcaatggaaacctggtcagttgagcaggtctgcagttggttggtggagaaaaatttaggagagctagttcatagatttcaaggtgagttgtttatgctttccaaaaattttaattgagcagcctagatattctggtgtcctctgttactgaaaattacttttgttgccaaatgtctgtgtgcatgt

SEQ ID NO: 37016 - DNA, 2300 bp, Homo sapien
ctgtctctctttatctctctctaacacacacacatacacacaaattcagacacacagactcatatttaatgatggactatagcctaccaattggtatgaattttaccttttgggccaactctaaaaagagtgcttcgggctgggcgtggtgactcatgcctgtaatctcagcactttaggaggccgaggcaggcggttcatgaggtcaggagatcgagatcatcctggctaacacagtgaaaccccatctctactaaaaatacaaaaacttagctgggcgtggtggcacgtgcctgtagtcccagatactcaggaggctgaggcaggagaatcgcttaaacccaggaggtggaagttgcagtgagctgagatcgtgccattacactccagcctgggtgacaaagggagactccatctcaaaaataataataataataataataataataataataataataaataaatagagtgcttttgcataaacaaaagtttgaacattctggcccgtcctcacatgaacctagggctggcagaagcatgagcatttgtcactcatgagaaacacagggtcctatgcctttttgtgtctccacacctcccatctgtgctttgcttttgatacgggaggcgggcagggaagtgctgggtagagaagaatggggtccctggctagggctccaccctcaggcctgtacccatggacgtaagtgagaacaggcactcctgttttcacgcccaaatgttgcattttccaaaagcactctggcccgccacacccccatcctctgcctataaaaaccctgagaccctagcgggcacagacacaagcggctggacatcaagaggaacacactggcagaatacactgacagactggcaggacatcaacagcagtatgatgtggaccacgtagaatttgcctgggggtggttggaggagagtcaggccactgagcggcctgactccaggggaagaccgccttcccattccattccccttgtggatcccatccatctgctgagagctacttccaccagtcaataaaactgtgcacccattctccaagcctacatgtgattcaatttttctggtacattaaggcaagaaccttgggatacagaaagccctctgtccttgcgataaggcagaggatctaattgagctgattaacacaagccacctgcggatggctaagctgaaagactgcactgtaacacactcccactggggcttctggagctgtaaacactcaaccctaggtgctgccatggggtaggagcccatgctccccatgacctgcccgtctgcatgctccctctaggggtttgagctgcagggtactgaagaagcgagtcacacccatcgcacgccctgcaagggtgtttccaagtttcactttgagtcacactgcattaagaagatccactaccttgcatccccttcttcctgaagaggcctacaaagtcagaccagcacttagtgttaacagatcaagagagcccagcttgactctaccagctgagcaatataggtggatacagaagtcacctttcatgtgttctaacaaatgagtaactccaaaaaaatagttgtaatattttaataatgtaagttcttgccactactcagagctataaaatgttcagctatcacctgcactatcacgtacacactgagctatgtaacgagaattacattcagccaatgtctgctaaataaaggtttgtgcattttagttcaatgatgtagctacaaagaaaatgaagcctcaagacactagaaccttctgagatgcaaagctttgagtccttgactttgaattcaatgtctaaattctaatacattattattatatctgccttaagattgatataggaaattttttttctagttagtgttatttcttctaggagcttaaaaaaggtaactaaggaagaattaaatgttccaaagatatattatggtaaacatgtatgtacatacatgggtatttgtcacacttgtcagaatcttcttcctttgagaggtgcaaacgttagctgtctgagatccaccctgtttcaaacttaccttatgcttcctgtgtactgtgaggctcccagtcttgctgtctttcaatggggcagccactgctcagttgctgccattcagaaatatgaacccagtatcaccagaacttttgatttttcaagagaaaccaagattccagatttgtaggtgatatcttccatttttcagataaaacaaaggaaccagaaccacatccactgatcggatttgcctggggaggaggggtg

SEQ ID NO: 37017 - DNA, 2300 bp, Homo sapien
agatactttgttcctacttaagggatgggagaaatgaggtaccaagtccctctgttagtaggtggtggagcttggattacaggacacttggattactctctttctactatgcactcttataagatgggcttgttctagtggaaatttacatatctcatatagacacagcaaaaaatattatgtgtgaagtgcagtgctacttgatggcgagaagtagaaaatagttgacttctatccattatttccaaagccgatgtgtagctgaattcaaaatccattactggcatggtatattcactgtcagatgggaagatattggccattagtaaggataaataatttacctgagattcccttgagcactcaaggtcagggaaaatttataactaatgtgttgagagttgctcggactactgaattgcaaataatcctctatttacaggccattttacccgcctcttctgagactaatagtaattattttaaaaagaaatctaaataattcccttttggtgattttacttagtctatctttcttcttttttggtaaatcactaaaatctgagttcatagttcataaatgaggaagcatcaatatctgtggccttaagaatgtgcttattccttttttcatggctctcatcagtctctttttgaggacggctcagtcactcaatgcttaaaatggctagatgaccattttaaacgttttaccatgggtcttagagaggatgtcacctcaaatgatctatggactatgagcctattcctattactcactccttagatagtgaggggaaccaggaggtgtttcctctcaggagctttacagacaatgtggcttcagggtgtttctttataaaatgtagaggtaactaggaagagggcccaatggaagcacactcctttgatatggtgcttgacaaacacatttaagaaaacctaagagaattgagcaggtggctgtgggctagaatactagatgcaggtggggtaaaaataaaaccacagatggtttataaaggtgactcatccttcccccaccgtaactcctttagttttcttttctttctttttataaaacattttgattgtgacatctccactaaaagtgcccaatctctaaattcttctagtcaaggcaagaaggttataccacaggaaatccatttctacagtctcttctcattgccatatctgattttaaagacttttttttctaatgtggaaatttttgcatggctctcccccaccccccaaacacggattttatacccccccagaagcaaacttttcttgaaaacgagataaacagatcacacgccgaaataaacaaatacactgcaccagaatatcatacttgccttctatcacttaaaacagatccaggggacacaagcatagcacacaccttgtgcatgcggctggcctgcacagggggtggttggaatatccggtaattagttttacatgaaactttacttacggaattggcctgcatatatacagtcatcaccgtctttgccgaattagagacgacatattttactctgtgaacaggccagtctccactcactggatgtttggggtcaaggaggagtaacctgaacctctcgttggctttgatgtttggagtcgaacatccgcactgctcatcgaagacccccgtgcttcagttccctctgtcttccatttcccccgcccatggttctcgcccccccaagccgttctccggaaccccttgccgggccggcgggaagcgtggaccgagcgggccttggccgcgtcttttccggccaggtttggtttagctcgcgcagcgcccgcgcagcccgccagggggaccccggcccgccgggcggcatctgaggagaaagcgtccgaggggcgtggagccagggtcctgcggtgcctgctccgggaatactgcgagtcggctggagctccccagccgctccggagaactgggggagccgggtccctggctcggtaaccggtggtcccgcggtagctagaggcgggccccacgggtgggtgtgtccgtttccgcacgccagccttccagcccgggaagagcgcctgcaagcgggtactttgttcccaaagatgggttttgtctgcgggtgatttgggctctcgaagtgcaactttgtggccgggacgcggatcggccggcctgggctcctgcagagcagatcctgtctgcgtcctccaggaggagtgggtggcaggactggggtttcccacaggttttggggcggcggcgagattggcacggtccggggtcgcaggcgcgcagc

SEQ ID NO: 37018 - DNA, 2300 bp, Homo sapien
aggatgtcacctcaaatgatctatggactatgagcctattcctattactcactccttagatagtgaggggaaccaggaggtgtttcctctcaggagctttacagacaatgtggcttcagggtgtttctttataaaatgtagaggtaactaggaagagggcccaatggaagcacactcctttgatatggtgcttgacaaacacatttaagaaaacctaagagaattgagcaggtggctgtgggctagaatactagatgcaggtggggtaaaaataaaaccacagatggtttataaaggtgactcatccttcccccaccgtaactcctttagttttcttttctttctttttataaaacattttgattgtgacatctccactaaaagtgcccaatctctaaattcttctagtcaaggcaagaaggttataccacaggaaatccatttctacagtctcttctcattgccatatctgattttaaagacttttttttctaatgtggaaatttttgcatggctctcccccaccccccaaacacggattttatacccccccagaagcaaacttttcttgaaaacgagataaacagatcacacgccgaaataaacaaatacactgcaccagaatatcatacttgccttctatcacttaaaacagatccaggggacacaagcatagcacacaccttgtgcatgcggctggcctgcacagggggtggttggaatatccggtaattagttttacatgaaactttacttacggaattggcctgcatatatacagtcatcaccgtctttgccgaattagagacgacatattttactctgtgaacaggccagtctccactcactggatgtttggggtcaaggaggagtaacctgaacctctcgttggctttgatgtttggagtcgaacatccgcactgctcatcgaagacccccgtgcttcagttccctctgtcttccatttcccccgcccatggttctcgcccccccaagccgttctccggaaccccttgccgggccggcgggaagcgtggaccgagcgggccttggccgcgtcttttccggccaggtttggtttagctcgcgcagcgcccgcgcagcccgccagggggaccccggcccgccgggcggcatctgaggagaaagcgtccgaggggcgtggagccagggtcctgcggtgcctgctccgggaatactgcgagtcggctggagctccccagccgctccggagaactgggggagccgggtccctggctcggtaaccggtggtcccgcggtagctagaggcgggccccacgggtgggtgtgtccgtttccgcacgccagccttccagcccgggaagagcgcctgcaagcgggtactttgttcccaaagatgggttttgtctgcgggtgatttgggctctcgaagtgcaactttgtggccgggacgcggatcggccggcctgggctcctgcagagcagatcctgtctgcgtcctccaggaggagtgggtggcaggactggggtttcccacaggttttggggcggcggcgagattggcacggtccggggtcgcaggcgcgcagccacgcccctggaagtccgccccggcccccgcccccaacccgcctcttcggggctttatggcgtgaggtttggggctgggatccatctggagccgagcagaaaacttttcccctcccgttcccggtcccttttgtctttcttggacgcggtggcggcgccgcctgagcggcgactccctctcccctgcccggcttgctgcgcccggtgccctccgagggcaggcgcgcctggactctgcgcccggatggcggcggccctctgtgagcaccggcagcggcgcatcccctgccccgaggcctccggtgcccccccggcgcgggcataggggcgcccccaccctccgtccgcttgcaccccttgccacccgccccctcgcctgactcatccgcccgcggtggccgcccgagccctgggatggggagggagaccgcggctgcccgcggcggccgagattcccgctgacgcccccgaccctgccgccttcttcgtccgcctccagaggcgcccgacgtcccgacagctcctggagtgagaccaggactgagaacagggagaggcgacccgacccccagggcccggtgctcaggacaggtgaggggaaggaaagggtgctgacgggagtggggaggtgggtgggcggccaccgcagccgaaaccgggcacttcttcagccctctgccctcccctcccctccgctacagcctccagagttaggtaaacgctgtctc

SEQ ID NO: 37019 - DNA, 2300 bp, Homo sapien
ttccataattcaagaaacgacaaagtaaatagctttcacaagctctggtaatatttatgcatacagcactatagaaagtgtgcctcaaacttggtttgattgcaaaaccgagagttcaatattctttcttataaacaagaataatcatcgattcttgaaatgttttctatgcagttgtccataactacttctgaaggtattcagaagagacaaggcaagagacactttagtccaacatatttagtttttaaatacaccagactaaggtggaccggactaaggctgattccaattagtcaattacctgtatgtgctgcatctgcctttctctccgacattaccaatgcccggtactgaacaatgaattgttatttaaaaaaaacacacaaacacacacacatttttctaaatcaaacagcggtaaatacacacagagagcttgcgcctacacaatgtgaagtgttggctggaacaatttatagcaaaagaatgattaatgaagcaaatcttagaagccctcagtcctttctcttacagacaagactacagggagaagagtagtgctgaattttgcaaataattgctttgcctctccattttgcctgtgtagattctaccccatccagatactgctttacgaaaccctgaccatactttgctcaatcatgaattaacgctgtggacattacagagaatgctgactctcaggaaccgagacaaaggagggtgttgcttggagaaacccagccaggcgctccagtactccgggttcttggaggctgccccgcacggcttctctcgcgctcccgggactggggagtctggacctgatggcggacttggtttatttcccaaactttaggagagacagcgtttacctaactctggaggctgtagcggaggggaggggagggcagagggctgaagaagtgcccggtttcggctgcggtggccgcccacccacctccccactcccgtcagcaccctttccttcccctcacctgtcctgagcaccgggccctgggggtcgggtcgcctctccctgttctcagtcctggtctcactccaggagctgtcgggacgtcgggcgcctctggaggcggacgaagaaggcggcagggtcgggggcgtcagcgggaatctcggccgccgcgggcagccgcggtctccctccccatcccagggctcgggcggccaccgcgggcggatgagtcaggcgagggggcgggtggcaaggggtgcaagcggacggagggtgggggcgcccctatgcccgcgccgggggggcaccggaggcctcggggcaggggatgcgccgctgccggtgctcacagagggccgccgccatccgggcgcagagtccaggcgcgcctgccctcggagggcaccgggcgcagcaagccgggcaggggagagggagtcgccgctcaggcggcgccgccaccgcgtccaagaaagacaaaagggaccgggaacgggaggggaaaagttttctgctcggctccagatggatcccagccccaaacctcacgccataaagccccgaagaggcgggttgggggcgggggccggggcggacttccaggggcgtggctgcgcgcctgcgaccccggaccgtgccaatctcgccgccgccccaaaacctgtgggaaaccccagtcctgccacccactcctcctggaggacgcagacaggatctgctctgcaggagcccaggccggccgatccgcgtcccggccacaaagttgcacttcgagagcccaaatcacccgcagacaaaacccatctttgggaacaaagtacccgcttgcaggcgctcttcccgggctggaaggctggcgtgcggaaacggacacacccacccgtggggcccgcctctagctaccgcgggaccaccggttaccgagccagggacccggctcccccagttctccggagcggctggggagctccagccgactcgcagtattcccggagcaggcaccgcaggaccctggctccacgcccctcggacgctttctcctcagatgccgcccggcgggccggggtccccctggcgggctgcgcgggcgctgcgcgagctaaaccaaacctggccggaaaagacgcggccaaggcccgctcggtccacgcttcccgccggcccggcaaggggttccggagaacggcttgggggggcgagaaccatgggcgggggaaatggaagacagagggaactgaagcacgggggtcttcgatgagcagtgcggatgttcgactccaaacatcaaagccaacgagaggttcaggttactcctcct

SEQ ID NO: 37020 - DNA, 2300 bp, Homo sapien
ttagcaaaattgtggctggtttgtgagcactgggaatgaaaaaaaaaaaaaagatgatcaatatgtagccaaaagttagcccaaactaattttgtatttttggttgtctgcaggtatatacatatttgtctctttttttttcttcaaattaagagacaaggtcttaatgtgttgcccaggatggtctcgaattcctgggcttaagcaattcacccgccttggccttcggaagttgctaggattacagatgtgagccatcgcacccagcccatatttgtcttttaacttggcctttgacaaaatcatgatctctttttgaagaatatggaaacattaagtgtggctggccttctagttagatttatttataaccagttaaatgatgtcatcaaaatgatggttgctgatcaatatagtctcaggccaggaaacatattttgagcccagtgtctacttcaatgccaggtgtccatttttattgcaattacatgaatatctaaacaaattaacaatgtgtacctagaaagaggtctgtagtggaatatcacagagctttctttgctctatactttcttcaattacgatttccaaacacttgggtgaagctttggaagtcagatttataatatttgcaaatgaacataaactgagagggacaacaggattttggaagccaggcttaggatccaaagagactgataagcagaaattttgttcccaagttaacaaaatgaaattcagtgtagtaaaatccttcacttgaatctttgagggaataagtcacggccctgccctgtcaggcatgctggagagcaaagaggaggatgtggaggtagaaaagtggtctcctttgagtctgcatcttcatacactgaagggatatggacaggtgcaagaggccagatactcacccaaggtgaggccttcaaacttatgtactccccatggcttttcacaggtaatcattgagatttggaaaatgggagttgattggtccacaggcctagttttaaaggcagagcagcattcttttgcatttggtgttatggaaacaggaatcagaataagaaaaaagaaaacctcaaatgaaagcaaatctggaggcccctccccatctcaaatgggaggctctggggtaacctcctagctgtgtgactctaggcaagttacctaagctctcttagcctcagtaacctgaaaaatagatattacaattattactcctccagaattattgtgagaacaaatgtttttgtactaaagcacttagaacattgcctgaccataagcagtatgggctgttattactattattattaaaacttagaagagtatggcttgttacagtgaggagactagttaacaggattcttacatttcccatgccttagaaaaacatgcaaaacaaaacaaaaaaaaacagtcataaaagtgtaggatggagggcatgtagctttgcagcattgaccaaaaaaaaaaaaaaaggtagatttaggctgtttttgcatatactgaacactttgtaccaattggcattacagtttgaagatgcagagcctgtagattcactcattctagattttatagtttcactaggcttcgtttttctttatcctttttttttttttttttttttttttttttttcagagagacaggttcttgctctatcacccaagctgaagtagtggcatgatcataactcactgcagcctccagctcctggcctcaattaatcctcctgcctcagcctcctgagtaactgagactacaggcatctgccaccatgcctggctaacttgctaaaaaaatgttttgtagagatggagtcttgctatgttgccagtgctggtcttgaactgctggccacaagtgacactaaagccttggcctcccaaagctctggagttacaggtgtgagccactgcacccagccttcactaggctccttattgtgcaactgccgttagcatccccatgccattttccggtattggtccctaattcctgctttcatctacaagttcagattaattttttctaaaataacaacagcagtatttatgtcttactccaactccatggcagatgtgtataaattgcaagcatttaggaatagcatttgccaactcccaagacttggctgtccctctcgctctggccttacttacctaactgacctcctgtagtactgagttgtgtgctggccaagttcctattcctggactgctttctttcccttgaccttccttgaaatactgctaacctgacttttgactgtgatctatgtgctatctcctg

SEQ ID NO: 37021 - DNA, 2300 bp, Homo sapien
tgccctatcctccttaaaccctaaccagcgctcctgtcatgtgtttgaggagggcattcttcagctacccaccttccaggatcagctcaaatatccctctttctttttttcttagccaggtctcattctgtcacccaggctgtggagtgcagtggcacgatcatggctcactgcagccttgacctccccaggctcaagcaatcctcccacctcagcctcccgagtagctaggactacaggtgtatgccacggcacttggctaatgttttatcttttgtagagacaggatttcaccatgtttcccaggctggtctcaaactcctgagctcaagcaatccacccacctcagcctcccaaagtgctgagattacaggcatgagccactgtgcccagcccaattccatggctggaattaatcagtctctcttcagtgcttccactatactttgtttatatgttgatctggaagctaacattattgtcatttattttcctgttcccctaacttacctttgtttaggcattcaatgaaggcttgctgaatggaaatgaaacaggaagaaagaatatgacaaacagtctgcctaacagctgcctgacatctccctggtaatgtcacttgctcacagaggttctttgaagattgacactttacaaattagcatcctgttcaaactgaaagagcaccagagaaacatctcaatggaaggcatgcaagtataatagcagtaacaccattcacaggtttgcagagtgggagaagagaaatacgtgagtaaatgaatgctgacttaaactcaggtattctgaagggttcctcctgaaattaagatgtctctcttctgaaagagaagttgctaactcttcattgatcaggaatgcaggcatgtaccctgagaccctctccagtcttattattttgtaaattagggtgcaaactttacagctggggctaagactgcatgaccatgcaaagtccctgatgcaagaatgtgggaggcactgacagcggcttgcccttgatagactcctccagccaccactaaagggcgccagggacagggttagagtgtgacagaaggaatgagcccaagaaggtggctgccagtttctcttccccacattcttccaaattctccagggcatcttttgaatatgactcttttagtcagttttcatttttagaccaatatttttggaaatttttcactaaagcagtcaatgacaactcaacatagtcaacaagtcaatgtcaactttgacattggtccattgattgccctttcttttcccagaaactctggagttaccacacaacccataccactatcaatgagaggccaccttctaactgcgaatggtggaccacaggaaaggcccagtagagcagaggagagtatatgacctcatgcagccagcaaggacgaatgtacctcaggaagaaggagatggggctacatcatgggccactccgccacggacactgtggccattctctgtttgtctatctccactcttaaaggccaggggccatgacttactcttctttgtatacccagcatctagttcagaagttgggttctagtagaattaaatgtttgttgaataaatgaataaaccaatgcacttctcagagaagtattctgagtaggatatatgaggaagaatttctacttgtgggaaaagccttgtttctctttccttggtattaattgtatcaactatgtataaaggaacattcacttttttctagacataagtacttaggtacagtggcataactattaagaaatttttaactctaaaatttaggaaatacagggaaaactcttctgtgtctgagaatacatagaaagaatatacataacaacaagttttgcttggttgggtaattttcattccaaataaacttatcacaaaaaaactcagcttcccaaggtcattcccccgctgccagatacatacttatctctgaaagagcttggaagatggacctttcaattcctctacaattagtagctgagttacagagtaacctgccagcaatcctatcagcattcatcagactatttaaatagagcaaagtccacaaaaaattccactgagacatgctgagcaaaggccggagccccagaagaaaacaagtacagactcagaggaaagctgccctggtcctgagtgtgactcccatggtccccgtggggtctgtgtggttggcaatgagctctgtgctgtcagctttcatgagggagctccctggctggttcctgttctttggggtcttcctccccgtgactttg

SEQ ID NO: 37022 - DNA, 2300 bp, Homo sapien
cctggacttgtcagcattgccgtggtacaagatggggacggcaggagggaagtgagaagcccaactaaagccccacatttgcagctcattgaaggaaaggtatggtaaattagcacagtatgtggttttaaacatttacttaacctagagggtatctgttgtattttctgtttcagaaatcaagtatttaaaattagttgttctatgttctctgctggtcatttatgttttcaaatatgcatagtggtctctaacctttgattgttgttcaaagcagaatatttcaatgtaagttattttaatgcaagtaagtaatttactggcctttttgactgtcctcataatcaccttatctaattgaatcctcaaagtagaaaagctatgatgatttgaaatttatttttggtttggtccaagtaaaatttaaaatgtagcttcttgattattttaattattgacttgaatttttttacatcaccaaagataatctttatgaacaaatgtattcattaatgatctataattaatgaaattctcaagaaaaggtaattgttttgtgaatagagagtgagaacatggtgtgttgcttttggctttatcttgtgcgtacaccatggtgaaatggagaagtaacccatattgtgttctcaaatgtgtcactgttatcttttgttaccttgggcagtaacatcacttgaatattgatttgagaagcctttgaattcttcagatctcttttctgtgtctgcacaaagcgacttttttttgcatgcaacattggaagtaagcacagataaaaacaaatgaatccatcatattgatttcatagtgttttctattttattttttttattttttcgagatgaagtttcgctcttgttgcccaggctggagtgcaatggctcgatctcagctcactgcagcctctgcctcccaggttcaagtgattctcctgcctcagcctcccaagtagctgggattacaggcgcctgccaccacgtgcccggctaattttgtatttttagagagacggggtttcaccgtgttggtcaggctcatcttgaactcctgacctcaagtgatccacctgcctcagcttcccaaagtgctgggattacaggtatgagccactgagcccggccgtatagtgttttctaaattttaactttgaaaatttttaaaagacataaatgtataaagacatgctagatgaagtagctgccagtgcctcaggaattcctacactgatagcctctgaggcccagcatggagaaggtctcagggaccaccacatgggcccagtcttgtgccacaaggtcaagtgctacctgtatagcaagtgacatcaaatcatcgacattccatcgttaaagaatttgtgactgtcatatggaaaaattatttggtggggaattcagataaaaataacagaaattgtgaccaacaaggtttctttcaattgctgacaagttgtcaggatagttctttaaaaattttgctaacaaggcacccaggagagtgactgcttacatctgaaacagaagagctcagcatttcagaatatctctgttccattttgcctagttaacttgacatatctagttattttccttaaaaaatgaaaaagttcttttaaatttcaaaggaaatcctccttgtctgcggtgaacaactgggtacactggcatttttgctaatgctttgaatgtctgtcagcaaccaggtttaaaagtaaataatgctgtttgagtttcatgggatctatttgcaactagtttgaaaataattaaatgagtcatatgtataaattttatgtgacacaagtagtctagtcttttctctttaaaaatgggtcatttaattcatttctaactacactgtgttaatatggtccctcctttaaagtaaacgttttcactaactactcattttttcttttgtcctctttctctcttgcatctgtttttcctttgattgtatctgttgtgtaatttcatattcaatcatgggtttgcacttgagaatagactgtttccatgtgcccaccttcacctctcatccaccgtacttcatctttttccccaaacctattgcctgtccctgaaatggacttgctttcagacatttcagaggaagacccctttggggaggctgaccagatcacactagacagcttagagcacctttccacaggtgaaatatcggagcagggggattctgaagttgctatgcctgatttggtcttggattctgccatagccccttctcagcctgactgtccttctcccatccatgggaag

SEQ ID NO: 37023 - DNA, 2300 bp, Homo sapien
taaatccatctaactgtaacgttgagtgaaaaattgagaccacccaaacacagctgtttagttaatttggcccaagcgattggaagaagtttgaaaaccattatgatgtggctggattgttgccattttagggttgtttgatgtgaacctgaaagaaatagaggttaaaaacacacagtcatatctgaagtatttctcttccaccatattaaaactaataaatccattaaccttttaaaatgattttgccaaagtaactatcatctcacatgccagattccttttactctggaatgtattcacttcattttgctgaattcctgtaggaattcgtagctgtgtaattcctttagcaattgctcatacacagacttacggcatttattctaatgtcaccttgaaatttgacctgtttattaatgttaactttccatgaggttgtctgtgttagcggtctaggttatcagctcctcagggacaaggctgttgtattgccattccccttctttcttctctctcccctccactttccctcgactccatagtgctagcagagggccttgtacgttctcagtattattgctaggactggtgaaaaacgttctgagtgcatttggggctaatttgaggacaaggtctcttctctgtgtgagtttatagttgtgctggcactggtgatcgaaggaatgcctctgaaaaaaaagcaagtctggcatgattggcacactttgaatcaacaggtagttaaagttctttttgaggcagtaatcatggcttcagactcacctttatttgcatttgactttagtctaaatctagacaaatctatatgtgacggctcaggtgaatttggtgagatgagaaggaatgtctgaaaaatagatgattgagaatcattagtttttgttttgcttggaaatattcttccacagaaatctttagaatattaaatttggcatcctaaagacttatggacaattttgtgcatttctcggctttctttatcttgagggaagaattgaagctggcatgggggcaatggagaaatttagttttgaaagtctaaggagagcagggaaaaaaggaagtaactttcgttgctaggatctacttataggtagggaaagaaggacaggaagaaagaatggaaagagatcaagaaataagggggataaacagccaaatattagggtgggattaattctgaatgtcattttgcaaagttggttatacttttcgttcttttccaggaggttttcaaacgcatggggtgggtggggaaactccggtagagatgacagcttaagtgttggagaaagatgacggaaactgtcctgagtgactagatagagtaggaagaaacagaactaaaaaaataaattcttttttttctggcagcactctgcgcttcttataatgctgtacttaacttgttctctagtgttgtaccaaaaagtttgttccatgtaatataaagaatctctgttttgactgactgcttgcctgcacatgcttgttcgcgctcacgtgctctctttctctttcccttgccctctctcttgctctctctcagctgcttgtctcagagtaggcattggagctctccctgtccctcaacttgttcaccatggaagtgtcaggacgtagacgtgactgattctatgagcttcatggagaagcagccacatcactttatagtctaagcacacttgagtgatagcatgtacgcactcatttacgctctcttctcttaaaataaaagagaagtgtctagttgtatagttggaatatacttggcagaaagtttcttgtgttgctagagcgggatctcatttctctttagtctttgtttattattcattatatttaagtaataatggagctgcactccagatcatttggaattatttttcatctgtttttgtttggctctggaaaaaaagaagtgaaataatttgggaattcatttcatgattggaaaagcaatgctgcttcctaaggatatttatgtttacctttgggctctattatcagtctcattatctcctgacccagggctgggcccctctgacttaagcactaggactggattgtgtcagcactgtacttaaggcgtttatcctaatccaggcgtccttggattgcacggtgccagcaagcaaggtggtaacagtgatcacagcctgggctgcaggtgtgagttctgaggagatctatggtttacccagcgaatttattactgataaatgtgagtcgatttttccttgggatgctccgttgtggggcaagtggtatttctg

SEQ ID NO: 37024 - DNA, 2300 bp, Homo sapien
tgcagcctggtagtcctgacagtgcttccgcctgcctgagtctttggatgtcacctattccaggactttgtccttctttctgttcaaacccctcttctcttcttgttagacttccctggttgtctggactaccacctgttgtttgctaaatctctatgatgccacttccatcagttttcttcacttccttatagcttctgggacttgatttttctgccctcagttcctgctaggtcctcactgaatctgttccattccattaaaatgccagggctatgtaaggctgtgtccaaaaacagagttcaattcttctttcacacaatagcctttatacatttgacaacctttttatcacctttaatcatctctttaggctaaatcttgctggttcccacattttcaaggtcacccatttatggttataatttagcttatcaatattttcttttggagggaaaaatttcttcttaagaggtggcatataggagtgattcatgtacttcaacgcagagtatagtaagcatatcctttcttatgagaagggcattatattttattaactatgcctatatttatgttattttgcactagcattttaaagggggctccatcagggtggttcaatgttttatgggcccaaaagcttatatgactttagggactctttaaaaaacacaaaatgaaatacaaaattataaagttagtttcaaggcttgtgaaaatgagagatcccgaagtttgtttcattagtttcgttgtaaatctgctgcatatttcttattatgagaaaataatagtattttctcattaaattcccaggtctcctttaccagaattgctgtctaatcagatttctgctctgttttagcacaccttataaaatttaacttgtatacttagcatatgggattgtgattaaattaatacatgtaagggacttagaacaatgcctagcacataaagcacacaatcaaccttaactattattatttgtattatttactagaaggaccttggcaaataatttatcttcccaaatctttttgatgtaatggagctcaaacgtgcctgcctttttcatagggtgattgtgaggatcaaatgatgataaaatatgtgaatgtattttgttaactggaaggtattgttactgaggtttcatttgacattgttaattttggaaaaggttctgtttaggaaagaaagggagacgactttggctgtggtggaatcactaaagacctcaataaaagtgggaggagtaaaagggataagaggtgcgtgtgaggcagatgctggaggcagtgagctggacacgttgtttgacaccagcttgacgtgcaaaccttcaaaagatgaaatatattgaatctgaaacatattgacctcattgtacaaaagaaaagaaccagaagggtagcgtgtgtgtgcttgtggctttccacaatttagccccaaactaggttttttccagactcttcttcacccgtggtcatgctctgcaatccagattcccaggcctctgcccagagaaatcctacttactctggggaggcctttcctccacggggtttccccaacccctcctgtccctcccacaggaagaataaatggttccttttcaatgcccttcctgtgaaagcactttttccactctagactgagggagacccagttttccttattctgcatctccaggctctgctccagtgtttacctctaggaaggcgctcagtgaaggtttagtcagcaaatgcactttgaataaataacttttaaaagttgagaggacatttaaggccgggaatcgcagttgagaacgccttgcccaggcgcattagctgtcatccgggctgccctgagggcgaaagacgtcctccacccccgggtctccgcggccgcgcttgccgaatcccgcgggaaaggtcccccgcccgcgcaggggcggggcctgggcgtcgggggcgggaccgcccgcgggggtttccgcgccgggggctcgtccggcggggtcgcgggaggggcttccgccgcgagggggcggggccggccctcagagtcctctgacggccccagtcagggaatttcaatttgaaacctagcggagggaggaggcaggcgcggctgccggcggctgggactgaagagggacgggtcccgcggcgagcgagctcctgaggtacggcgtcggggtaaggaggcgtgcggggctgcacgggccgggcgactggtcagtgtggggttgcaggggcggctcagatttttcctctggctgcagctgggaagctgattccgggcag

SEQ ID NO: 37025 - DNA, 2300 bp, Homo sapien
atgataatagtttttatgtttgtctcctccaaatcccgtgttgagatgtaatccccaatgttggagatagggcttggtgggaggtgtttgggtcatgggggcagatctctcatgaatgccttcgtgccctccctgcagtaatgagttcatgtgagatctggttgcttaaaagaggctggcatctctgcctctctgtcttgctgtttttcttgacgtgtgacatgttggcttccctttgccttgcaccatgattttaagcttcttgaggctctcaccaaagcagatgctggcactgtgctttgtgtgcagcctgcagaactgggagccaaataaacctcttttgtttggaaattacccagcctcaggtattcctttatagcaatgcgaatggactaatacaacaggggtgtgtgtgtgtgaacaatagtagagattaatcaaattgcagtaaaaatgtgtgttttttggcttgtatgttaactgtggcctatcatcatagccatgttgtagccatattctttttttttttttattttttattttttattttttatttttttattgatcattcttgggtgtttctcgcagagggggatttggcagggtcataggacaatagtggagggaaggtcagcagataaacaagtgaacaaaggtctctggttttcctaggcagaggaccctgcggccttccgaagtgtttgtgtccctgggtacttaagattagggagtggtgatgactcttaacgagcatgctgccttcaagcatctgtttaacaaagcacatcttgcaccgcccttaatccatttaaccctgagtggacacagcacatgtttcagagagcacagggttggggataaggtcacagatcaacaggatcccaaggcagaagaatttttcttagtacagaacaaaatgaaaagtctcccatgtctacttctatccacacagacccggcaaccatccgatttctcaattttttccccacccttcccgcctttctattccacaaaaccgccattgtcatcatggcccatccccaatgagccgctgggcacacctcccagacggggtcgtggcggggcagaggggctcctcacttcccagtgtagccatattcttaatggactatgttttacaggtattgtatctgaaaatagagtattacaagagaatgaattaaaggacttcttaaacatcttgagtggtaaattagtctttagtaaatatgtagagtaaaaattatattagtattccaggattctgttcaatcttattagttcggacagcatttgtgtctgtcaataaaggcatgggttataatggcactggggagaccaccatctgataaatttagcaattaactttatcaatttaaacatacaccttctttctcttacctccacccaaggtatatgattgttctacccatagcaagaaaacaaaaaaagaccaaataggaaatatggctttaaagttagtatatcaccatgggagaggagttagggaaactgtaagatcatttgctttttaataattgaattttcagaaaagcatatttagaaccatgtatttttaactaaatatccagtgttaaatataatgatggagagaaacaacttaaaagtctttattgaagaaaaaattataggccagaacttgtacaaataagaacacataagtgatattgctaaaaataagaatgagaatgactgacaaaccttgctggttgttttaaaaggtacgtgaaaaaacgtagttttagaattaaaatatagctgtaaaagatcttgaggattattgattgactcagttttcatctaatcatacattgaatactgtgttttagaaaatgattaaagctttataagtgtacaaaaatatagagtgtggtataaatgtttatataaatagctttatgatatatttgaacacaagtagtacatttcttaacagatgttaatttatattgaaatcagtgagctgagttattttcatttaggatatgtttaaataatgacaagttaaataatccttttttttctgtttgtgatatgttaaaggaggaattaattccaatgagtgtgaaaatgtatcaagaaaaaagaaaatgtcagaggaatttgaagccaatactatggattctctggtagacatgccatttgctactgtagatattcaggatgactgtggaagtaagtactttattaagtaaacgcgtatttagaagcaatgagtagtaaatttagttatatatatatttttttctttataagttgtttcacttttaatacttatg

SEQ ID NO: 37026 - DNA, 2300 bp, Homo sapien
aattacagataaagatatcaaaactctgaccaggaggcatgagtttcataactgttaatacctgacatctgggatttaaacccatggtttcctgactctaaaggttttatcactatactgatgctggtgattgggaaatgccaggagttactaattttcctcagtgaagaacgttccctgcaaatacatcttcactgaacacaaaaagtaatgtttaggataattgttcactggttgttaggctatttcctttgttattttgatcacaaaatcatataatgctagtactgtagaggatcctaatatgcctactgccttatttttgggtgaagaaactgaggtccagagaggaccaagggcttctctggtgtttcctagctgggtagtggcagtgttaaggctgggaagaaccacattctgtgtcacgtctccagtgttcaaaatttgctgtaggttctgatgtttccatttttagggttacaggccatttatttgctttctggtcttaataaggtttatattattgcttttaggactattttacatttatatacaaaatcattttatattttaaaacatacacctgtattcactcatgtattggtgaatttgggggaatactggaagagtttaaagttgctgtttatttataagtcactaagctgtgaagaaacccaactggttataaaagtggaattttacttaaaattataatgttcattgtatgatagaatggagtgtcctctttaaaccaaggtaaaataagcatctttacattttaaatagtctgaaaaagtgaaagcaatttaaagacatgtaattctctaaacattaattttaattatgtggatagacctgccagtttaatcagtcagatctttgctttttattccatagatcttcacaatatttctaatgtggaagtcaaagtgcatattaatgtacctgtgacatataaaaacaactgtgttccttgataacactctcaaatactctttgatatttgcatcaaaattatcaaaattctatctttcagaaaaaaagcattgaaaacagatactagtgtttgccagcatcttcactgttttttttaatgcgacaaatataatttgtaaaattgacaattttcatttttccatgctgcaggctctttttgtttggatgatcatgaaagtaggtggactatgttcagaaccacttgaggtgttcagcatcatcctgttccctctccttctaatccatgggaaataggtgtgcctagctagtaaatagaggagtaagaaagaatcagggtggaatttctggcactatgaacaatttttctttcctagagtgtcataaactaaggctattccctctataagataacagattttgaacaattacatgaaatctgttatttcatgtaatagagttcaaaatatagcctttcttaaaattagttgttttgctgcccctgaatttgctcaatcaccttgtggcttcattcagaaagatgccctaatcttttgtctttttgtcagtgatgcatctatatttgggtaattttctaggctgttgacatatttgatggtataatttcaaaattaatattattgattactgctttactaggggaataaggcaatatatcagaaagcaggaatttaaaagatatgccgtaccgtacagataacagtcgatagcctctttccccacacttagcctatcatttctattgttcatgcagtttgctaggtagttaatggtacttcatacaagttgtgattccagtgttctgctatgttgggttttctattcataaaccacaatctcctagggataaaagaaggctcttcctctttaagtagcagacagaaaatatggtttttttgggggtttgaattttcatgtgtaattactgcagttgtctgtaggagaaagggctcattgtggtttttctcgactacctttcttaaagacatatgcaaatagccagacagaacacatggcactgacctatggccagggactcacagttttgtgagaatacgggagcgtatagccacttccttcactgaatgccagtcccagagcagttgcattaggctggaggactggaggtggagccttttttgctcacggcagcaagttcccttctcctttctctcccccggcggcgtgtgcattggctcttcaagctgcctgtgctgctccgtggagtgaaaaaggcagggtgtgctcgcagactgtgctataaactgcaatttctatttggggtcctcacggagaagaacaccaggaaagacagacaggaccag

SEQ ID NO: 37027 - DNA, 2300 bp, Homo sapien
aaacaatagaaatccaagaaagacatgacagccaagagataatgtgctttacttggattaaagggtggtgaccaatggttcatatgacaggaaggcaatctcagcttggcatacaaagaactttcaggatgtgaatttttcaaagaaaaaattctagcaatcaaatttgaaagttagcaaatctccatggattgatttataaatctagtaaaaattctagcaaatacttttaaggaattaggttattccaactataggagaatagagacccataaaaggtaaatcaattttgaaaaagaagagcaaaacagttactcttgcctaaacaatgataagatgtaccgcaaaactgtattgataaaacctgatggatctggtgcagccataggtaaataagtcaatggaacagaagaaagagtttagtgacagacagcactccaatcaattgcaaaatgaatgactattcaatgggtgttgttgaggaaactgatgcatgaatgatagaggaaaaacgagttggaaaatttacataacatacaaagatggattcaggaactaagtgagaaagataagctctaaggcaaatggaagaaaatgtaaaactacatacctacaatttgatggggtggcaggaatttaataagacttccaaagcacaaagcattcgggggaaattatacaagtgtctattttaaaattgaggattttgagtgataacatataaaaagttatcagatttctgacaggttgggaaaagttatttgcaatgtcaatgctataaggttaatatctaggcaatatgaggaataccacaagtaaatatttaggatatacaagcaaacccacaagaaaaaggtaggaaacctatttggaaaacagtcctatcaaaatggacccatgagactttggtttcctcatttatccattcaataaatatttattgagtgcctattatacaccaacactcttctaggccctggggatacagcagacaaaattctctgacctcatggaatttaaattccaaaatgttctttcccaccaataggaaaaagaaattagtttctactaagtgaattttccctttaaattacaattacataattttaaagtcggaaggatctttaaggtgcctttattttaaattcatacttttgtatggtgacaaatggtagctcaggggcatagaggttgacaccttcccagcatttagactataagctcgacggttaagtggattcagaatggcagagactaaatcccgacttttcttctacagcctatgttggcaacgggtctgagcttcagtttattcatcagtataatggcaccaatgatgagacttcacataaaattggtataaatataaatatggtattttgaaacagaactgcatcggacacatggtaaaaactcaatgttagctatttttatttctatactttgattatgatatgattctacaattattttcctgtacaccatacttcaaaaatggtaacctctctgggttaccaatcaagtaactaattttttaaagtaatcatcaaaaaaggaagttatatactctttattatattataccctaaaagtttatgaaatgtgtctcatggattaaccatttaccctcatgtgtgaaatctcaactcaggattttagggctggaagggatgtgacagacgatcttgccaagcccggcccttcttctacaaggacgtcttcagagatctggaggaggaaagggccttgccctgagttcgctgagccagaacaataggacttcttctgtagttgtgaaacttgtcagttgttgaagtcaggttaatgtcatctggctggctttttaaaagggtgtgaagtgagaacatgaataattgtcacttgattagagacctagactcagagttaggttactccatgtatgaagtaaccccatatagttacttcatacatggagtaaccatatagttactccatgtatgaaaaattgcaagactgttgactgtcattctttggtttagtgggtggagccagctgtcctcattagataaaggttgtttattcaacccaagtataaatggaaaaaaaagatgcgccctctgtcactgagggttgactgactggagagctcaagtgcagcaaagagaagtgtcagagcatgagcgccaagtccagaaccatagggattattggagctcctttctcaaagggacaggtaaggaaaaaagtctttctttgaattcctggaatttagttgaaaattttggacttcaaaatttgtaaggtgttattgtctagtt

SEQ ID NO: 37028 - DNA, 2300 bp, Homo sapien
atatatttctgatgggaatgcaaatgatacagccactttgaaagtaggtgggcagtttctcaggtaaacatatatttacattttgacccagcagttctactcctgggtgcagagaagtacaactacaaacattcaagtacaagtctttgtgtggatatgttttcatttctcttgggtaagagatttgtgcttgaatgtttgggggcagccatatttataataaccaaaaaatggaaacagcaaaatgcccatcaactggtagatggttaaacaaaaagtgtcacatccatgcaacgagatagtattcaacaataaaaaggaatggactggtcgggcacggtggctgaggcctgtaatcctatcactttgggaagccaaggtgggtggactgtctgagctcaggagttcaagaccagcctgggcaacacagtgaaaccccttctctagtaaaaatacaaaaaaaaatagctgggcgtggtggcatgagcctgtagtcccagctacttgggaggctgaggcaggagaatggcttgaacccggaggcagaggttgcagtgagctgagattgcgccactgcaccccaacctgggcgacagagcgagactccatctccaaaaaaaaaaaaaaaagaaaaaggaatggaccgcaaacacaggcaaaaacatggtagatctcaaaagcagcatgataagacaagaaagactacatgtatgattccactgatacgacattctggaaagacaaaagcatagcaaaagaaagcagatcagcagttcctggggttgggggcaagaattacctctaaaggggcaggatggaatttttcaaactcattgacccgcacagttaaaattagtgagttttagtgaacaagaattacacttcgtaaatctttaaaaaaaaaaaaaaaagacaaatacagacacccagtagagaacagaatgcttgggtaatggacttgtcccttaactgacaagcataatttggtcacgtgttgtatcaggtgaaatttcttggaggcgttactaaatcagattcacacagacatgtaacaaataccatatttaatggccaattagttcagaacaccgaactgaatcacagttttacatgacactctctacttttcaagcctaattcaaggccttttagggagcacacccagtccttaggaatttggggttacctgcaatttttccttactaaaaagaataactaaaaagctttatttccgaagcttccaaagtgttaggctcagtgctaagtacatattcacatattcttatttatttatgataataccactatgaggcaggttcaatggatactttgtgtgtctgtgtgtgtgtgtatctccagatgaaaatacaccagtgctttctaaattttctgagaatacatatatataccgatatatatgtatttaattattatcaaaatgaagcatgcttactatagaaaggtaaaaagcacataagcagagagagacagagagacagagacagagacagtggcattccctattaagcccaaaccagaagattatcactgttacattttggtgtctagtttaactggatggattcaagaagtgttcactgagagcccagtatacagccgcaccagtgtgtgatactggtaacatgacgtcaagcaaaagcagacatgggtctaccttcccaagatttacagacctttcaggtttttcctttgcttatacttgtgaatatatgcctattttatacaattgagatcatcctacacagactgatttataatctactttttaatttagtaactcaaaactttttaattttagagtgtgatgtgaaggattatggggacctgccctttgctgacatccctaatgacagtccctttcaaattgtgaagaatccaaggtctgtgggaaaagcaagcgagcagctggctggcaaggtggcagaagtcaagaagaacggaagaatcagcctggtgctgggcggagaccacaggtcttgttgaataactgtgtctatgggaatctggcacaaaggaagtaaccaaggccataagaagagagaaaatttagaaatatagacagaaaagcattgacctatattttatatcaaattttctgcctttaaaaaaattttataggttacttttattatagaaacagacttcgctcaatttgaagtcttacaatatctgtattttgacctagtacagcagaaaatgtatgaaatatgaatggatttcatctaaatattcatcacaagcttacatttctaaataagtatgtgaggcaattcatagct

SEQ ID NO: 37029 - DNA, 2300 bp, Homo sapien
ttcagatgtttttattctacccaaagtaatgaataatgactgagcaccaccaagtaccagactttatgccaggtgttaggaaatgcaggcatgtttaatttctgtatctactctaaagagctttagtctagttgaagaagtagacattttaaaccataatatagtgtaatctgtgcaatactagtagtgctaataaagtgccaggaggaaagaggaagaaatacaaatttttctacagaaagggatttagaaagatatctacgtgagtttgctcagactgctgtgaatagcatactataaactggggtgattcgagtctcagcaaactgaacgctgagaactcaggcttcttgttccttttggctgcaagaaggttggcagccagtcagaactttacccacttgtaagagatcaggcttcttgttccttttggctgcaagaaggttggcagccagtcagaactttacccacttgtaagagattagatgtatcttccttggtgattcagaccagcctaaggggaaagacctgatgataccaactttggggattctccaagaaacaatgtccccagaacacactataaagatgctcaaagttgataagccctgcccagctgctcagagtttccagttggctctttagtcccccactctaaatcctgataggacaaggatggaacaagaagcctgaattctcagctttcagtttgctcagactcaaattaccccccagtttatagtatgctgttcacagcaatctaagcaaactcccctaggtatctttctaaattcctttctgtagaaaaatttgtatttcctccttttctccctggcactttattagcatcactagtattgcacatatcacactctattatggtttaaaatgtctatgtcttcaactaagctaaagctctttagagtagatacatgggccctaacctgactgatgtccttctaggaagagaaaattacgacacagacatgtacaaagggaagaccatgtgaagacacaaggagaagaaggtcatctacaagccaaggacagaggcctctatagaaactaaccctatcaacctcaacctcagacttccagcctccagaattacaagaaaagaaatttctgttgtttaagccacccagtctgtggtattttgttatggcaaccctagcaaacaataccctaagcctaacttttcaagtttttctccagcaggaaatctgaattatttcttttcagcttttagtagctattgtgtggacaacatggttgcatgtgcatattaaagttgttagaaaactaaatttatgccaggtcagacacttgtataacaaaaccatgaatggggagtcatcagctcatcacttagcagctacaaaggagtagttcatgcttagcagtttgtggcatttcacaaccgtcaaagaagtgaaaggcctttggatgtctatgactctcatcaacaattttctttatgaggcaaagaaagctgatcattcaagacataacagatgttttaggggttggtgatgatggtggcatatgaagaaaaacacatactctcaacaatataatagcaaatagaatctagcaatatattaaaaaggataatatattatgaccaagtagcatttataccatagaagcaaaattggtttggcattcaaaagtcaatcaattacatttgcactgaggttatcatagctgagaagacaccgtctctgtggcttcagctcctggctgcaggccgctgatggaggtccagaaggtcagctgctcacagacatcaacttggtgtcggctgcggctccagcattttccgcaggctgcagcttctgggttccaaacttttcatttctcagtctgcaagcgggttagccccgaacaggaagcaactccttctccagccgggaggtggcggcctgcggtcgacgatgcctccggggtccttgggctcaaggttccgtttgggggcgctctcgtccggcttgcgggccgcccttctccacagacggaaccttctggtggcgccgctggtttctgcggggtttgcaaacggcgcgtaccgggcccttcccgtcttccgtacaggttcctgctgttggctgggctcgggagggaacgctccaggtaaagcgctgggggaggaagcgacgccgaggagctacggtttcctccagaggtctccgcccctctgcccctatattcccagagctcgagtctgatccgggccttgccgggcaccctggaaaggcgggggtgatagtacagatggagacgcaactgcagagcatttt

SEQ ID NO: 37030 - DNA, 2300 bp, Homo sapien
ctgatacttttgctggttagggatataggtggaattggtgaagtgggggtatactggaccaagggagtgatggaaaagatgagcacaaacccataacgccagaaaaggaaacgtggctctcatgctgcagatttatattttatttatttttattttttcatttttttatacttttgagacaggatctcactcttgttgcccaggctggagtgcagtggggtgatcatgtggcaggccaggtctcacaaacaggcaggcctccataataactgtttcagcactgactgaatggttaggttaaatattaaaggctgagagagccagtgcccttacacaaagtccagaacaagtaacaaaggcccaccaagactctttcccaggccttcctgggccttgaagcatgacaagataacgaaggaatactcacactccttgtgacaagacagtcttcgggagattcccagcagctgccgggtgaggttttcctggagactctccccagggctatcccatgtgcaaaaccacacgtccctctccctactggggaataacggagatcggggtggacgcgctcaaagggtaaaaccagatttatgccaggagcctattattttcccatctgggcttgttaagccatttgcctggtactgccagggaagcaatagggctcgcttatacacctgctttgcatttggttaagatcaggttttgagtgggttttgagtctgttctgcccgagtgcaccccctctcttgtctttgtctgaaatctgtctctgcttgtttgtgtatctgtcatggctcactgcagcctcaaactctggcctcaagggatcctcacacctcaacctctccagtagctgggactattggcatgcaccaccatgcctggctaatttttgttgttgttgttatagagacagagtctccctatgttgccccggctggtctcaaattcctggactcaagcaatcctcttccccctgattttcagaaatagtgtctaaattctatgatttagacatgtttagttagagtagtgatgcagtcattgtatttatattagaatacattcttttcatattttttttctcactgcttttagggttggaagagtttagttagttagagtagtgttttccaaagggtgtactgcagtctacaggattttgataatcttttcattagaggagtattcaagctttatttaaccaagggggttgtcatagaactcatgttccatggaaccaaactttgagaatcactgccttagggtcactgaaactagaagagtttagcatccactatttgctaaaattctctttgaccaacactattattaatttagcttctttcatcaccaaactgtaaccccttttcagcatggagtacacatgctaggatgcaccagtctagatacataagaaaatagtgaatttaaattgattagtgaaaattgcttggatttggggagttagaagtcttgggtatcagttctagttctggcacctagtaaataattttgagcaataagtcatatataataacttaatttaaataatcagagccttaatttgctcatctaaaaacaagaataaaatgtttataagggatatttttaagtttgacttgagctaatgtgtataaaaacttgtcaaattgtgaacactgtaaaaagcaagatataattatcacagaactaagtactttatattggttcagcagagtttcagaatttctactgttgtcaaagcacatgttttgctatgttgattttcagctgctatgaagtttatagaaaagcggaaagtctgaaatttctgtgacaaggctttttgttcggggttatttttaaagaaaacagaagatcggattgcattaaaatttgatgattgtgttattcttgttatatatgtcttgactagtatttagtaaaagttataaggaaaaaaggagcagttgtctgcaatatactagaaatgaactttaatcttttcacacgattcttattacaacattttttcctctctccagattgcccaatcactgaagagctgtgatcttcctaaacagttaaaagtcaggcacagctatgtaactcatacagtttctctttgccagactagactaaagaaggagcactaatttattctgataaaacaggtctatgcagctaccaggacaatggaatctacgttgactttagcaacggaacaacctgttaagaagaacactcttaagaaatataaaatagcttgcattgtaagtacaattcttatttttagtctttctagttttgtg

SEQ ID NO: 37031 - DNA, 2300 bp, Homo sapien
aaacaactgagaaactcagttgggactctaaaaattctcttaggagaggtgcagtatcccaggagtgaggcatatgttctaagaggaaaataaaatataattatcataacacagcttaaaactaggtcttgagagcagcaagatgatctgcaagtaattacaaattctgcccagaaaaaaaattcaaaattcttgagtagttctatatcatattatccataaattcagcatactttaaaaaaagtaccaaatatacaaaaaagcaagtaaaacagactgataagaaataaatcagttattaaaaacaaactcatagataatccagatattggagttaacagatagggcatcataacatctatggtgaatataaaggaaagaaagaaaaaatgaaagacaaaacaggttgtgtcagatttctttctggaagctttaaaatgctcactttattttcatagattctaatttcctaaattatgtttgatgtttcaagcaaaaatcatagcattgtctagtgttattctaaatggatgtaagaccattatactacaaatttgatagagtaaagagacataatatgacagaaggttgctatacttcactcagactggaataaagatgataccaattgactgtgataatgtttatataaatgaatatacactaagctgtaaaatgcaaccactaagctataaaatgcaaccaaaaaaactataaaaaagaagatacactataaacactataaataacaaaatggaattctaaaacaaatgttcaagtaacccacatgaagtcatgaaaaataagcagagaaacaagaattgatagagaaaacaaaaaatgtcaggcttacgcattaaagtatcaataattcatttaattatgaatggtctaccaagagatagataatagaagagtgtatttaaaagtatgaccctttcttatatgtttcttgtatgctgtgtacaagaaactcacttgaattttaccaatacagggcaggccaaattaacaggatgaaaaaagatatattacacaaacattaatgaaaggaaagcaagagtgtctgtatgcatatcagataaagcaaagaaaactaccaaaaccagagattatgtaatgatcaaaggtttaatccatgaagaagacagcaattttaaaagtgtattcaccaaaaaataaagcttcaaaatatgtgatgtgaaaactgccagaactaaggcgggccgggctcagaccagcgctgcctcaggatgtaaagtgtaacaagagggccaggggaggtggtgggggacaacatgggcctgtgaggcctgtgggtgcccgcgttccccagctccccccgcagcccgctccacagtggtccgctccggttggttgtcacgtgcgcattcgggttccagacccaaggctgcgtgttctccaccgcttgttgtggccagtgttactgcggtgaccgccagagcagcctcgacgctatggaggagcctggtgctacccctcagccctacctggggctggtcctggaggagctaggcagagttgtggcagcactacctgagagtatgagaccagatgagaatccttatggttttccatcggaactggtggtatgtgcagctgttattggattttttgttgttctcctttttttgtggagaagttttagatcggttaggagtcggctttatgtgggaagagagcaaaaacttggtgcaacgctttctggactaattgaagaaaaatgtaaactacttgaaaagtttagccttattcaaaaagagtatgaaggctatgaagtagagtcatctttagaggatgccagctttgagaaggcggcagcagaagaagcacgaagtttggaggcaacctgtgaaaagctgagcaggtccaattctgaacttgaggatgaaatcctctgtctagaaaaagacttaaaagaagagaaatctaaacattctcaacaagatgaattgatggcggatatttcaaaaagtatacagtctctagaagatgagtcaaaatccctcaaatcacaaatagctgaagccaaaatcatctgcaagacatttaaaatgagtgaagaacgacgggctatagcaataaaagatgctttgaatgaaaattctcaacttcagacaagccataaacagctttttcagcaagaagctgaagtatggaaaggacaagtgagtgaacttaataaacagaaaataacatttgaagactccaaagtacacgcagaacaagttctgaatgataaagaaaatcacatcaagaccctgactggacacttgcca

SEQ ID NO: 37032 - DNA, 2300 bp, Homo sapien
tggtttgtgagctgactcaaaggtaactttttaaaaaagttcaataatgctttgagggaaggcttttacttcttccagatgtcaactgtcctttctactaagctctcataatattgaagtagctttgttgtctatggtgacatccgaggttcttggtctcacggccacaaagatcaaatatgtggacacacacaaagggtgaggtttggagcagaatttttaataggcaaaaggaggagaatagctctgctacagagaggggtcccaaaaaatgggttgcaatacgtggtgaaatgcaggggtttttatagatgagctagtggggaggcggtgtctgatctacataaggagggaaaacccggtttcgtgcatatggcatgaaaacccggttaggaccaggtgtgtcatctgcatagggcttaagtgtctggcagccccggccccaatcttctactatataggcaggtagctactccgtgttgcttatttccttcttactgtgcatgtggtaaaaaagaggggaggtggaacccccatggtggacatgcctggccccagtagccccttctgtctgtgccgctgccggcatctcccgtgcaagcttccagtttccttacctatgtttgcagcccaatcttccaggttgctctttgttagaaaggaagtgatttcttgggctgctttttgttagaaggtaagttctgccgagggctcttttgctcatactatctgcctaaataatttctatctcctgtatcaatatcctatgtgtgactctattctgcatatatgacttaggttttaattattttgtttacgagttggtcctacccccccacccccgcttccaccacacttaaggaaagatacattttaattcattttttatatggtatgcatagttggaggccaaaagattgagttgaaggattcattacttgatgaataaatggatgggtggatggatgagtcagtataaatgaagagcatcccaagttgactattttaaagggataacatgcattttatatttgttaaacattcattctcatttgtaaacacttgtatatattcatgtattcaaaatgtattgaaaattaattgttttccttggtacctgaagtcagtcctgggtattgcaaagtagttcgaagtcactggtttccctctgtctcacttcactacacactggtgattttgctaagtgatgagccagaaaatgtacaagttccagaatcaaaggtaaaacaaaacccaccaagaatcagctcactgttagcgtcctagttgaaaaataaggcttatcaaagtatttcagattgcattaacacttttgatatagctaggtatcagtgtcaacctcaggagagggcaacgccaactcctgaaaccttcaatacagaaagtctagaaaaataagcaaatatacatacaaacaatagcgagaagactccagaaaccacataaaaccgtgggaatcgaaatatcccttacgtgtgttcagtacatgtgaacccacgtattttaagtggacgatttctctctcagagtaccgtaggtagtgggggacggggcgcagagggggagaaacagaaagtcgccttcctccatggttcatttgcatttccatccagaaactcacaggtcgaccccaagactccactctctcccgcctttgagaagccggaccggcatcggcggctgcatccttctcctcctccccgctctattttggggccccatgatctcatgccctctgcagaccacacgctgcaattccagcccagcccgcgccgcgaggccacgcagggcgattcctgcaagtgtcgggagggtggccggggcgcggggaggggacggcttggggggaagtttaagacacgcccacgtaagggacccaaaataaccgacacacagagtgcccgaaatcagacaggaagccaaataatccggggcgttgagtcgctttgccctgactgcgagagccgggtgtagggcggggagccaaggatctgaccgcgaggggcgggcgcggcggggaggggcggggcggggcgggcggcgcggggcctattaaaggcgcggccgggcagcggggccggagcggccggggccacgatggagcgcgacggctgcgcggggggcgggagccgcggcggcgagggcgggcgcgctccccgggagggcccggcggggaacggccgcgatcggggccgcagccacgctgccgaggcgcccggggacccgcaggcggccgcgtccttgctggcccctatggacgtgggggaggagccgctgga

SEQ ID NO: 37033 - DNA, 2300 bp, Homo sapien
gaggagagacattttctcaccctccctcctatctttgaaattcagggcaatggagtttagcattggctaagttagtagtgaagtgaattagaggtaaacaaaattatcccatccatcaggtgtctgatggatagttgacagtgaaactgaaatatggaacataaattttcatagacccaatgaatcagcaatattgtgataaccaagacatctctgaaatagatcaaatacaaatataaaaataatcatagctatcatttactgggttttgttccagacattgtgctaaatgatttacattatccaagcaagaatttgaacccaggacttggcaaagttcatatatttaaacaatactgtatattgtctcctctgaaagcacattgaaaatgttcctgttctttcattaagttctattccatcagtagttgcattctaaaccagttattctggcttgaattctgctgcactgcacaagacatttgttttgtatcatcttcctttccactttcaagcatttgagttcacacctgttgacattctttctagtccctcatagaggaagtgtaactctttttctttcagacctgatgcctcacttcctacaaggctttgtttctcaaatcacacacacacacagcccccccccacaaacacacctgtaattcccacctctgtactgcttccatctctcttcttgaatatgctcttgtccttccatttttctattgtctttaccccattccttttgttgcctctggctctcttaggcttctctttactgtgggacaggactaatagtacttggtttatattttctgtctttatttccttactaagctgtcccttttttatatgtcagtttcttactgcctcctaacacctccccacctcccataacctcccttttaaaaacaatagagattttctaatggcagattttatttttattttgaaaattaaaaaaaaatactgtgaagtataaggaagaaattaacaagcatccatgcaacccatgacagttaacgttctgccttctttgttagcttcttgattattgcattaatctcttttaaaaatatttttcatcactgtgattatctcaaacattcctatatgtccccttgctttcattttttatcaatgcttattatattacctgctatttctagtttattatttctatatttttattttttgggacctgctattccctgttttaaaatctctttctattgttttattgtttcttctttgagcttctttttatttattggatttgtattccttcctatcaacctgttatataacatgaaacattttttcagtgtttattctcaattttatcacctgtattttcttctaagtggagcaggtggaatgagcctttcctttctaccttcctctctccctctatttctttcttccctccttccttcttttattccatccttccttgtttcctctcttcctttctttgttttattgttttaaacctatagcatatttactgagtttaatgccatttctttttatgttattcaagatcgacattctattttactctgagatggataggtgaccatcttccaaattgtgtctgagttatttgtttcttcctttacagtgtcagggaggaacattttgtagcttatcaacttttctgaagccaaaaggaaggttagtgtcaggcctctgagcccaagccaagccattgcatccgctgtgacttgcacgtatacacccagatggcctgaagtaactgaagaatcacaaaagaagtgaatatgccctgccccaccttaagtgatgacattccaccacaaaagaagtgtaaatggccggtccttgcctgaagtgatgacattaccttgtgaaagtccttttcctggctcatcctggctcaaaaagctcccccactgagcaacttgtgaccccccactcctgcccgccagagaacaaaccccctttgactgtaattttcctttacttacccaaatcctataaaacggccccacccttatctcccttcgctgactctcttttcggactcagcccacctgcacccaggtgaaataaacagctttactgctctcacacaaagcctgtttggtggtctcttcacacggacgcgcatgaaatttggtgccatgactcggatcgggggacctcccttgggagatcaatcccctgtcttcctgttctttgctccgtgagaaagatccacctacaacctcaggtcctcagaccgaccagcccaaggaacatctcaccaattttaaatcaggtaagtggcctct

SEQ ID NO: 37034 - DNA, 2300 bp, Homo sapien
ccttctcccacctacctcactctgcaagctaggagagctcaccaccaagcccacatcccaccttaggtgagactcgcactgcacatccctacccttccccagccaccacacctttccaaccattagaggtagatgtaattgggggtttaggtcttgaaaggtttcactgtggcttcccacatattttggacttttaaaatcatccacaagggaagaaaaagttgagggccaagttgcctttaatacacatgtggctattaagttaacttggaatgttccttctttaaataggaactcttaggcctcttctttttgaggaatgcttggaaaggacattaaataacaatgacgaaaattcttcctgagcttcagagggcacccccacccctttgctggccattcacactattgacatgcaactacactctataacatgtggctggcttaacgaggtaatcgtgcacagatgatatgctctatgctgaagttggagtggttatatttcttcttggctatttttcaacagactgtactgaaactttaaaaatttgatcagtttaaacaggctgttttcaaatgataaatctataatgcattgtttctaaagccgatctttgcaccacaaacagatatgcttatcttgaacccatgctctgaagcatcaacaacttaaaggaatctactcattggtaacaccaatgtcaaatgatgcggcattacagaatacaaaaatggtatggccctagaatcactctctttatataaaatgggaactggaggtattaacaaaaaagccactaaacaacatagattccaaatgaaagcacagtgaattagttgggtctttagtgaagctaagtagcactatattaagaaatggagatatgcttaggtttattggccatattcaacatctgcacacacccagggagaataaagcctattctttccttgtcctgacctcactccctcaggctgcatgttccttgggtaatgagaagtcacaatcactattcatagatgtgtggggagtcactaaaaatatattattcactgtcaatcttagtttatatccagatacaacagggtacactgctcttgtaatggaatcagacttcttattttaacaagacaaaccaaatccaatccacatttgaagattataggttttaatataagaaaatgcactcatttctcaaagaccctagtgaagctgtgtttaaatgctcctaggtgaaccccctttgcatcccagtgttcccaccctgacacccagagcccctacctacccaacacagaatcatttgctctgatagaacaatggatccctttttctggaaacattgatggccactcctcccttgtccttgcctatataaaactcctacatatattaagagaaaactaagcaagagttttggaaatctgccccaggagactgcatcctgagtcacacgcgtctttgttctctttcttgtcccaaaaccgttacctcaagtgacaaatgatcaaatctcaaatatagaattcagggttttacaggtaggcatcttgaggatttcaaatggttaaaagcaactcactccttttctactctttggagagtttcaagagcctatagcctctaaaacgcaaatcattgctaagggttgggggggagaaaccttttcgaattttttaggaattcctgctgtttgcctcttcagctacctacttcctaaaaaggatgtatgtcagtggacagaacagggcaaacttattcgaaaaagaaataagaaataattgccagtgtgtttataaatgatatgaatcaggagtggtgcgaagaggatagggaaaaaaaaattctatttggtgctggaaatactgcgcttttttttttcctttttttttttttctgtgagctggagtgtgccagctttttcagacggaggaatgctgagtgtcaaggggtcaggatcaatccggtgtgagttgatgaggcaggaaggtggggaggaatgcgaggaatgtccctgtttgtgtaggactccattcagctcattggcgagccgcggccgcccggagcgtataaaagcctcgggccgcccgccccaaactcacacaacaactcttccccgctgagaggagacagccagtgcgactccaccctccagctcgacggcagccgccccggccgacagccccgagacgacagcccggcgcgtcccggtccccacctccgaccaccgccagcgctccaggccccgccgctccccgctcgccgccaccgcgccctccgctccgcccgcagtgccaac

SEQ ID NO: 37035 - DNA, 2300 bp, Homo sapien
atcactgaatgagtcagttgggaggaagctgggctggaaatacagctgagagcctctgttgacagatggatgccttcttaatcacagcctgtgtgggtaaagggaaagccttgcctggccaacccctcccactcccacccccacctcctgcattgattcacaaacctggactgctctggaggaggctgggaaagtccatccccagggaataccacttttttcctcttctgtgcctctcacaggacacccacatgactaggaggaggcagaaagtgaatagggagctcttattactttttgagtgtcagcaaggtaaacctgctttcatttgcttttccaaatcctaaacgtttccctcttaaactgttgatattgttagcattgttcgtttctcagtgtgtgtccatctgccttgtctgtaaaatgggcataataagagctcacctttcagaaagcagtgggtagggctagatggtataattatgttccctttcatcagttttccctatctctactaagcaccaggtgctattggaaaaattacctttttatcagatttttaaaatacagttgcctgagcacatatttaattttagaagaaatagtttaatagttctaaatgtggggtttcagagagccctatgtcaagagccgctgtacactaggttgctaggagactggacagccaaagaaacaatgccctttcctgtgaccactatcaagaactgctcaggattcctgccagcctgttagcctttatcgttcagtcattttagacctcaaaaagaacattccatcaagggatcaggttctatcatctcactggaatgcaatgtaagaccccagaaactctagtacaaacaaatttactatggctcagattaataatagatagcacttgaatgtgtgccccagttgtgctccctctctgctaaggataggacaaatgaaaataaattgcaaattcagcagggagattcagaccaaacataaggaagaacttctgccattaaggacatagaagttgtgaagtttgccccttgggaagagttgtttagattagcctgaaagagcgtatttgaaggatgaagatgcagccctcactggcaatggaggacaaggtgatatgatttcctaggttttcttcaagacccaagattctcctagttgtggaaaagtgactctgtgcattactcaccactattaagattgttattcatgatcaggcctgagtgaaagcccggctactcttacataacaaaggcagattctcagtgttggaagataactgaggagccattcatttcatccctcttctttcaccagtgaaaaatcggagacacaaagcattcattgccacatggccagcagaagagctgggcctaggaccaggacccctcaggctctctgtgctgtgtgctgtactacaccatattttcactaataatataggtctatttaaaacatagcttcatctctggaccactgcagattttacattctaaaaatgcttttataagaattctgtttatgacatgagcagcactgaagcagaaatctgaggaactctggggattggtgtggctaaagatcacaatttacaagaatagtttaggcaaagcacaaaagaggaaatgttatttatatgagctcatttctactcaccaaaacatttaaaaattaaactcaagacccaacaactttttccttttcttagcccaacatgagaggcttacacatgtaccccttttccccaaacttgtgaacttgtctgatatgtagtctcaagtttataagcttcccttagaaaaagttctatttcatttctacaaatcatacttctctcattttataatccttgaaatggatagtgctgcctcatcttagatgaggcattcaacagttttaatttctaagttataaattattatttcttcttcttttttaaacgtcttagagacaaatctgtctatttcacataggaagccagttgagttgttcctcacgctttccccacgaagctgcatctgaaggacttcctcacccccccgctgtgatcacaagttatgcctcacagattcatttccttatgaatgacttcaggaagccagcatttttaataaataggaagtaaattatatttaatgactaaattctcacctaaagttgatactaatattacaataactctcttgtgccctattttggtgttttaaacttctttgctgtacatttaagaaaatcagaatttcagtagactcctcgtgcagtctgaggaggcagtttcctatctggtttga

SEQ ID NO: 37036 - DNA, 2300 bp, Homo sapien
actttggcagaagaaaagtaacattttatgtgaaaaactgacatagctaatttctggagacagaaaaaaataaacaaaaataagcgtacccatcctatcccagcagtggccactacactgtagaagagtgaaaaaggatccagactctggggccagagtgccaaggtttgaatcctgcctttcggtttactagctgtaaatcctgggcaagtcgcttagcctctttgttctttgatgtcttcatctgtaaaatggaaaaatagttttatctgatagatgtgatttgaagattagtttagttaatacatgtaacaggtgtaaacagggcctggtgcatataagaagctgtagttggccgggcgcggtggctcacgcctgtaatcccagcactttgggaggccgaggcgggcggatcacgaggtcaggagatcgagaccatcctggctaaaacggtgaaaccccgtctctactaaaaatacaaaaaattagccgggcgtagtggcgggcgcctgtagtcccagctacttgggaggctgaggcaggagaatggcgtgaacccgggaggcggagcttgcagtgagccgagatcccgccactgcactccagcctgggcgacagagcgagactccgtctcaaaaaaaaaaaaaaaaaaaaaaaaaaaaaagaagctgtagttattgttaccattgtcaagaaaggtgagttagactctgcattgccaacaatttggggttttaacatactaaagaaaatctagatgtggtaccctggatgggaaacatatgcacacttataattaccatacaaagatgcttggaataaaaatgccaaatgccatctatttgagtatgacttttatagacaatgggaggttttatcttatatattacattttctcagtcaaacatagctataaattcttcaaatacaattttactgttagcaaaagtaattataattatgtttcagcatgtatattctaaatcaactgtacaacttctcaaaaataaaatatcatcaggtactgaaaaaccagaaaggcagtaattaaggcaaattttgtgtcttttataagtgacaaaaattaatactttgatttggatgactcaacagagtaggcgaatggtaaaaggcataagaagatattttggggataaaaccaaactatggtgcaaaaaagaaaatatgtatcgaatgggcgctaaccatgtaggcagttatgaccccgcccaaaccatctcatttgtttatttttcaaaatctataaaataggtatgtattatccccattttagtaatgttaaaacttaagctttcagagttttacttcaacaattcttcaaggctgtttaggagtacagctgggagtcacatcctagtcattttcttccaaagcccatgttctctccactgcactggtctgcctcccagaagtgataggtacactggctgggcgcggtggctcacacctgtaatcccagcactttgggaggccgagatgggcagatcacgaggtcaggagatcgagaccatcctggctaacatggtgaaaccccatctctactaaaaatgcattagccaggcgtggcggtgggcacctgtggtcccaggtactcgggaggctgaggcaggagaatggcgtgaaccctgggaggtggagcttgtagtgagcagaggtcatgccattgcactccagcctgggcgacagagccagattccgtctcaaaaagaagtgataggtacaccgttgaacaaatttagtacaaaaattatggctaatcccccaaaacaaaacttccctagtttttcaatatcgtgtaattcaactagttttgtttctttgcatatttcccattgcattttattttaataaggatatgccattaaaagtcatattgaaacaacctataatccgcacttgcccacggatctctttgcttttatgaatggtgaagtggggctccaccaggagttgtaatggaaagagtgatgaccttagggctgattctggctttgctgctaactagttatcaaactttttttgtataaatgcaaactttgcggtaagacatttcatagtgctatagtccctcttttaatttttccaaggaaggaaaggcacacaatggtatcaaatgttcattcattccatctcttgatgctctacgatattatcagtctacactatgctttcctgaaaggccagaagttcaaagatggactagtttcccagggacctgattccccagttggaatactccagccccttggaaattcccgggatttataaaataactctag

SEQ ID NO: 37037 - DNA, 2300 bp, Homo sapien
ggaaggcagaagtgacaaaccctgcgaataggcacagtgatgcaaaatagcacggctctccattgaggattccagagggatttttcatgtggtctacaggccgatgggtgagtgagatgggagtgatggaaggtaaagctaaaacagttaatgggggaagaattctggaaggcatgacctctttttgtttcattaaggagacaaaatgtcctaatagatgtgaatttggggtttatataacgaaccccaggaagcagatgtagcaatgtgcttgttccaggttcctccacactaggaataaaagtagggtcacaaaacagaaagtttgcctttagtcactctgcagtaatttaacttccctgaaatccctgcccaggatagtgagaggatagtgagtgtgtcccacccggtgccatgagccactcctctgggactccattccccctattttgttcctctttctctccatatcccccttcctttcttcatggctgaagccacgtccctggtatggtgcttgtaaaaacccaattctaaggttgccacccttacattgctgtatggctgttactgcccttgacatttgcccagtgggtcctggtggaggtgaggcaccagctacttatatttcatagtctccatgcccagttcttgtaaggctttgcaggctcttttatttctcattttattttgcggttccaacatcactcttctctgatgctggcctattgccattggccagccctgcggaccttgatccaatctctccttgggaaaagtcccttcccaggcaagtccctgagcactttggtaagcagatccacctacaggtcaccttccagacatgatcaaatattcccgtatccttagaagaatataaattagatgcatgacggtaactttggaaaagttatgggaaaagataggcagggggaaaaacaggctgaaatacgaggtgaggagagagaatgaggagtgtagggtggctagtgtggagcttgctcttcttacccatatttctcatctgatattctctcttatttgtttttctattttgcattgtttgtatttttataaagacaaaatttcgaacttttttggaaacttggcagatcataaataaaggaataaataagcaaggtaaattttagtggccatatttgtatttagcattctaaagacaggagtggtcaaaggtagaggcaaaaccaaaacaaaacaaacttttgacaaacatggttatggccagaacttggaatagcaagaaaagagaatgttaaattaaaatataactctcaaatgacaattcaccccttaccttctctgctgatggcaaagtagtttggctgactttgtcccatcaacgccaaaccaaaccaaacaaaaactaggtgaaggcaagcgtcagggctccaactcctgccgtgaggagcaagctctgcggccccgcagggtgggagggtgagagaaattctcgaggtggggggctggggaaagtgaagtgtgtccctccattgcaatagggacgtcactgggaacaaaggctctggaaagtcgacagcaacggatacggagacgtgaaggttaccctggacgggcctttctgtgcatcgcaccccagactaccccctttgctcactcaattcctcctctccaggctaaacttgctctctgccgtcaatgtccattctttccctggtaacctctcgcccacgtcccgcagagcccacgctcttcccgctctaggattctcttgccctcctccttttccctctgcctctggcctccttttctcctctctcggcgtctgcctcctcctgcctcctcctccctttctttccgggaagcccctcgctttccttcccaccgagccccgacctcggggaccaagtcaggggtcgggggctgcaagtggatccgctggaagggccgggcagggtgagagttggcggggctgggacccgacgggacggaacgggacgggaccggacgggacgcggcgcgccctgcaggcggcccggggcggggagagcgggtcctgcccctcccgggcgggcgcgcggccggcccgaggggcggtccctgggctcccgctcgccgccgctgccgctcctcgttctgctcctcactccccagcggctggaggccggtaccggcgggcaggaggcgcccgaggatgtgctgctggccgctgctcctgctgtgggggctgctccccgggacggcggcggggggctcgggccgaacctatccgcaccggaccctcctggactcggagggcaagtactggctgggctgga

SEQ ID NO: 37038 - DNA, 2300 bp, Homo sapien
tagactgtagagagacatggaaggtgcttaacaataaggcacaactgaactaactcttgtttattaagtattaatttaagcttccttttaatctagcatagattttttaaaccagttgtggttttcccactgtattataaataaaaacaaaccttcataagtcaacttgtccttctcacttaccaataagtccctgtttgctctatttacctttatgcgtcttttacttctttggctttcccagaagatcacatagtggtcatgtaaaaaatatttttagttcagtaactattaaatgaaccagcaattatctccttctattccctggaattgctatcccagacactggagatacagcagtggacagttctccatcctacatgagagatgttacataggaggtatttatggtatttatattaataaggacaccacaagtgtgcagataacattccccactcaacaacttctggtttccttcaaaatctctccaagaaggcccaaatctcgcaaattactatttctgaaaatccaaattacaagctttcagtcataggtaacttctgcacatggaaatgatttattttgggagatgtgacattatcactcatcaaattaggagacttttaaagccctaccactttcaagacacctggctgaatttaacttggtagcagccagattcacagatggaatactgtgtcaggaactcttagtaattcatttatcttaatacttctaaattttgcaagtttgtctagactataattcttttttttcccatttgaataccaaaggatgaaatcttattctaagttttcaaaagacctggaaggaatccactcataacatattttaaaacaaggaattggaatgagcccaagatgagggctcagacagctaagttttgggcccagcatagtcagtaactatcagggtaacttgaagaggccacttaatctcaggttcttctgtagtgcattgtaccttccctccccggagcccagagttctatcaaaggtaatatgaatgggtatttggaaagtgcactaaacctcacatggatgtaagatcctttcatgtgttccttcaatgattgaaatgtttcttcctacgttcaccagccacttcctaattctcaagtacaatgcactactttcagttctttatttacttgaactttgtgtaacaggtgacatcatggacaattccctccttttttccttcattctctagtttaccttttcctggtttatttcctatcttgtgggttactcgttttcagggttattctttctctgtccatctctcttaagcagacaacattccacacttagtgttggtgagttccaatcagaattctatcctgggttttgtttttttccacctaagtgcgtctggacttttgatatcacctatccgggtaatcattttagaaaatagtgttgccttaatataggcaaaggctaagccaatctatcttctaattaatttggagagggctttctttcatttgtagcaattgatgcttttcatctaacaattacaatatatttgcatatttatcattggaactgtctctgcttgttttaaaccctgtgaaaactacgccctgcttttcaggaatgcttagaatgacttgtatgtactaggaaaacttgtttacaagtgagcacccagagatgactcttcacttattccttcattgttcctgctaggattgtgtactcgcctttgcatttttcgatagagctgtcaacgcgatctactgcagttaaaggttagcaaacaagacaggcaagagctaatggggcggggtgaagacccgcgtgcaagaaggctggcttcaccagataaagaagacaactgtcctccattctgtccttttttgcacgcaggctaagaggcgttcaccatctctacgtcaggcttcaaagaacagctcccttgcaattttgctgatacccccattccttagcttggaaccggaggggcggtgagggccgctgtcactcagccccgcgggccaatagaaaaggggtgaaccccgccttcttcctgagttgtgctgcgggcatgcgcactgggcgtccccacgccaccgcccatcagctgagaattgcagctgagggctccggggtaggtgggtgacggcggtcggaggtgtaggagggagccgtggaggtccaggtaagaggaccctggggagggggctccctggccgggcgacagggaggcgcggtgcccctgcggctgctgcgccttcttgtttgtgcgcgtggtcaggtggccgccgccct

SEQ ID NO: 37039 - DNA, 2300 bp, Homo sapien
ccccaacatttaaaaaaactttcttaatttttggcatccaaatgtgttccagtttcctcctgtagttccttccctgtcccatgcaggaatgaatcatttctttgaataataaagaagccctagttgctcttactggataaaggtattaaacaccaagatgtggggcttagggatgcaccttgctactcaagtgtcttggcttccaggaatgggccagttttaagacactctacgagactaaaggctgctattttagggctcaagtataaaaaactgaggaaagtggtcactatctttttgcacaacagcatcctcaattgggtgttagggaagtggggatttttaaagtttaggaaaatagcattctttaaatagacattcagaatctcaggcagggcaccacgtatgtggcagtggtggaatttttttagccattttgagagtaaaacaagagatgcagtggaccttaggagacctggggaagaagaggagaacatgggggtatggaatgtgattttattgggtagactgacttgtgtgcacacagatgcacttttctgaggaatcctaggagtaacaaggagacattttgcaaggaggagattaagtcttgtgccatcaaactagtgagggctctggtaagaaagaactgggaaataaaagtaaaaataaattgatttaaaactcatagatcagtgaagccagaaaatactagagaaacctgaaaatacctgtacacacacctgtatacacacaaacacacacacacaaaatttaaaattcacagactagtgaagcctattacctaaaaactgtagccttataaagaaaagctcagtcctcctcagagagttacaaggaaagagtagccatttatttaggaatatatttgacttatgtgtatgcatgtaaccttttctaggaatctgtactttcaacagagcccagacccatggcatagggttaatgccaataaaagtagttcagtctctagctcaaagattaagattccaatgcaaggttgcacttattcatggttaaatgaagtaaaaccattcactgttgttaggtgaactctttaaaccttcttaagaccctaagcttcagtatacgaacagactcatacacctagagaaatcaagttggtctctatttgcaccttggatgactcagcatgaatctattcttcaaggatatggcttatttaaaaacatccctccggtccaccccagtttttgtctattcttctgtgataggtttaaaactacaccgtttttctaaggatgggaaggtaagatgttaggtgagttattgcttattttaattattaattttagacacctaacactgcctattagcctggaaaatacttttacactgactaatatcagttcaataagattttttctctaaatcatctcaagctgtctgaatcgtgaaagaatatgaaaagaaaaaaaatacaaattctgaaaacataagtagtagaagaaatgtgttcctaaagtaagtttaaagctattatgaggaaacttttccttaatcttcacactccataccatagggattttgaaggtatagtttgaaggagatgtaatttacctcttccttcatgaataaatgaagcatagtttgtcattactgctaaagtgctgctcaggggagataatgtaagaaataaagctcagcctttgatagcctaattacttctcaactgtggtggttatagatgagatttttcagaagataaactaacacacaagaaaataattttttaatgattagtaaattttatatatatatctcattggactaagtgtattgccagccatttaattaggaatatatttgactatatttttaatggctttctgcaacatatttccactctaaatatattaaaatgtgaatgtgggaacactttttagaaagatcaagacgttatagttaatatggaaaagcactggtagaaaaatcacaaacttttatcattttaactggagatattttcccctcctagaagactttgaaattgcttccttttaaaaaaatttttgaaagcaggaatttgagaactttaaaatagttcaaacaagaaagcaatggtgaacaatttctcccaagctgaggctgtggagctgtgttacaagaacgtgaacgaatcctgcattaaaactccttactcgccaggtcctcgatctatcctctacgccgtccttggttttggggctgtgctggcagcgtttggaaacttactggtcatgattgctatccttcacttctaacaactgcacacacct

SEQ ID NO: 37040 - DNA, 2300 bp, Homo sapien
atcaagttaggtttgagaattaaaggaaaggtaaaatagcattgccaaaaagaatttggtagatgatcaactgaatgattgtttttatgtcacacctttaatacatgtattaatttatttctatatatttttagtacctttatcctaactggcatatcatatctgtattttcaagtcctatatatactgctgtggaggaaaaaggtctttatcatttcctacttagtaggtgccatataggatcaaaattagctatttttttcccccaggcctgaaattctttttatggagcttcattccttaatctcgcttcttaatcccctaaattactgttagtattatggggacaagcctgtatgtcaagaaaggctgttattttcagaactgcctggacctcagcttctacaccctcttgtctggaaatttcgcagttacctccacatggggtattctttgcctcatcattgagctgctattacaaagagataatttaatatctgaaatgaaacaggcagttattccatgggcatatgactggggcagcagtgcagagacctactattagggtttcatgctcatagttgctgtcttgaatttctgtctttgaaattcaaatgtgtgtgttgttaagtgaagagacaatggagcatgtgctgggtgcttggaacttcagaccactagtagtcttgcattacaccttgttccttcttccctgggaggggtattcagcctcatgttcccctgccccctggcaccttgggctccatccagtctcctcctacccgctctgaccagggaccactgccatcctcttttcatccctgcagaggactggatgcatcacagggagagttgcagccaggcacatcctccacagtctcagggctaggcatagactgttgcctccatctcccgctggcagcgtcacagcacgtttgatgagctcctcagcagggccaagcccctcatgaaccccaatccaggtatcaagtgctttctgctgtgcaggttgtaatcccttgggggtcattggtctgccttttgttgaggtagcaggcctgtgagaagggcaaatccctggctcagcttctcacccccatcctgactatggcatattacttcagcagctggtaggagggggaatctggcagtgggtggaccatgtgcaagctgagttgcaaggcagggaatgcagacacctgtgagagtcctcacttgccctgcaaatacctctttgtccaagggcattccatagcaaatatcgaacactatgacaggccaagaaagaccataaaagaaaggtaaaagctttctatttcagtacctttaatgacactttttgtccatacttttgaacaagggtctctgcattttattttgtgctggatgctgcaaattatatagatagtcttgtaaataaggaataggtaatactattgtcaaatcttgggttaggctatttcaggacagttgaacttaaagaaatctcatggttatgaaaatcataagtgtttctaccaagttgcagagcacagagaaacagttctcctattgtaggtgaacttattaattataattatcaaaagtgggattcatttcatgattcacaccttacactatggggattccttgtgaagaatttataatgggtacaatggattggctggcttcctaaaatgtcctaggagatggaagcttattaaaaggtgacttctcaaatatgtaattatattatacatgatcgtcctttgaaaagaaggattcacatgtatataaaaccaggtatttaaattacatttcttcaattacttggttaatgtgattactcagctgatgaaaattcatagtagatttgcttggggttaatgacgaggtttagacatagcgacagaaataattatgagattaaagacagaattatcttttatgtttttgaatttaatttctctttataattaaaattgaaaaagaatataatatgaaacaaaatttgtaagtactcacatatgcagtttgtttttgttttaattttcagaattcaaaattataattccctatcacaaggaaggacagaaatagcaaacaacaaacagcagaaccatgaccagcaatttttcccaacctgttgtgcagctttgctatgaggatgtgaatggatcttgtattgaaactccctattctcctgggtcccgggtaattctgtacacggcgtttagctttgggtctttgctggctgtatttggaaatctcttagtaatgacttctgttcttcattttaagcagctgcactctccaaccaa

SEQ ID NO: 37041 - DNA, 2300 bp, Homo sapien
actagggctctttattcactaatccagaacattaaagtataagttaaaacagaatcctctagtacgtttaagtggtacaataaaaaaatagaatatctaaaattctataaatattaaagtagaatttttgttttctcatgtttttagggacccctttgtctcatctgcctgtcattgtgcttactgtagacgctattgtctttcgtctgtgtagtacttatcacaatttgaaattgtaaatctgtctttctatttccttaagttttgttttcctcttaagattataagcttcgtgagtatagtggtcataacagttttgttcattacttgaatacacagctactggaattcaataaatatgtgttgaatagatgaattaataaatgaatatcagaatgatgaagggatataaagttatttttctatttgaaatcgaggcatcacttgacacttttttattgcctaagacaattgtcttaatggaggaagggggttgattttgtcccttgaggaatttggcaatgtctggagacgtttttggtatctcaactagaaggattttactgacatctcgtagcaggggtgctgctaaaagccacgtgattaacagaataatttatcatatcaaagagttatctgaattcaaaagtccattgtgctcaagttgagaaagccccgcacggggttttgtctatataagaaattgacaccatttcacaaaatcagacatacagaaaatattaagaagcatctgaaaactacttggttaagagtgttaattttattgagtaggaatcagatagcgagattgattaataataatacttatcactctttataacttgaaaagcaagttcacaaatgtctctaaagtcacagccctgtactggaaagagagttgaacccttcttcaggaagacaataatataataataacaatattttcttcactctgcagtgtctttacattccagggttgggaacattactgaggattctcttcccattttccagtttcctgttcattattcttatttttttgactgcttttagcatcgggagcacaaaggccagtcaccaggaattgcaaacaaatgcgtagtcagagagagagggctcactgcccatttgtcatgtggatgcagacacattgcagatgtgttcccagtaacaatgtcttgagaagaggactggtctttccaccagcatctcagaaatgccggtgtgtctaaacagcatgtcgttctttaatgctttcatgcaatatattttatcaatctcaagttcccctcactatgtattataataatttctgcttgttggtaaccaatgcagatggaaaattgattcttaacagaagagaaagagccaagtattgatgcttactatttacaccctattgtatctttgtaacaaaaacccgggtggctaagttatgattgggaacaagggaatggttcaagtctatgcactaaggaaaaacaaatctttggcctaaaacaataatgataatagaatttaatatagagtagagacctgttttgtagaataactttcctagtaatcactgttgaaaataatcatactagttcacaccgcgcactacagggattccatcgagggattttcccattgaaggcatttatttagctaaaaggacttcatctttaaggcggtaatgcaggacagataacagagataaagataacaggaggtgatctttcagctccataattacattccatatcagcgactgttgcacagagaaactcaaaaggtaaaaataaaatatgaaaggatatttaaaatcaaaaggaattttatcaaattaagagcatgagacatttatcagttgaaacaatctccaataatcttgtgcaatataatttttgtcaaattttattttgtcataaacatttgggatttataataaaaatggaaacttgaaaaattatattagagataatatctgatcatttcctctggcatcctggtgaatatgtgtttttttccgcaggagcactgaaaatcaggaacaatcctgtattttttgtgataatcaacaaggacaaaacttctccatatgtaaataacagcgttatgagcagcaattcatccctgctggtggctgtgcagctgtgctacgcgaacgtgaatgggtcctgtgtgaaaatccccttctcgccgggatcccgggtgattctgtacatagtgtttggctttggggctgtgctggctgtgtttggaaacctcctggtgatgatttcaatcctccatttcaagcagctgcactctccgac

SEQ ID NO: 37042 - DNA, 2300 bp, Homo sapien
gtaggtctgatgtaatctatcccagaacagaaaacctttccctgtttcttcttcagccttattccagctacaggacatttgtttgtatttttcacaagttcttggtcaaattaaatataaagccataggactccttggccaattatatgtggattatgacttttaagctaaaggggtttcaaggtacctagtaatgcaatatccttccttgtgtctgattaagttctggagccagatatgtatttccacacatatgaagctggcataaggcaagattccagcggtagccaggctatagggagctttgccttgggaaacactgggtttagccatggatttgtagagaaaggagaggtgcataccaacctccttccttctttttgacctgccccacctcctcttccaggcccctctggcagatgtaatttggtgtcacctctagaattctgtcatttttacaactttagtttgactgatactgtgaaatggtttctctgtaaccataaagaggcataccagcttctaagatatcaagaggcagagagcagaatacgattcaacatgttatttaccttgataatatccctgtgaaatcaagttacacaggtataattgtacctactcttaccaatggggaagcagagagagaggttaggtatggcataagaaaggatgaaacaggaatttaactattcttcctccaggtgaactgcttcatctaccatgctttctttcaccatcacaaaatatagtgctcaaaaaacacataatgatgaatcctgtgtggaagtcacaaaccaccccttcatgaaccaaaaaacccatgatcaattattctcaactatttctcatgttgagagaaatatacacaaataatactaaagcagaagaaaaataagaaactcactaaaaatgaaattagaaaatatatagcagccattagcaggcaagaataccttcaaaacatcccagaactgaaaaattaaaaaagaatatatacatccaccgtctttaaattttatctctaattaattgtcagggtaagtgattctgtattgaggaggaaccttaaacaactgagacttgcaaatagtgcaaactaggtcccatggtgcctcttcacagcttatttgtatcatagcacatggaggagtagtttctattgagagtataaaatcgttaactaattgcacacctgtcattgtggccaacagaagagtactctgacattccctgtgtccacctgctccaagaaacattttttcccaggaagggattctgattcctacctgtgtaagtaacttagaaactctgaattcaatatattaggacttggttaataattcacagacttacattaagatgttaaatagataaaatcattttgcctatcaaatagttataccaagatgtgtaaacactttgtgttatcatcataaaatgtgcagcatttaaagctaaaatagagcaattttctactcttttaattattaatatttgcatgctgaattcttctcttgggaagagttggcatgtagctaaaaatcttaatctgctaactttattgtcaatgtatgtaattcttaaagagagaagctagaagttacactttttccaaggaataatttattaacaagaattaattggtcacttggttcagatctttgctttaaatttcactttacatttgacaaaaaataccttatcaaaacgtaagagacattctctattatttaatactacctatggatataatcaagctttctttgaggaaacattcagcttacatccttcttttctttctttaagaatactacctacactagttttaaagtgcctagtcatataaactagagctagcagaagtaactctcatgaaaccttgaatactatgctgcatttgattttcagggcacatttgattcagtacccaggggcactgtactatgttccaaactgtactttagtttcttcctcttcgtttcactctgtgattatttagcagacatattttttttttttttttttttttttttttttttttgccctccagtggagaaggtggccagttctcagacagaggaagagtagaaatcataaatgagagctgtcttcatccaaggtgctgaagagcaccctgcggcattctgctaccaggtgaatgggtcttgccccaggacagtacatactctgggcatccagttggtcatctacctggcctgtgcagcaggcatgctgattatcgtgctagggaatgtatttgtggcatttgctgtgtcctacttcaaagcgcttcacac

SEQ ID NO: 37043 - DNA, 2300 bp, Homo sapien
tttgtctgttttctcttgtagatgtcacttttccctaatacttggaaactttattattaaatctagaaatatatcttcttggtaaatgaaactcttttttactatgtatccttttaacttgccatgtttttggcctcaacatatttcttttctgatattagtatgagtatggatgctttctttggtttatgctttttctgatatatgcttttttaatctttttacttccaaattttctttattcttatgttttagatctatgcttaaagttttagatctatgcatatacagttaaatgaaaaaataagagcaaaacaaattccaaaagacagtaaaacattttccaaaagacaacatgctatccattttataaagagttctaaaaacaagccaaacaatgttttgatttacttatataaatacacatggcacaactattaaataaatagaaaaacgataagcacaaaatttaagagagtagctacctgaggtgataggcagaaaataccatagagatgtatgtaagctattgttaatctagttctcagtcatgtatgttcattttgttagaaacaaacaaataaggcaagcaagacatacttggcataattattgtaattaattcaaattctttgtacctgagtttcattaaaaaatgtgaacttatgttcgtgacataccccttttcttcagcttaaggtacaaaataagatcatatctctttgtaatattcaaattaatctgcatttttcccatttcccttagggtcttgtcttttggttatattctctgaggactgaatccaaagactgttttcccaggctgctagcaggtgtcactgttgaaaataggtggtccccctttctgttgatgccattccgactgccatgacatggagacaccaggttatgggggggaagctgtggtttctaagggcttagaaaaaaccaagaggaatgagctggtactcattacatttgcatcactgcagagctgttattcttaaatcttgtgttcaggattggagacactggttctgaagacttttcttaggctcagctgtatattgtttgtctccaggctttgattttaacttttcacccctggttctcctcctgccatctgtcatggtctgtcctgagctaattttttaaaattttttgtagagatgaggtctcactatgttgcccaggctggttttgaactcctgggtttgacaagtctcattccctttgctccacataagttcctttgcgtgttaaaaatacacattaagttctaaccttcccctgctactcgtctcccacctacataattaaaagagaacacttaagtaattctttacagaaaccagaaagtttgtccaaaatgatttttggtctctcccagaagaaatagaagttgctggcaatttttgagtagcaatgtgttttgctatttctacccttttggctaataggtataaagatttcttttaaaatactttcatatacatgatcttatcttatctcattcataatataaatcattattttatctcatctcattcatagtataactatgaatatgctttgagatgaaaagagatttttttgttgctgctcctgtttcacttcttcaagaactactagccaggcgtggtggggcatgcacctatagtcccagctacttgggaggctgaggctggaggatcgcttgagctcagaagttcaaggctgtagtgagctgtgatcatgcctgtgcattgcagcttgggtttaagaacaagacttcgtctctaaaaaagaaaagaaagaactactaagggaggttcagccaggactagctatgtattttcacaaggtccagtacaaaatgaaaatgtagagccccttgttagaaagttattaagaatttcaagagatcgcatcaaagcattaagcgtgacttcttcaaagctcagcttccattatgacggcacaatctgcacgcccaagcagtggccgtaggcagagccaacggagatcacacagagcactgtaatttttattcatgcaggaccccagtttcttctaatgaccagggttatatttcatctacatctggggtatcttgcctcccatggctgtctcatcagagcaacatgaactttcacatttcaaaagaacacagacaaaaaaggtaggcccttaaacatatgactaagtttaaaccagtagcatctgagaagattttggcataaacatgtgaattatttacaaagataataattatgctcaattcctccagatctaaaagggttgatgaaatgtgttctttta

SEQ ID NO: 37044 - DNA, 2300 bp, Homo sapien
tgaaatcataatcgtaattcaaatattgcttagtttaaataacagtttttgtttgctgtttagcttctatcatggaatgagcctgtgtgtctttttaaataaatcttacagatttatttggtataaatatgtttccttctgggaatagaagaccaaaggagattaggggaaaaatgttccaaatttattaaaatatacattttcatacctagatattgcatttctctcattctaaaccatcagcccagagggaagggaaaaagataaaaaggaaggcagactcctggaattctaggaattgttgctgttttctagcattttcctaccaaagtgatagactataggacttcattgccagaaatttgtactcttccccaagctctttctccttccttccttctttccttccttcctttctttcttctttctttctttctttctttctttctttctttctttctttctttctttctttctttcctttttctttctttcttttttctttctctttctttctttcctttctccttccttccttccttcctttcttttttctttcttccttccttccctcctcctctcctttcctccctccctcccttcctttcttccttcttcctttctttctctctcttttctttcttcctttctctctctctcccccctcttctctttatatatatgtacatgtctgtgtatgtgttatatatgtgtgtgtgtgtgtgtgtgtgtgtgtgtgtgcatgcgtatgtgtgtgtgtaagtccaagttctagaatttagctcagaattacagggtcatatagaaacaaaagggacagtttcaaactgagtcccctggaactttgaggttcttcagtgaagtacaagaagaggaggcctagtagaagatgcctactcataataattttttttacctgttttataaagtgagatttattggatttcagaacttaaaaactaaaaaggttgtgtgccttgcccacggcccacatggaaactcagcttccctgggctctcacctcagtgctctttgcaccatgccacttcacttcttaccatagactttagtctgtatatcaaaaatccttaataagtgggaccacaatatcattcttcactagtaggtgccattatttaagacatcataaattcttatatgaaaatttaaagcttaatttttaaaaattgacctcaagttggttctttctgcaatagagagaaagactggactgatatcaaagaaactgaactagtaattgagaccacagctcatattcaagctttaatgatttgtgaattaaacttcaatttcttgccagtaaaatgaggttaatgaagcatgtcatgtcttccttacaaaaaatgatgttggtcttataaatgtcaaataaaactgtaactgaaataatgcatggaatatatgtagaagtactttgcaagctgcaaataaatatatgtaagcttcttcttattacaattaattataaaataagaaatatataatttacgtatgaccaagtgcagaagtgggcatagtgcgtattaattctgcacaagaggcacatttaaaagacttcttgtctttttcataaacatattttaattccaaattttctggcaatttctttctaccctttacaatgtaagtctcccccactagactggcttcctatggacacagattgtttccatagattaagatgtgtgatcataatcatcatttgatcttctctgacctacaaatgtggcagtttcatatagttcaacctaataatttagcttcatatttctagaagaatgtccagctccaggtaaaagttttttaaaaattgctgtactgaactattgaatggaacttggaaataaagtcccttccaaaataactattcttcaacagagagtaataggtaaatgttttagaagtgagaggactcaaattgccaatgatttactcttttatttttcctcctaggtttctgggataagtatgtgcaaataaaaaataaacatgagaaggaactgtaacctgattatggatttgggaaaaagataaatcaacacacaaagggaaaagtaaactgattgacagccctcaggaatgatgcccttttgccacaatataattaatatttcctgtgtgaaaaacaactggtcaaatgatgtccgtgcttccctgtacagtttaatggtgctcataattctgaccacactcgttggcaatctgatagttattgtttctatatcacacttcaaacaacttcataccccaacaaattggctcattcattccatggccac

SEQ ID NO: 37045 - DNA, 2300 bp, Homo sapien
tgagtataattttggcagaattttctgagctcataatgataggatgatgggcagattatattgggttgaaaagtcaaagggaagtgaatgcacttttttccccaagaaatcttatctgagacaagaagaagagaagcaagacaatggtttaacagagactcatggtcaggagaaatgtgtgtgtatgtgtgtatgtgtgtgtgtgtgtttctcaacaaacgagagagccttgattgcctttgtaggtctaagagaaagagctacaaaaggaaaaaatacataaaatatgagaggaatcaggtccagtgcagtggcctgtaatcccagcactttgggaggtcaaggcgggcagatcatctgagatcaggagtttgtgacccctgtccaacatggtgaaacctgtctctactaaaaatacaaaaattagccaggcatggtggcaggcgcctgcaatcccagctacttggaaggctgagacaggagaattgcttgatcctgggagatagaggttgcagtgagctgaaattgtgccactgcactccagcctaggcaacagagtgagactctgtctcaaaataaaataaaatatacaaggaatcattactcctactcagtgttccaaggtgctggaggaaagagggaaaaatagtatcatgaacacaggtacaaaatgtccaacaactggaaattaaatgaatcatattgtagaagaacatttattgccataaaattattaccatataccatatgttatattaacatatatagccttatatatgtgacattcatatggtattatattgctatataaatttttaaaattaaaatataaattgtgatgtattatttttaagttaaaaaaagttggtcacaaaacaagagagtaatctcttagctcttcttccctccttttccttcctgcctcctcaatcttttcctacctttttacctcctccagagtcttggctctacctaaagagagttgtgggaagttctttcttagtgttgtgaggtaggttagctttgtcaagtaaaaccaagctttctgtttatcttgctagacggtgatatttcatctaaacgattggtaccagatatgttttggaatcttcctatttaaagataataatacatattacttgatattaccagcagagtctgggaaaatacccagaatcaaacatattaatatatctattggaaaacatgggattattcaccttaaatagcttgaataaaaatgttatagccttatgttaattcaagttaggtcttaatgccaatgtgccagtgggttacaaaaatcctttattttcagaagattttggatttttgtattgaagataaggaattttggtataatattatatttataatttttcatagtctaactgtgatgatatattatgcttgaaaaatctcgattatcaccaaaagctacctccaaaccaagggaagagacacaaagagaggtaaaagtgaaataaacccctatcttgccacacagattttccaagcattttatagcaaatatgcataattttgtttatatcagtatgtcattgcaaacatcactcagagttttgcttttatagtttttctttgtttttcctaaagttattaattgccttatttttttaaatttcgttaattttctttgactttttgttaaaaccccatatcttccaacagcatctcagaataatttttccacaatatcattttcataagtttatcttgagctaaaaataataacctttctctgcactggtttccctctagtcattctgcacagttgtcatattgagatttcctttactgtcatcctaggaatgctctcttagctatttccttgttttaggttctctgtttttctccttctacctttatttgctcctttgttctgttgtagtcaacgctgtctagtcacattgctctaatctgaactggctgctctccatgccttgtatacgataggagtcatcctggaatctccctttatcctcatggtgaagatttttctttaccacttccctgtgtggatttcctgttttctgttccccgtcttccttgttttgggcttgtgccctctttcttgttgttaacagtttccggaaagagagtgatcgggatgcaagatttttgagactcactggtctgaaactgcctttcctcttaaatttagttaagtatttccctgggcatggaattcaaaggtggttatgacttttcttcaggattgtgaatgtatttatatcctcccatcttacgttgctattgagaattctgaagttcttctg

SEQ ID NO: 37046 - DNA, 2300 bp, Homo sapien
ccttttacaaattgttacataataatgacatctttttgtgaaatatgtggtattcccacccacctgggcatggaaaggccctaagaggtcagcaagcagttagagaagctggtgtttaccggaaactcaggagaaccagccaaccacaacccctgggttaccttggcaattgcagaataaatgcattatagttactaaagtaaaaaattagatatgcctgtttgcagattgaactataaaaataccattcaaagacaaatagatctaaaaataaaatggaaaaacataaacactaattctgtaaatattatacttaatgcacaactgaaacaaaatttgccagcttactcaatatcaaaatctatgaacagtttttctattttatataatttccctctcctctctctggatctcgctccccagctcattttttcttttttttgctctgattctttatacacctctgttgcctctgtgataagcagcttcaaagatggttcctaatgctttattggatagaatacaacaaaagcgatgaggtgttgcttccccaattacattacgaagcatccgtggcttccatctccagtgggttcacttgctgtctggctctaagggaatccagataccataatgcgggctgccctatggtgaggtttgcatcactaggaactcatgtctctgggcaacaaccaatgaggtcttgatccctgccgtcagccacatgagggagcttggagctcggaagtgaatcctcctggagtcaagccttgatatagctagccctggcagctgcttgactgcagccttgtgaaagagaccttgggccagaggcaccagctaaactgcccctggattcctgacccagagaaagtgggagatgatgtatttttgctttttgaagctgctgaatttggggataatttgttatatagcaatagaaaatgagtaactcttttgtattcctctttgtcctggcttccccattttgaggaaaataaagtaaatcaaagtgtagagctgaaatattcacatgaaaataataataaagttttaaaattatttgaatgtcttgtgttgacattccaaaatatatgaattccaaaaatttatatgttgaagtcctaactgtcagtatcttagaatgtaacttttttggaaaaggggtcatttcagatctaattagttaagatgaagttatactggagtacagtgggcactaaatcgaattggtcctatgattgagtctcagtctttcagtgagcctgtacccctgggtttatgaccttcagttggcttttttcttctgcccttatttggcataaaaacaaagcaggtggatcacctgaggtcagcaatttgagaccagcctgcccaacacggcgaaaccctatctctactaaaaatacaaaaaattagcctggcgtggtggcgggcgcctgtaatcccagctacttgggaggctgaggcaggagaatcacatgaacccgagaggcggaggttgcagtgagccgagatttcgccactgcactctagcctgggtgacaagagtgaaactccatctcaaacaacaacaacaataaacaaacaacaacgatgacaaaaaaagctagagctgggattttccctttccctgtgttaaagattagagtggtgtcctcacaaaaagggaaaacttggatacaggcacacacatggggagaatagcatatgaagagacacagggagaaggcagccatctatgggtcaaggagagaggcctggaacacatctttccttcaccgccctcaggaggaaccaactctgctgacaccttcatctgggactcccaccctccagaactgcaaagcaataaattttttattttttacaccacccagtttattgtattttgttaggcagccctagcgaactaatgtacatagagttcttgagttaatcttcacaaattactgcaataaggtagggtcttttgttatgtaacaatgctatgaaatcatagcgttttcttaattaacttccgtagtttaaggtactaagttctggacaccacgtgtcttctttctataaataccaggacatgctctgtttttcagcactcattggacttcagcatgactactcagttgccagcttacgtggcaattttgcttttctatgtctcaagagccagctgccaggacactttcactgcagctgtttatgagcatgcagcgatattgcccaatgccaccctaacaccagtgtctcgtgaggaggctttggcattaatgaatcggaatctggacattttggaagga

SEQ ID NO: 37047 - DNA, 2300 bp, Homo sapien
atggtcaagggaactctaatggattacagtattgagggttagggtgggaggagtgggatcagagaggctgatggagagcctgaaagaattcttatttatggggtcaggaacttgataaggagaatggagaggaggttttacaatgagtttagaaataaagatttggggaaagccagtaaactcttagatattttattacagcacctctcctttaagatgtgtcccttacatatttaaaagaagaattatatttattgtaatacaaaacttctgactctaaacttcttaatcctacaataatgccagactgtcataaggattatgtaccaatacagtgtttcaaataactcatagctgcacgccttatacacctaggaagcaaagacattactaacaacattgggtaatcaaatatttaactcaagtttctattgatttcaacacacaaaaaaagctggtacatttcctggaactaggggctgggagaatgaaggggaattcccatatgtttccttttgattctattcagaaagtcaggtgaaccaagaaaagagttagaatttcaacttgaaatatgaaaattattttcttctcatcccagatcaatccatctgttttacatagtttccctcttctcctcagaaatttttttggaaaagaacttatgtctgatgtctgatgaaaacaatttatgtcagacataaactcagaatttagggctgaatttatgttcatatgtccttatttcctgaaatggtatcagggcataaggacatatggaaacactgtggggtatctgggagcagaaatatttggataatggaaaagtttattgaaaccaagggactttgaattatagaaacaaaccaaacccaaaatagacacaaatctccataacttacaattttccttagatcttagaaagaatctcaagagggagaagcagtgttaattgttctagaatcagagatttaaaccttaaaaaaaattctacattttaaattaactgatattcaaacaaggagattcaatccaaaattgggcgagggaagtgaatttaactaatcaaaaaacatttacagagcttagcacagtataaaattctatagaagcagcagagaattataatgtgaccctgcccttaagggacttataaggatgatatgtttaaaaaataaaagaattaaaggagaacttaacactttttgaattattgattagtcttcatatggaagcgggtttaaactgtagaagacaggtaaagtaaattgcatctcaataacaagaatgttcttaaaattggcaatgttcaaaggtggaatagactggcccatcaggtagtagattccgtcattcaacattcattcatatattgagctttcaccatctgtcacacatgtgctggggtgatgaggttcaacagtgagcaggacacttcccttaccctccaggggccacatcccaggatacatcatctctgtctagatgtttattggacatggatgttctgaaagaaaacagcaagtttctttttaatctctttaagaagacaaaacatacatatataatattaagtattggtataatatttaaattaaaggtcaagacaacagcaaggagtgagagacattcagcagcacagaaaaaaatgctataggagttcagaaatatcacttaggactggagtggatttgggaggactctagggggagctggaacttagacggatggagaacaagggcttttcaaatagaaatggccatacaaatatgtaagtagagtgctcaacaaattgttgctatgatgactaccttccaatattggccctattaatagaaatgttggcttaccaggaaaatttttttttattagaaaagacttcaactgccagtgtgttttggactggggtgaattcatctggttggctcaatcttttagtgttgacttgactctgaacaatgtcaacaactgcactgtacacttgaatcaatccaattacgtcctggctgtcagttttcttgcacaacatcctttctcaatgctgtgttgtgtaatatatgtgcaagaaaatataaacagctgattgccaggagggatttaatgtaaagtttttccagtgaaacaaaacgtaagaatctgagtttgtttttcaaagatcactaaattttagttatgattatatcacattttccaaaatgtgtggcagtttttgccctccttgctctgagtgttggtgcactggacacttttattgctgcagtatatgagcatgcggtgatattaccaaacagaacagaaac

SEQ ID NO: 37048 - DNA, 2300 bp, Homo sapien
ggcatttgggttacatgatttctaaactctaacagcactcataatctattatataccaatcacctatgctaatttactaattatacactagatagtatggttatatactaacagtctattatacaatctgctaaaaattcataaaaatatctatccctttacattttccacaaaagggcttgaccatttttcctgaattatttttagttttctgctctatagagataagaaaagttattcctttaatagaaacttctattcaaagcagaaaatatgagcagatcttatttatagcccctaggccccattcttaacaaaacatttatctcagtaagaaggaaagcacagaataaactttgtttaatcgtacctactcttctatgctgtctaaaagcatttccgtgacttttaccaaagggctggataaaaataaaacaaatcctttatttggcaggattgggcctggggaagggagaatatgaatgtcctaagaaggcatctgagatcacatcctgtatttgttgttattattgtttttttttttttttttttttttgagacggagtttcgctctgtcgcccagcctggagcgcaatggtgtgatctcagctcactgcagcctctgcctcctgggttccagcgattctcctgcctcagcctcccgagtagctgggattacaggcgcccaccaccacgaccagctactttttgtgtttttggtagagatggggggttccactatgttggccaggctggtcttgaactcctgacctcaggtgatctgcctgcctcggcctcccaaagtgctaggattacaggcatgagccactgcacctggcctgttagcattgtttttaaactcattgttgttatttgctgctaacaaaaatgtaagttacatcttctccttattacaacacagatgatctttatcaccaatcctggactcttccccttccctggcatcttcctccaaagcagggggtggggagggaggaaaaagaaggaggagaaggagtaggaggagaaggagaagtagggggaggatggggagggaagggtgaaagagagaaagaaggaaagaagcggagtatcctgaggcctggggcccctgagctgagattcctcctctggcctaggtgcctcggggtattgttgctgtaggcactaactatacagcagtgaacaaaccagacacaaaatcctgcttttctggagcacatgttttcagtccttaatagcaataagtaagtcagagtgtagatttgggtaaattttgttatcaatattgtcctgtgttacattttcttagtagtaagtatttaatattttcccccccgtctaaaaataaacacaatgtaagtgactcaacagaaccaaaaaaattgttgtcaatttttaaatttaataaatgagatatttgttgggatgtgatttttttacacgagagttagttatgagtttctattaacaaaagctggaattgttctatatttgaattcgggtgtcttttggaaattcaatattaaatcttagtactaatagtacatgctgttcaatccctgtaatactttctgattgtcttaaatggactgcaacttttctttctttaaaagtggtcagatatattgcgttcttaagattataaagtaggccaagtgcagtggctcacgcctgtaatcccagcactttgagaggctgaggtggatggatcacaagatcaggagtttgagaccagcctggccaatattgtgaaaccccatctctactaaaaatacaaaaattagctggacgtggtggcgcgcacctgtagtcctagctgtttcagagactgaagaaggacaatcgcttgaacctgggaggtggaagttgtagtgagctgagcttgcgccactgcattccagcctgggtgacagagcaaactccgcctcaaaaaaaaaaaaaaaaaaaaaaaagaagaagaagaagaagaagaagaagaagaagaagaagaaaaatgatgataaagtaaaaggccagtaactggcagccacatgttatgcaaacattctcccctctgtaaatactacatgaatgttatttttgctttcagaaatcactaaaccttggccatggtcacttcctcttttccaatctctgtggcagtttttgccctaataaccctgcaggttggtactcaggacagttttatagctgcagtgtatgaacatgctgtcattttgccaaataaaacagaaacaccagtttctcaggaggatgccttgaatctcatgaacgagaatatagacattctggagaca

SEQ ID NO: 37049 - DNA, 2300 bp, Homo sapien
acagccatgaaatcagttattgcataaatacaggtaggtttttttttcttttaagagaattaaagccagtgtagataaatctttcatctgagaatagtactaataccttttcttctccctatattttcagaacttttggctatgattatttcttctattgttttctgttctatcaccatgtttattggtcggcttttgtctctttcgttttagttatctgataaaaatgcgaatggcttggtggttcgtgtcttggttgttagtaagctgggtccagcctgtagttctggaacacgatttagtgagggagacagggatgtgaattaggaagtaggcaatcatctcatgcagtaagacagctatggcattggatcgtatgcttgctactgcatcttctggaaaaacagtattattgcagtaaagcaacattattaattggaaagaactgcatgggaaaggaggatctgcccacagattcttcattcatatagctgtgagaattaagaatttgtcttaataataaatttattaaatttatctttaacatcttaaattatcttaatttatcttaagatctgcccacagcttcttcattcatatagctgtaggaatttatcataacacagcactgaaaactttggtgagatgattcagaagagtgagaatttccaattgatattgtgcatgaattgatctttccatataaacaaactccattcagtagaactatggcatacgactcacattttaaggtgtttaaaaaatgcagacaaatgccagacttccatttttctgtttttgcatgtagtcactgtggttaatgttttagcctacaagaaactgaagaaacagctcataaagaatttcttcccctactggagcctctaaattcctgtcctgtcagccttccccagaggaaggataagcagggtaaaggaggtgctatgatcctgccctgcctccatgcctggctgccacccagagagggaaaggagtagagccatgattcacttttcagagagctgccaagctgttttctagagtggctgtaccatcctacattcccaacagcaatgtgtgagtaatccagttacacagcaggttgtttagcatgttttttaaaaaatagaatggtgcatgaaataggtggagtgaaagctttttatcagaaagagaatctgtggtacaaatggagggaatgccatcaagattagcaagtagaaacagaatttaagttcataattttaggagaaaccattcagatcaggttgacctggaagaaaggaaacttgaaagactttgtggagacagacagaacaatgcaaacataaagaagtagacacattgacattcttttaacaagacagtaaccaaggacaggtggttatgtcaccaaaccctgggtaaaagctgccttgggcatggctcttgtaatagggcctccatcttgtaggaatgaagcaatagtaataatagcaaaaattattcagcacgtatcaccattgtgcagatagaggaaactgaggcacagagagggcacaaaacttgctcatagtcacatagctaggaagtggctcaatcccaggcattctggccccagagtccatgtccatgttaattattattagataccaccatgacccttataacttacagtgagaaaaaagctctccataactagatgcaggaccatacacaatttagttctctctaatttgaaggacagtctggagtgggatctgtcttacagtaaaagaataatgtgctaaagagaaagactatgacatgaatatgagagtcgacttaggctttgtaggctagagaatctcctgattctattgctgtggttcctctgctgagcttggttcagtagaaattgtgtcaatgctcctcgcctgtgtcatctggcccatacaactccttgaaagaaaagctcaggaatcagaattgccaggctagaataaaatagacactctttctcctggtgtctgactgaagatgcagcatccttgaaccagcagctgctgggactcctgtctgtcatctcaaagggtacggcccacccagaaagtgaaatcaaaacaggaagtcaccaggggtgactggaggagcacaggccttggaaaggaaagcagctgagatccagaggagtggaaggctcccccttgactaaagctgtaagtagttaccttgggctgcaaacattattttttctttgcttccttgctcactgaaaataaacaagtggcattattggtggattgctgtgacattctcatattgatcaataagacataaac

SEQ ID NO: 37050 - DNA, 2300 bp, Homo sapien
tttaaggaaacaggcctccgggggatctccgtgatgcttgctactgaacctactcattagaattcctgtgattgtgagtgacagaaacttaactcacttttctgagtcacggaaacttactagcttcagtaaaaaagtgaatttctttaataaagtgtcaactcaaaaaatatcagaatacagatttgaaacgatgtcacgagaaatttttcttcttgtgatttgaacaagccctcccctttaggtggcaaggggacccctagcagcttcagtagaaagtgccagtttcctaatagttcctattagagtcacagaatgaagccccgctggcctgacctttgctgatggctgtagccatggggaaagaatgttctgcttggccaggccaggtcacatgctcagttcagagcatggaacaaaatggtttcccccattgctacttccagaaaaaggaaaaatgagtgccagaggcaaaacagatgtgaaagttccaaataatgtggaagagcttatataagtacatgggggaacatagaggaataccagtatagtaagattataatgaagtaaactgaagaaaactgttatattaaatgaaatggggttaaaatttttttggaagggtcgtttattttctttctttattccttttttttttttttttgaaggtttcagtctgactacgggagagatcgaaactgggtgctttcttctttataggtcttgtcagagtgattctacatgtttttttttttttttttctttttgagatggagtctcactctattgcccaggctggtgtgcagtggtgtgatctcgcctcactgcaacctccacctcccaggttcaagccactctcttgcctcaaccttccaaatagctggcattacaggggctcaccaccatgcttagctaatttttgcacttttttagtagagatgggatttcgccatgttggccaggctggtctcgaactcctgacctcaggggatacacccacctcagccttccaaagtgctagaattacaggcgtgagccaccacactcggctgattctacatattctaaaaaggtttatttagtactatcatctgggggaccagttatatcagcagaaaagggcaactaagctgtcattatgactcaaattgttatcaaaaaaagaaaaaggttaatttcctcctactgaaaagacaacaaagcaactcttttaaaaaaaatcatattctaaagcaatttattataaaaattatgggtgaggtactattctttttagtgagtacagttaaaaaggaaaaaaaagaaaacaagcttggcatttgagaattgtcttattcctttttagtgtattggaccaagttacagatgggccagtatttattgctatgtgttttctttttctttttttttttttctttttcttttttttgagacagagtctcactctgtcgcccaggctggagtgcagtggcacgatctcggctcactgcaaactgcgccgcccaggttcatgccattctcctgcctcagcctcccgagtagctggaactacaggtggccaccaccacacctggctaattttttgtatttttagtagagacggggtttcaccgtgttggccaggatggtctcgatctcctgacttcgtgatttgcctgcctcagcctcccaaagtgctgggattacaggcgtgagccactgcgcccagctgattctacatattccaaaaaagtttatttagtgctattatctgggggaccagttatatcagcagaaaagggcgactaagctgtcattatgactcaaatggttaccaaaaaaagaaaaagggtaatttcctcctcctgaaaagacaacaaagcaactcttttaaaaaaatcatattctaaagcggtttattctaaaaaccatgagtgaggtactattctttttagtgagtacagttaaaaaggaaaaaaaaaaaaagaaaaccagcttggcatttcagaattgtcttattcctttttagtgtattggaccgagttccagatgggccagtatttattgctatgtgttttctagtgagagtaatggatgcagttagctttgctgcagcaatgactgcatcttcttctatcctggcaaaggcttttccaaataacgtggctacggtattggtatgtattttagaagtatttcccactttcctttgagtgtaggccaaaatatttgcccttccaagttaaagctggggtccattcttctatacttgcatttctctactctctgtattattgttgcctttcaccccgagtttgact

SEQ ID NO: 37051 - DNA, 2300 bp, Homo sapien
caatggtgctgtcttggctcaccacaacctctgcctcctaggttcaagcgattctcctgcctcagcttcccgagtagctgggactacaggcatgcgccaccatgcccagctaattttgtatttttagtagagacagggtttctccatgttggtcagcctggtctcaaactctcgacctcaggtgatttgcctgcctcggcctcccaaagtgctaggattacaggcgtgagccacagcacctggcttagagtggaactttctgttcagagtggttctctaggttctcctttacaacttgcccactggggaatttttttttttttttttttgagatggagtctcgctcggttgcccaggctggagtgcaatggcatgatctctgctcactgcaacctccgagtcccaggttcaagcgattctcctgcctcagtctcctgagtagctgggtgccatcatgcccagctaatttttgtatttttgtagagacggggtttcaccgtgttggtcaggcaggtctcgaacttctgacctcgtgacccgcccacctcggcctcccaaagtgctgggattacaggcgtgagccaccgcgcccggccctcactggggagtttttacataaccttcaagaaccaaggtaacatcacttcctcaggaagtcatccaggacccatttgccaaagtaaatggttcttccaatatgtttgtatacaaccgattgcattatagtagattattaattagtgtgaatttcatctgctagaaggtgtgctacttgagggcagagtctggatggggctcattcctctttaaattcataatgcctggcacaaagtggtaactcagtcttttgttttgctttggcttcaaaacaagaatttcccagtccttaaactttatttatttatttgagacagagtttcgctttttcacccaggctggaatgaggtggcacagtaattacaaacttactatcagccatactgtgtactggaactgaccttgtacagtggatctgaggcagattctcagtcgataaagctaccctcacacaattcttttggatcttggctcactgtaacctccgcctcccaggttcaaacgattctcctgcctcagcctccctagtagctgggattacaggtgcctgccaccacgcctggctgatttttttgtatttttatagtagagacagggtttcaccatgttggccgggctggtctagaactcctgacctcaggtgagctgcccacctcggcctcccaaactgctgggattacaggcatgagccaccgtgtccagccagtcctcgagctttaacacttcccaaatagtaaatacggtgaaaataagtgaaacctattttttatgcaagaaaactgtgagtgtgagagtaaggtagcagccatcatgttcatgtgctaactactaacacactttatcgccaatgctcacagccgccctacgagataaacattataatctcagttgtacaggtagagaaactgaccttgtcatccaaagttacacactgccagcaagtgccctggcttgaatccctggcacctgcctccagaggtcgcactcctagccacttcgccatgcttcctcgatattcattagtattcttgcaaatatttttcgactccaggtgcttcacataggttaattcatttccggttcaatagtgtctggcttcagtaattacgaacactaccgcatttacccactgtgaaaaataattcactctttcaaagttcctgtataacctaattttctaattcacttttgtgtctttcagttgaggtactccctgccttttctgtgtctacataagcttcctttctttcgtttcgtaggaataaattgaacttattttaagattgaggggggtacagctgtatggaatatagactcatcttttttcactctctgtcacagaatgaaaaaggacaccatgatatagcagctgaggtggtggattaagataatgaggcggggggggggcgcaaaacaaaaaaaaaaggagccttgctccacccctgccccgcccccggcctcctcccggggacccagagtcctggaaggctttggggagctccgggccgggcggatcgctgcctgcagggagtcggggatgccaggttccagctgagcagcggccgcccgccagagtgccagtggctccttggaggtcgagtccaaggacgtggcttgaagccgggagctggggcgccggagtccacgcaccggggatggaggcgctgggtgacctggagggaccacgcgcaccaggaggtgac

SEQ ID NO: 37052 - DNA, 2300 bp, Homo sapien
acagattagcagctgctgaaagatagaaaccaagtctgagctggttggtactgggaacaactgccttagctaacaaggcacttgatcattttccccccacataaatatgctgtttggcagtgaatgttttcacttaggtttcccaaattccctgcttcttccttaaaaatttgtttggggaaggaatctaatatgcttagcatatcaactgtactgtctttagataatgagaaatgcgctgaaagactatttgccacattctctttcaaaaatacaaacgtgttaattataacctccaaaaaaggcaagaaggatttcatgcctttgcccctacactttcatccatttagaataccctcctctccttccatgctcaccgatttggaatctcttagtttttgttttgagcctgtttcgaatgctgccagaagcctgaggtcctcttaccttttcacaccatccccactccctaaccccctgccactttgtatctcctctgtggccctgaggtattctgatttttgtctaaaatcttaatcccaccacaaacaaaccagggctacaggaatgaatcatctttataaattcctcgttttttttttttttttaaatcaaaagctcaataaacatttgcatgagttactgacagagaagcagcttcaacgctttaaaaatgaaactgaaaccagcggaaaatctaaaactgaactctatcagtaaactgaactctatcagtttattaacattacagcaggtctctgttctggtgaactccctggtgctcttactgcgttacccatttttgtttttttcgctgcactcaccagtctaacagtatctgcccactggattcacagcgctggcacgtgccaagcgcctaataattgctcactggtttggcggctgactacccaggagaggaaattaaacacaaaggcagtattgatcatattcagtagtgtttcgtgcgtttggtttggaagtggggattggggaatggccaatcacttccaaatttaaaatattgcttcctggaagaaaatggactcctcaaagactggatatttcatgtctgtagtcccaggacctggccctgcgtcaggcacattgtaggtgttgaaaatgcacctgaggaattctgagttgcgcggaactgtgtattccgagcacaacgcgtcgttaaaaaccaaacaaagcagaacaaacttcgttcagaagcgactcccgctatacttagaaactagaattgacccctggctgcagggttccgctttaccaacacaccgcagggaaagggcttagaaatagtgaaagcggccgggggcggcgggtcacgcctctaatcccagcattttgggaggccgaggcgggtggatcccctgaggtcaggagttcgagaccagcctggccaacatggtgaaatcccgtctttactaaaaatacaaaaaattagccagggtggtggcaggcgcctgcaatcccggctactcgggaggctgaggcaggagaatcgcttgaaaccgggagccggaggtcgcagtaagctgagatcgcgccattgcactccagcctggaagagtgaaagcatgtaggctctcgtttcatgaagacaaagatgaggatcacacccacaacgacacaaacatggtctctcagggtgacttagaagcgaaggaacaaagtgcgctgcctggggaggctgggtcttgtagaagcaacaggaaagtagaacgtggtgtggaaagggttaaaactggcgctcggcgggatacagggctctaggtgccttaaagaacacgcggacacacttgtttggcttctgtcgcgctccgtagaatgagttccctgggcctcggtgggccacgcctccgcaaagaaggacaacgcgaagctgcccgcgtagtgcctgttgcactcgccaaggaccggcctggcagagatagaaaactcgcagtacgtttgcctcagaaccgcctcaatccggaaacagaaactccccaggcccggcactgcgggagccacctctttcgagggtgggagtgcacatgcgcacaggggacctgaaaaacccttaaataccggcatgcgtgcggatgaggcctctttccctgccgccgccgagtcgcgcggaggcggaggcttggggtaagttgagcgaggcggcaggggggtgtattggttataatttgtggctcgttgcgttcttgctgggattcgtgacgagtatctggttctttaacaagtcaatgcttttgttttttagtgcgttcaagattcaacttcacccgtaacccaccgcc

SEQ ID NO: 37053 - DNA, 2300 bp, Homo sapien
ttttataattttgaaagctttaggcaattgcatataagaaactgtggattgcagtctttttttagtagtcgttgcttccaaagactgacacatttccctgctgatacaacagctgtatgagtccctggaagcaaggcatgctctcttgacttccccttcagccttaaccaatttattctgcatagagcctggtcacatcctctagcttacagaatgtagctgattcgtagtccaaattcccaaactctgtttactattgaagaattcaaattctaatttgtgttggtgagaagtataagatttattttgtaagctttaaaacctttgactttctgatcatcattttatatccatgcaggcttcagtagcagaatatccctagggaagcaagtacttctccagaaaaatgtaaggtaaattttttctgccttaccagatgcaagagaggaaagtatagtgaatggaagattgccttgatacctgatctgtggatattttcccagcctgttttgtgagtctgtcaaatccatagaccttaagacatacaattccttaagattattaactgattccagctagtatttattttcattcaattcacaactattgtgaatatgtaaaacattaatatcaaaaaatctatgtgaaagactatgtaagttattaaaataattttattggcatctcaaatccttatttatttatttttataggtggcatcccagttttgcgacttcttgaaatcttccttttgcctcctgttgcaccttaatggccattaggaaatggccgtcattgtatcaggggaggtgccaagaccagtcctttgctagtttctggaggatattgcattctggctataaaagtaaaatgctcataatatttatttatgattacaaacaaaaacaatcattcatggcttttaccaacattaatattttaacatatcacttgctattctcatgttctattcatttttaaaacagaaattttgctacatgcaacaattatgggaaatggtcttataaatatgaaagtttgaaacaatgaacagaattaacacatataatttagagtttgagtgtcatttaatacttttttattaatccaggaggcaagtctgttcacagtatagtcacagaggttgtcatatggtaataatagatctataacattaagaaaactataagagatgtccattaaaaatatctccttatatgtatttttacaacacatcatcagcttgtttatgaacaaggacacaaatcaaaataatgacagattgcccagattaggttaatctgtacttgataatagaatgtctttcatttattcatcattcattcatttattcattcaacaaatgttacttaaatgttcatgctgtgtcagggactatgctaggagcttaaaatacatcagtgaataaaatcctccatcattgttcttggggaatttaccttctaatgaattcttcatttttattccccaagctagtttaaataatagaaattttcattagcttttcagtaattctgagtccaagaggcacaaggtacaagacatctagtccaagaagcactggttccaccaatgtcatatagcaagctaataattctccctggatggctgccttttgttttactttaaaagttatcaattgaaaatttattttaggagataattttacataagtatggcccattgactggaatattgctttttgaataatgacactgatgtattacagaagctaaaaactgaaaaatccactaattttctgtttggtcttttaagtagactctgtggctactgaactctgctttcaactgggaggtggttcacagataaggcttccattggaaacatcacataatggattttctccccaagtatgttgcctatcactaggcctgtcaaaggtggatgcacatagaccaaatccagtggagtgactttttcctttgtaatttaccttctgtggaaggtaggtaggatgtcctccaatgatgcccacatcctaattcatggaacctatgactatgttatgttacacaacaaaatggactttgtgatgtaattaagaagagagacaatcctaatcacacaagaccttaaaagctgagaacttcctcctgctggggacaggacagatgaggcagaaggggaggttagggaggtttgaagagtgagaagaacttctgcagtggctgacttggaagatgaaggaggttatgaaccagggaatgggggcagcctctagaggctgagaacctgctgacacctacccacaaccgcta

SEQ ID NO: 37054 - DNA, 2300 bp, Homo sapien
gttgttgccttttgaggacagtattaaattcatcattgtacttaatccttacatgatatttgctatagccacagaacattcttagacactatgattcacaaaacatttaaattgcatatttggcttgtaatatattacatatttaaaagaattactatttttctgaataccattaatactaataatagcatcacagtgactaagagtggacttaaataaaggctggcttgaaactcaggtctgccatttattagcaagcttctaaaaattctgagcccttagttttctcacatgtgaaatggagaaaataaatctgcaaaattaattaaatctgtccattcatatttttctctccagtgtatattaactggcattcctcgttaggccagaatgtgctctcaaccatgctccaaatccgctttgtgccaaccccactgccagaaccctttctaccttgagaaccagaaaaggaaacattatgcctggcaatgcctacaccctccaaaataaatctgcaggaaagaacacccagtaagtgatgagagcagcaacgactgcctttatcattttaaatttacaacaccaccttttctagagcctcttaagcattgtagataattccccactcattaaaaaataaattgtaaccataagtattcagggttgatactgcttttgaattagacagtgctcatatcagttgcataagaccaacctaaagtagaggatgaaatcttttttctgaacctttttcagaacgtaacttagtgaatatattaaaactaaactttctttgaatgggagtaatttctacggattaatctgtaatctcttagaccacacctaaggtaatgtagaggttgttgtatcataggctttgtgattagagaccactggatttgtctttggaaaagtcactcatgattctttgggctttggtttcctcatcttttataccggcttaataatgaccaccgtagagttgtcatggaagttaaatgaactcatgtaccataagtgaccaatacaatgattgacactcagtgatttatcaataaattaaaacatttattatcaatatgacagagaaggtgccgctaaaatagacaataggtttttggaagaggtgattaaatggatgcaaaatttatggattgtttattccgtctacctttgctgtgtcccctggttgtggcatacacacgtgtgggtataaaatcgtaaatcctatgtagtcgcgtagtgcatgcgcagaaggcttagacacgaaatgtcatttcagcaatgtgcctagagaagctctgacgccgccttggaagtaagtcgttgctgcctgacctttgggcgtctgggacggatgcctatacctgcacccagcagcactggaaggggcccaggcccttcgcagcacagcctatccccagaccgcttagtccttcataacatatatctccacggaaaagggtatttcctcccgtcagaaaaagcgccccagtctggtctgggttggtttttatttcacgttgttgcaagtaggcgaagtcccttctgtctcctcccttggggtaagtggaaaggagtccggcagggggcccgcagtggcctgcacaggggaactgggtagcgagagagttccaggcaattccgggggctgccccacagaagcaggtggggatcgacagtggctctccggcccagggaggagagcgcggtcgcgggtccctcccctcagcctggaggctgcagccgctcgagtcggcccgggtgggggcggggtgggggcggcgcggagggcacggagattacggcggcgccacccgggacatccagggccccgaggccctgggcggtccccacgcgagatcgcaaaccatgacaataggcagtcacccgaggtcaaataaaaacggagtgggtcccccgcgcgccgccgccccccgcgtccctggcggcctcccccgaggcccccggcggcctcacgagcccgcagtagccggtggcgacgtcgcccccgccccacctccctgcgcaagtgcgaggctgccggcagcgcggcgcacgctccggccgttcccggcttccgcgcaaaacttccatcctgtccacgtgaagttgtcgctgccttagagagggggaaagagctgcgggaaaagccggggagtgacgactgcggcggctgggcgcgctctctcattttcttttcttctcctttcccccctgtcgcagtccggagttttggctcctctcctttcctcctccccctcggagccggcttctccctccgccccgcttctcccccg

SEQ ID NO: 37055 - DNA, 2300 bp, Homo sapien
ccattagaaaatgaagtttggaacatcacagtcttattttgtattgtatttgaattagaacagatatggaggaagagcaatatgtatatattgccatcatatttggtattttaaaatgtaaagtttgcaaattttaaaaatttacttttatattttgaaagcttaattaccctataatcaaagatatttattcatagcatattaatatataagagcatgctaatgatttgagaaactggaagaatgacagagggaatgatttgtgagacaaatgtttatttcatgctttttgcacaaaactcaaagcagtttaattaggagaaagtgtttaggcagctgtttccttttagaaaatgaatttctggaaacatgtatttaacatggtaatttcttcaaattggttatgtacactctagtgaaatgtatttatgaagcaacctttggtgcactggtatttttgtgtcttacagtaattacaagtagtggctacagccccagatcagcacatcagtattccccacagctgtatccttccaagtaagtggtcagtagattcttgctttaaattggcaaacatttatgtctatacatgttttatagatggttggataatacttggatagattacatatatagataaatatcctgtacaaatttgaaatggagacacccacatgtatcttgatgattcccttgaatatttatgtataccttgagaaaaatatcaagctcaaattagaatacattgcattttaattcaaattcaaaaatgctggctggttaaaaaatctaaagagattacattttatctaaatgtcaacacttcataattaattccatcattgaaattcttttgttggatttccagttctaataaacatatttttgaagaatatgccttattgtttttataactaatatagtcactttattgaggacagtggtagatatttcttaagtttaactatattgggtgtatatctgaattggtttggaatcagccagacgtgccaagattttgtattgctgatacatacacatttaaatatagtatgttattttctgcagcatctagagtgtctgcctttacatatatatagactgaaggttggatatccaatggggaacatgatgtaaaatgtggcatgatgaaaggaatgatgttccttttttttttttttttttaaggaagcttcctacctttctttttctttttttaaatttccaattcttgggagcgaattcttagtagggcttttaaatagacttccatagtctttgcatagcattaagtcactcatggtgagtgtgaatttgctcatgagcatattaattagctagtgtgtgctccattttcctcatctgtgtattaactggagtgctatttcagatatgagcaagaattgtagacctggaagagacacaggtgtaaaatctaaatcaaatttctacttttacaggtgtggtatagacatagggagtttaaatcatttgtctatggtcactagattggcttgtagcagagcctgagctcctgacattcagactgttgctttttcctatattgttaaaattatattgtggataaagaggattacttcctggatattatagggtttcactgaatctaggctgtctaaattaatacacagtctttgttgccacagtaatgctatttttctgatatttaggccctatccacacattctttctacaccagcagctcaaacaatgtctgcctatgcaggccagactcagtattcggggatgcagcagccagccgtctacacagcctactcacagacaggacagccctacagcttgcccacttacggtatttcacatcttctgttttcttctttggttataggcaggtaatcctgctggctggtagctttgtattctattgtaggttacaacttagaaggaaaatcatcttactaattaaatggtttacacattcaattttctgaacagatttgggtgtgatgttgccagccatcaagacagagagtggactttcccaaactcagtccccattacagagtggctgcctcagttacagcccagggttctctaccccacagccaggccagacaccttattcttaccaaatgccaggtaagtagctacacatgaaacatgttttgggagaactaattctttgagtgagactcattggcttcagactaggaatatccaatcatgaaggtagttttaagctttatcacagctcacacaatttctaaagaaagataactagacagaaacacgatgaaatggttgagtatacgtcagga

SEQ ID NO: 37056 - DNA, 2300 bp, Homo sapien
tttaattttgtctcacaaagtgaccaaaaagtggtcactgatatttatcagttataattcacagcagtcttttctcacctttgccatctcaaacttcctgagacttcttttctggaggttattctaaccgaaatagcactttatttaaacacacaggattctcttctgttgggggagggtagtttgggcatctgccttctctgcagttgggcaggatgcagtgaagtgtctattaggaggatttaaatttgtatcttttaaggaattatgtgaggaacagctgctactatatatgttgcagtatctactgaaagaatggagtgtcaaattagatggttcggttttttttttttttttaagaaaagcaccctgagagcttaaatattcaacatcaacaatgacaacataataagctaatgttagagttactctcttgaggaattctttttgtcaacaagagtagaaatcatttaattccagttatggagcccaagacaatttttggctgtaagaggtttattgaaataaaaagttgtgtgaaagtaaaactgcctttcaaagtcagatgcagaaggatagggcgctatgtatgtaactgtactgaatgcttttgaaagctactgttttgattctattggttttagtgcttgtttactcaagtcagtaaaaatcatttatgtttccttgggcactttatctggatgtgcaagcatttgtgtggcacgcatatacagtgagagttcaatttatctgcagaaactcaattattttattgattaagtacagtattgttgaatagctaagttctagggtttgagtcaaatgaaattcttatcacattctaaaacacaactaaaaagctatatactcagagaagagaaagtcaataccagtattttctcatgaactacttctaccaaagatcctgccaggtatttttgaaatacatataacatagtacctgaactaaaataaatgtctttaagtgccatacatgactacaacatgtttttgatataccaatattcatttcaaacttgctagttagttacaaattcattatatgctactttcaccttctcactgcagtgttcttttaaaagttgggtagcaaatttattccatctggcttctaatgtgccactacaaaagctaaaagttcatttattccacttatttccagtaaaaaataattaaccaaatgaaataagcacttttacttggatactaccacataaaatttcttttttctttttatacctttgaaaagactaataatattaagatcctctttacaatgcaactcatccatactgatcaacagaaaaactaaccccaaaagttatcgctgtatgtaaaaaattcaagttgtggaaaggttaaggtgtttgttattaccagatatatatatataaaatcattctgtattcataagtagcaggatcaatttaaatcaggttttagagaggtgattattatttgttatctaaaactgaaagcttgcctagtaatatgagctttcatactgtccactgtagaaaaaaaagaatgccgctttaaacagacagtaattgtattattcagtaaaaacatgactcaccatagagaaaaacaacaacaacaacagcaaaatgctattacacagatttcagcacacacatttatggaatgtactgaaccactcatttttactctcatgtctcaaatataactcaaactggatttaagaccttgtcatttaaaaaaaaaaactttctaactggcgtgttggtgggagtgtaaattagttcaaccattgtggaagacagtgtggcaactcctcaagcatctagaactagaaataccatttgacccagcaattccactactgggtatatacccaaaggattattaatcattctactataaagacacatgcacatgtatttttactgcagcaatgttcaatagcaaagacttggaaccaacccaaatgcccatcaatgatagactggataaagaaaatgtggcacatatacaccatagaatactatgcagccataaaaaatgatgagttcatgtcctttgcagggacatgtatgaagctggaaatcgtcattctcagcaaactaacataagaacagaaaaccaaacaatgcatgttctcactcataagtgggagttgaataatgagaacacatggacacagggaggggaacaccacacactggggcctgtgatggggtggagggctaggagagggataacattaggagaaatacctaatgtagatgacgggttgatgggtgcagcaaaccacc

SEQ ID NO: 37057 - DNA, 2300 bp, Homo sapien
gtcattttaaggcaccaaaaatcaagatctttactcaagatacagtctccatcctatgagtttgctcccagaaatctcatttttctaaaatctttcccatctttgaaagtggtcattaaatcagctactttttcagacttttgtagtacatagtatatatctgtttctactttaattatgtattagtattttaatgattgaataattaattttcatatgaaataaataagttaaaatctgtactggttaaaataaacttatgtaatcaatagacctggacattttagtcagttaaaagcaatagcaatttatttctcacatatgtagcagcagagggctcgtattcatactaatgggcctctctcctcaacctgctgtgtggctgtcctatcttctagtgatgcattatcatctgtatccagtgggcagaaactggagaagagcatggaaaaccccacaggtgcacttataaaaagcctcagccagcccagatgtgacacaagtcactttcactcaaaagccaaggaagaatgggaactgaagtcttagcatttgcctggcagtattcccttcactaaagcagaggagagactggactcaggtagatagctgacaaccacagccattctctcaaatccagtacttaaggcttatgtcttagtcaataaggtaaaaagaaaatcaataaggtaaaaagtcaaatctcagaaaaatgctgaggttttttccttgtacttacttaatccacccattatttattaaaggcttgtgctgaatgccataataataaatcctggacttcacacaacttatataaattagcaaagaatataagactgtgcaattaaagttacacaaataagatttttttaaatcaaaagcatactcagattgaaatgaactttcagtatcacccaaagcacaaaattactacttaaaagaaagtaatcagtcaataatacacattccctgaacatatggtttgcacaagacactgttctgcaatgctctgagtacacacaagtatagtatttgcatcctattagttcctctctaattgtggaactaatcattgaaggcagtctatgatttctttttcaattttaaaatcagcaatgctgctgccacacctctgaggtaaggtcatttccttgttacatgtaaccttgctctcttttcagtttttaattctattttgattatttttatttatagagttcacctgtcctgaacacactacttcttcatcgaatatatcaggtatatataatccagtctttgtctcttctatcaccatgtcttgtagacaaagcaaggaatgccacagtcttggtctaattacagcttagcctaatgagtacacgctgagcggtataagcccaaatcaacaggccacccaccaagagagtaaaaagaagaccctgagtcctcccacagagacctggaagagcttctgatggaaacaggagataattgtgttttgccattggcaaatgcatatagcacctagcacagcaatacatatgatttagtgtttaatatatattactgaaagtgtgataacgaaaagaaaaatagtgatttgacagacatacagcccagtgtcttcctccatactttctccccatatttctaaaggaggaattctaggaagaaactagtggagaaaaaatatatagtcacttacattaggccacttatatttgactggggcttttcaaactaagattcaagacacatttaaattaaaaggttgtgagcctctaagtggatttcaaaatatttaaaaatgtataccttttttctactaccttgtaatgatctaggcagtttttcacttcacagaattcctggtttgtttttaatgttaaattttgccaattggaagcaagtaaacacttgcggatgtgctacagataagtgagtctcgaatgggagctgatagaagaatatcagaatctctgcagagataatggagctaggaatgtgtagtttggaaaaactccccaaaatgattctacaactcccccaccctcaccctcatttagaactactgtttgagctgttacttcataatgagatcaaactgctgtcatagatgtggaacaccaagacaagtggctagaaaccttgtacatgaaaacagcggcccacccaaagtttgtcttttcctaggaagttatagagaaatgaggaggtaacagaagagcagtcaataaaagaaaaatttctttaaaagacatatgggtgggatgagaacgaatgattcttactttatctgtagaaattgaattttgctg

SEQ ID NO: 37058 - DNA, 2300 bp, Homo sapien
caacattgaaaaatatacagacaacagaaatcttttcagtggtacatattactatgatttttactatctccccagacagcctgagcagtccattaactaaggtgtaacagagacccagagccaaaaagaaaaaaaaatggctccaacaagaaaaatcacagcttaatgtatgcagtaaggccatagtttggatttataataattatcacattccagagcccaaattaattatttgtagttattttgcagatatcttagtagctacacacacacacacacacacacacacacatttcacaaagtattggccaatgcccattttcacatagctctttagtctaaaaataactttaactttcatgttttaccaagactgagaaaagggagagcaaatcaaaggaaactagttgaggaattagtgaagaaatttttaacaggcctgctgggtgttctctcactgctgtcttgaacctcagattaaattattatactttctgtgttgtagtactgggtcattcgtatgtgaagacaaaggcaacttcaacttgatatttctgtcatccctgctgtgggaagagtccttttcctggtttataacatcaatcattctcacaataaatcttagggtggatgtggtcatttaaatctccacctgcacaaacaacagaaaataagagagctcataaatctctacactggtgattaacaaattttggatcctcagcgaagatattatggaagaggggtcgctaattcattaataaagactgatttgctgacaacctgtttagtttacagcatagggggaaagcaaacaagaccctgctagcaaaacaaaacgttagaggttagtgaattcccagctgagcctaggattagagatatgatatcttaatgtaggagaagccttcagaccctaagccaaccactcagaaaccactcttacattttgctccagcccctcaacttcaatgcctacctgcaagggaagaaaacctggcaaagaaattgtaagagagatttatgccttcagtctccctggtttcattgcaccaatttcatccaatccctaggttctgtttccctgtgctttttctacctacttcccaggagactttcttattctctaggaaaggtggttcgagctggggttaaagatggaaaagaacctttctcaaaaggatagtcttgctttgtgttgtgtaatgtcagcttcatgtgaggaacactggcacctaacaggctggaagaagacaaagacagcagcattgaaagggacggtgcatcacaaaaagtgccaggcaaggtgatgtctgagagcaacaaagactctcaaggcaatattaaatgcatttctagaaaagaaaaaaaaaccgaggggaaagtttccatttattaggaaaagatgatcaactaacataatgttttccacacactcatactgccctctcattccctacccactcccactaagctgtgtgtggttgggtttgagtgtgcaaatcaagtatgtttgtgtacacgtaggcagtcctttgatgtcttgaaaatgaccaggtgtaggtgaaatgttttatacttacttttccatcaccataaagattctaggaagcacttgtcttcatttatcccggggaaggtggaagatctcggtaaagccttggagtcttatgaggtgttggcaggatgcggttgatactccctgtattttaattcgtgttttcttgggaggagagagggcatggagtgtaggtggaaggcccagaaagagccaaacgatctagtcgtttttctaaagttctcagtaacaaccagttgtgacgtcttaagagagaaagaaggccttttacagatggacagaacatgctgcttctcggccccggccacagttgggagaaggtggctggtaagtacatgatgcagttgagttgatttacattacaagttgcaaatcagggtctgtgcattgagtttccctccggttgtgaaaggggtctaagcgctttgctggggcctggcaggcccctccctgggctgcaaggatccgcccctctattccccagataaattcctagtgtccaccaaattcctcagcgctcgctcaccctcctctacggccacgactctgggagtggggaaacagagagccggttcctctgctgcagaagtcctcggggttccttctcacaactctgcgaaggggaaagggttgtgagacccaaccagaccccaactccagctcccagcaggaggtggctgcgccacactcgggaggcctcttggtttcagggtctctctgt

SEQ ID NO: 37059 - DNA, 2300 bp, Homo sapien
gactgagaaagtatgctttctcttcctttctccgggctgttttataataaagctcatttaagtttcttattcaaagatgaagagagtagcagttgtaaatattcgaggcaacactttcattttaggtggagattttaaaaagctatttactcattgggggggaaaaaccccaaactttcaattggagagaaaacatttttcatggtaaaatgtgggtttgcatcttcttctccagcaattccagaaaccaattcggtgagaagacaattcagacccctctcactactgctctagtgctagctgataagacttgccttttaaaaggaaaaatctctcattcttatcatatacaaacagagatcctagtaagttgttgttattgtttttctttagatcttagaagttttaaaataaaatcaaatgaaaaaaattaagatatatttcttaaacagtaaaatacatttgagaaaaaagtagactcaatgattatcagttttttgtgttaaaaaattaggctcaatgggcattactttttaagataaaaggtaacatttcttaaatcttgggtgagagtgacctattttagtatttattacactcatactagtgaggatttactgattttgctgatcattactagaacttctgggatttaaaaatattaatccacttataggagaagcacagaatatttaagcggttaagggcttacgtggacaatttggggggcatagatgtgtccttatccaatggtcctaaatatgcttgtgaaagaaacggagttgggtgtttttatttacaaggaaaggaaaatcaagttccactctctgctaaaagaagaaaaaaggattaacaaaatgcctgtccgctcgcagcgtcttgtcagtgttctcagttccgcagcagccactgcaccccagggaggatggcgatggagcgggagcgggggatccctcctctgtgccagctcaacacacttgcaaacttttaattgggctgccacgtcaaaccctcgcataaatcactcccgctccgggggctggtagggcagagagcgagggccgtgtctagaccgcccgcctccggtccctggaggctctaggcccgcggtggtcgagatgtgtaagtcaccgccgcgcccacacccccactcccagccccgcgcgcactcgcgcccaccgcaggcgggagtgcgggcgcgcctggactgcagctgcagccccgggagcactcaccaggttgaccgggtgaatgtacccgttctcgtatttgtcgttagccaggatctgcctcaagtgggcgatgtagctggacgccagcctgagcgtgtccagcttggagagcttggtgtcggggggcacccagggcagggtggtcttgagtctggagaaggccttgctcagcactcgcatgcgggcccgctctcgcgcgttggcggcgttgcgctggacctgcttcccctcctggctgaccccgctcagggggctcttcttggtgggcgccttcctcctcttgcccaggccgccgcggcccttctggggagacccattctcgcagttggagctctcctcggtgctctcgttggaagtcacaaattccttgttcgaatccattttcaacccgtcacattccaacatctccacctcttgaaggtcctccacatcgctgagggagccggtggacatgtttgggggagtggacgagggagagagagagagagagacagagagacagagaaagcgaggaagagggtgagagagagacagagagaccctgaaaccaagaggcctcccgagtgtggcgcagccacctcctgctgggagctggagttggggtctggttgggtctcacaaccctttccccttcgcagagttgtgagaaggaaccccgaggacttctgcagcagaggaaccggctctctgtttccccactcccagagtcgtggccgtagaggagggtgagcgagcgctgaggaatttggtggacactaggaatttatctggggaatagaggggcggatccttgcagcccagggaggggcctgccaggccccagcaaagcgcttagacccctttcacaaccggagggaaactcaatgcacagaccctgatttgcaacttgtaatgtaaatcaactcaactgcatcatgtacttaccagccaccttctcccaactgtggccggggccgagaagcagcatgttctgtccatctgtaaaaggccttctttctctcttaagacgtcacaactggttgttactgagaactttagaaaaacgactagatcgtttggctctttctg

SEQ ID NO: 37060 - DNA, 2300 bp, Homo sapien
taataggtctataattaatagggaatagtgcttgcagcaaaaccaaatcccattccagaatgtggaactaatgtagggaagcaaactattggctgatccatgacaaaagggagtctaaagtaattgacattcctgcttctaggtatttggctggtccccttgaaggagaatgcctcgtaaggaccttagaacttgtcgccattgctgtaacgttgacttttcaggagtggcagtagccactggaatagagagtctcccctgccgtttccttggcaaatcatgttattttccaggctaaaactccactttccctagcacttggaagaaagtccaaactccttctatggtctacaaggcactgaaagttcaagaccttaatttccctccaatttcaatgactgtcattcttcctttgcactgtttcctgatgccctagccacactaataccccagcacagcaagtactcagcatatcttgttccctctgactggaacactctacatacattcttcccactcccatcccttttagaaattggctgagatgttacctcctaaaagtcctctccccaccaccacacagacattactttctaacccagcttcttgttcactttctttattaaacctgacccaactataatcactatcccttgaaaaataaattagtacagaaatgaaaacaaactccatcattctacggagctttcaaatgctcgaatatgtttctgaacactcagaggggaaagcaaaaaatcaagaggcatccttggagatctcgtaaataataaaatacctaaatggttgcctactgtcaaaaccccaagaattcagcccacgtcttctcttttaaaaaggcagtggcattttcatttttttcatctgattcccaccaatcagaggccaggtacccatgaacccggctcggcgtggtcttttaataattaaatcagggctgccattgacctcaactaacgccaggggcttctgactgcagccgagctctggtggaaaggccgatgccggcctgagagtgggaaacgtggggccgggagccgggggcttccgcgcggcgtggcgtggcgtggcgtggcgtggcgccctcagggccgttacgcgattttcgctcccgcgggcagcgcctctcaggccactcccgagggaccccgaggacgcactcgggccccagggcgacggttcaaacgggccattgtgcgcccccggggtcccccggcccctgcagggctacttgggcgcagagccgcggagggtctccgttcctagaggtcctcctatcccgggctgcctgagtcctcgccagcatccgccctctcccactcccatccttcctggatccgcctctcggttcccgagggacagtcccgaccgcaaacccacgtagagtaaggaatgtgggacaggcgacagaagtggcatacggtcctgcgttatccctccgtctcgccacaccttgtgtctccatctctccccacttccttccctccgtctgtcatctgtcatccccggtcgctctaagaccaggattccaattcgcctagtgaggaatctcactaggggaatttatcgcgacatcataaattaacgggttcattttgactgaaaaagcgaaggacttttttcaggcagaaaacaagtctcgtctggacggtaaggactagctttagcaattatataatggggggtggggaggaccttttgtataaatttaatgagctgatgagaaagttctacggttttgacaaaaaagtccacctaaatattcgactgtatgccagaaattactacacgtttagatatcaactaaaaatatacaaaggatacacggtgttttcagaaccctttcaagcggttcttaaacaaaaaagtctagtccgatgcccattagcgccgcccccatcccacctcttacctcccaccgagcccagcgggtgggcaggaggggcctgatttggggaccaggaaggaggaaggaagggtgggggcgggggacggggaaagtgactggagcagtgagagccggaaatgagtggctagcgaggcacccaggagcgccctgtccggcggcgctctagccctcgcgcactgtctctatgctccccagcgtctagtctatttattgtcgcggggaagctgcggccgcctcgcacccggaacaacaaagcaaggaagacggagtccgagcctcgggggctcctagcaacgggccggggcgggagttccatggagactggggagcgcgcccgtctcatcctcatccttgtcctccagcttctccttcg

SEQ ID NO: 37061 - DNA, 2300 bp, Homo sapien
gaaaagtcatcactgtgaccgacaaggccctacttgaagtgccccctctgtacttatccaaattcattttaagccctttccgtcctaccgctccaggctcacaatgtgccccacatgttatatgttggccatctgacagttcctaaaacataatgagaactttcctgtcctaaggccttggaaattactttctcctgggcctgaaatactcttccctctgttgcttttttgttttgttttatttctattttgacaagttgcaaacatataacaaacatctgtgttcctaccaccaaaaattaatagttactaactttttgacatttttccttggatttgaacattaacgaaagaacaatataaaggtaaattctccttgttctgcctgtgttccatccccctttctccttactcagaatgagtaagggatattgctggttccttacactacatacatttcttccttccttctgtttagcaaaaccttgactttgttaaggcattcacacactgcccactcccacctccaccctctgccccaacaccctcatgtgttcagcagaggccatttgcagcacgactgtggcccaggagataagagggcaagtttcctggaggctgtgtttcattttgacccaggctatccagcaaggaggctgtagcacttctagaggctcctatcctctctctcctgccctcaaagatttgcctttagagaactggaatgggaccaaagagtcaggctctttgaatttctgatccactgccaagtcatgaaccaaatgatgttcttgtttgttcagtcttcatcatgtgtcatctgcttatctcaacatcactgtctgatctaaaccaaaaacatcaacatcataaatagaaggaaactggacttcctacatgtctccatgcctatcctcccaaaaaagaaagaaaaatgatttctccttctatatcaaatcattttttggttagtgtattattttatcataattgtgtgttcgtttaaacccagtgctatgaaagacttctacaaggttaaatctccgctcaaatacaaaatgtttaaaatctcaactgagaactgacctccctgtctcttctctctgcttgcaggctgcggcatgtttaccttcctgtcatctgtcactgctgctgtcagtggcctcctggtgggttatgaacttgggatcatctctggggctcttcttcagatcaaaaccttattagccctgagctgccatgagcaggaaatggttgtgagctccctcgtcattggagccctccttgcctcactcaccggaggggtcctgatagacagatatggaagaaggacagcaatcatcttgtcatcctgcctgcttggactcggaagcttagtcttgatcctcagtttatcctacacggttcttatagtgggacgcattgccataggggtctccatctccctctcttccattgccacttgtgtttacatcgcagagattgctcctcaacacagaagaggccttcttgtgtcactgaatgagctgatgattgtcatcggcattctttctgcctatatttcaaattacgcatttgccaatgttttccatggctggaagtacatgtttggtcttgtgattcccttgggagttttgcaagcaattgcaatgtattttcttcctccaagccctcggtttctggtgatgaaaggacaagagggagctgctagcaaggttcttggaaggttaagagcactctcagatacaactgaggaactcactgtgatcaaatcctccctgaaagatgaatatcagtacagtttttgggatctgtttcgttcaaaagacaacatgcggacccgaataatgataggactaacactagtattttttgtacaaatcactggccaaccaaacatattgttctatgcatcaactgttttgaagtcagttggatttcaaagcaatgaggcagctagcctcgcctccactggggttggagtcgtcaaggtcattagcaccatccctgccactcttcttgtagaccatgtcggcagcaaaacattcctctgcattggctcctctgtgatggcagcttcgttggtgaccatgggcatcgtaaatctcaacatccacatgaacttcacccatatctgcagaagccacaattctatcaaccagtccttggatgagtctgtgatttatggaccaggaaacctgtcaaccaacaacaatactctcagagaccacttcaaagggatttcttcccatagcagaagctcactcatgcccctgagaaatgatgtggataagagaggg

SEQ ID NO: 37062 - DNA, 2300 bp, Homo sapien
tgaaaaaaattttctcccctaaacttttctctgagttaagagattgaggtaagtacaaacagagcttgagatagccagtggccccggtcaggtcaccagcagaataaagaacagaattaggagcaccaggaggtgatgttgtcagttgcattgctgagcattctttttgactcctggttggcttactatgcctgtggatctcctgtatggtttggctacacaaaacagagtgagaactgttgaactgcttttaaccatagtaaagtattctggaattagttttgtcttctgtctagtcaagcactatagcaaacactctaacactcccatggggccaagaagctgctagaaacacaggttgtgggatcacgaaacaaagcaatgatacaactaacccattgcaagaacattttccccctaatgaggtcattggttctgagcagaaagaagttagaagccaagagaatatagagaacttatgggaaacatatgtgtctcacagatagaaactgggactcctatataattataatgcaccctgggaacaaataaaatgagttgtttcaaaccatggttgcgttacacattctttagtggggacactgatgtgtgggattctgaacttctcaccctcttaatcataaggggcctggattatgcctggaggacttccattttctagcactatcagcagacatacaacgggtacataataaagactagttgaattattataggtttgtttccatttgctacctgtttccctgaaagataagaaaaatatagaattatttaatgacaagcaaaggaaatgtacaaataagtgaatttagaactttgaagtgattcagttaaaatgttgaaaagaagtaacaaaaatttagcttctgcttatacaagcacaaatttgtttttctgtccagagaaatgcctatgactaaaagccatatttcacggcatcttcttaaagtcgagtaggtctgaaaccataggaagccaagaaaattagagaaggacaaggctgggaagttagaatataggagagttacagctttagacctcctggattcataatctcagctctaccactgattagctgtgagactgtagccaagttacccaacctccatttcctcttctataatgttggtacctgcctcaaagtcatcatctgcgttattgcgcttagcacaatttctggcacataagtgctccacacatgttagtttttattccaaatgatttttaagatgatctcaatttcctctataaggcttttttttttaataaacatgatttgttgaatgaataactgaaggtaaaatgtcataaccctgtaagacttttttataaatatgttcacaaatcagaaaaagatcctctctcatgacctgattttgtttgagattacatgtccaccacacgcacacaatgggccacttagtctggcctctctgagtgaggagtatcctcctcctacctacgcaaacatgaaacctaacagaggattcagtgttaatttgtctcttaaagacaattctgcattaagaaatggattactttgctataacctcagcatataaaaagtctaaagaatctgtgcattctgagtttgtgtatttttggtctcaggctgtgatttatctgaaaggccttggagagaaagatataggcctttacctagaccaaaatcaggttgaaacaataaaggtattttatgctttgtgtaagctggtaaataccatgacttttggaataacagtcttgctgaaaaattgacacacttttccttctggtatgtctttgcataaattgttcctctttctgcaagattaactgataccatctgtgagtattctatccccactctcagcttgcatttaaatctgcatgtttcctttctctgcctcttttcaaaggtgctagaatacaagagctacccttagctaatggccaaacactccgtctgagttccctttcttttaaccccttgcttccaactctgcatctaaaggcaaaaacaatcctctgactcacggccctccccctgcctgtgataggctgcttggaatagcaacagcctgtgtcaccgaaaagggcaaagccttcggaaatagaaacaaagttggtcacaaatcacattagctttgcccgaagtttttccccacactcttctttagcatgctattatggggaaagtgaccactcctgggagcgggggtggtcggggcggtttggtggcggggaagcggctgtaacttctacgtgaccatggtacctgttgaaaacaccgagggccc

SEQ ID NO: 37063 - DNA, 2300 bp, Homo sapien
ggattacaggcgtgagccactgcgcccggccccagtaaatgctttttataagtgtgggcactgagcaaactttcccagccagactccaggagagagaatgtgtttcccttctctcggtttggggctgttgcaacaaagcaaaccaaggagttgagactagagctcactttagggcaagtgggggtggttttgcctgcaaaacaaacccctgcccaagaccaaggaaaaggcgtttcacatgctattcctggtttgacagctggtatttcgggactgtgccagatccagtaggcaactttaaaatggcagagcctttggtagcaagaggtcatggcagggcagccaccgcagacagcaacagcgagcgccaggtacctggccctgcgaatagtggtaacttgtaactgcccgctccgggcccagtcgccgtgctcgcggcttcccggccagcactggctcacgtccccgcgccggcggtcaggctgcggctcccagacatcccccagccgcggggttactggaaggcaccggcatcgctgttctgcagagcccgggccgccgcctcgagcttccctctcttccctgccttctgcagcggagtcacccggctaatctttcaggataaagtcacagtttatgtgggactcacataaagagcgagcgaggtggcaaaactaagaagccctggggcagccttgagttaaacccagggagggtagggacgattttaagaccatgtatcatgacctgcagggttttcaggtgggacagcgggagaggagcaggccccacagaggaatcgaggatgcccggttcacgccaggtctgcccccgggcaaagctacccctcccttcgcttgttacctcctcacgtgttcttggcatggcagagattaaaaatgcaaggaaaaaaattacatgcggaacggacaaaatgttctcagagattacttcagaaaaaaaaaagtgaaatgcagattgtacttcttcctttagtgcagagacgacttttatttccgccccctcccctccacattcctgacctctccctcccccttttccctctttctttccttccttcctcctcttccaagttctgggatttttcagccttgcttggttttggccaaaagcacaaaaaaggcgttttcggaagcgacccgaccgtgcacaagggccatttgtttgttttgggactcggggcaggaaatcttgcccggcctgagtcacggcggctccttcaaggaaacgtcagtgctcgccggtcgctctcgtctgccgcgcgccccgccgcccgctgcccatgggggagatgcagggcgcgctggccagagcccggctcgagtccctgctgcggccccgccacaaaaagagggccgaggcgcagaaaaggagcgagtccttcctgctgagcggactgggtaagcgccgccgccggccccgctgggggcttggctcacttccccagagcggcttggaggcaggggccggctttcgtcggagttctcggggccggggtcccggcggcgggaacgggaggacctggcgggcgaggtcgcgcgcgcaggcctgcgccccagggataaaccccggagggtggcgcgcaccgccggctcgggttggggaggagggtgggagtccggccgcaggacggcgcctggccggggagagggtatctgcagggacagtgagcgaagccaccgtggccgccgcgcacccgccgggaagcgcttcggcgctgcgaacccggctttctccggcggcggaataaatgagagaggtggaaaactaccccgggctctccggccctccccgcgccctccgccggcgcgttctctctctcctgccccaggagccgatggagactgataacggccctgcgccaggccgtccccgggcggtcctcgcgcccccgcccggggctcgccctctcaatggggacagaaccgcccgccgcaggcagcgtagccgccagcaaaccgcgaggcggccggggcggggcgaggggcgaggcgaagggcggggccacttctcactgtcgcgcaggccccgcccccgcggcggtgccttttttataaggccgagcgcgcggcctggcgcagcatacgccgagccggtctttgagcgctaacgtctttctgtctccccgcggtggtgatgacggtgaaaactgaggctgctaagggcaccctcacttactccaggatgaggggcatggtggcaattctcatcggtgagtgcaggaatcttgcgggacttctgctccaggagacgcaaagtggaaattttttgaaagtccc

SEQ ID NO: 37064 - DNA, 2300 bp, Homo sapien
agatagcatttagcttgtcttctcctccctcataatctctattaaccacccgcctgcaccccaaatgaacatacatcctacatgaaaccagggtattagtccgttctcacactgctaataaagacatagtgagatgggtaatttatacaggaaagaggtttaattgactcacagttcagcatggctggggaggcctcaggaaacttacaatcagagcagaaggggaagcaaacacattcttcttcacatggcatcaggaaggggaagtgctgagcaaaagggagaaaagccccttataaaaccatcagatctcatgagaaatcactcactgtgggaactacaattcaagacgagatttgggtggggacacagccaaatgatatcaaccagtatgcatgctaggccaatgtgggattaagcaaagccccagcacctccttcctagcagagtgcttaaaggtcccctcctgtatattactcaaattcaataaatgtctgttaaaacacttttgggggagtggcaatgggacgaaaaagaaagaacttgaatgaccatcattttttaaaatgaggtccattgaggtataatttacatgcagcaaaagtttcccttttcctatataaaatttgatgagttctgacaaatgcatagttatgtaaccaccaccatcatcatgatagagaacacttccatcgtctcaaaataattccctttgaactaccataattttaaatgaactctttagaagaaccacaaaaacttatcaatgttgtagattacataacatatacttgcatcttggacaacttaacatatctctccaaaatgaatagttgttttcccttggttatcatgccatcatttagttgtattgcattttctttttggaaacctcaaggcatttagcaaacaggatttcatgtttattcccaaaaactctggcccaactgtagagatttatagtccaattcaatgaaacccatgcatttctttcccagtttaacctgatgtttctcttcttaccagagacttccatgtaaatactttaacaatgttaggtgtgttatatataatgaggtcataatcagtttcaaattagcattgcgcctttcacttatttatcaattatattcccttgtgatgattatgaaaaggctccacatcctgaggacacttgtcagagttagatttattaatggaatgaaatagcaaataatgaatgactaaataaatgaatgagtgaatgaatgaatgagtggctgcctccattttatggatgaggcagtgtccgaaaggcacagtgaggtcaggtgatggcagaaagccacacaccgatgttggtggctttctgccaggtcagatgccaagtttattttctttgctttcttgctttactatcaactaatctttaaaatcattcccataaaatatcaacattaaagaataaaaatggaaaaataagccacatacaattaaatggcttttttaaaaggagctcagtgtgcaaaggataacatgagtaaggattttttgggaaatttttcacctaataggaagaatgctttactcttttatttatcaaaccttcctcatcattaaatggattcagtagtactttttggtaataactcgtgtgtgtgtgtatgtgtgtaataaagtactttgtatatgttcattgtgttctttttttaataagctgttttaatgaaaaagacacaattaccgtcaccattgcccactatataatgacaagtaggggaggggaggctaaaagagcttctacatagtgagagatcttccattgttatacctacgcttgcactttatttcattttcttccacgtttggacaggtcgagattaaatgtgattacatttccgttgagaggcttttattcagcaacaggattcaaaagaatgtcaatgagcataaaataaaaacggtgtgcaatttatatgaaactctgatttaaatggtcctaaccaaaaaaaaaaaaaaagaaagaaagaaaagaagctatttaaagtaaccctcccaaggggagtcaactgctcttcagtgtgccctgagccggctgtgccttctctccatccgctgctcagatattcatgaaccgttgcttcttccagcctcgccttctcgctccctctgcctttctggcgctgttctccctccctccctctggcttctgctctttcttactccttctctcagctgcttaactacagctcccactggaacttgcacaatcaaaaacaactctcctctctcaagccgcctccaggagcgcatcacctgga

SEQ ID NO: 37065 - DNA, 2300 bp, Homo sapien
ccacagtgatgggaatatgtcaaaaagacacacggctgaaaaagttcccaatggccaaaactgaaacaatttaagcaaatcaatcaatcgatcaacagtgcgctgttggactataactcaaagcttaagataaatatccacatgcccatactgatgaaaataagtgattaaagaactgaacaaataggagagagtagacaaatcctcagtgcagaagaattccaaatgatttttgtaaacctaatttttatacctataattttcatttcaatgtcatagaaaactaagtgaattactatgaatactatatttgtagaggaaagactaagggatggtaaggctgcagagcatcctgtaattaaaatgagaaaaccgaaagtcaaacaaagtcatcagtgggcagatttttatatacttcagccttaggtttccttggtaataaccctatctggcaactactacttattcctacatagatcttaagaacacagctctctggagtctcctcatacctatttgaataacgaggtgtatgtgtcctcatacaagagcacattcacttccacctatgcacaccctcgagaagagaaaggaatggaatatttttgtttttatttgtagctaaaacaagatttcactgtttactagtttctaaataccaaaacaatgatgggattctgtcatcttcctggtcacttactgctcatcgctcactgtgtggggagtgcaatgagtcagtggcaaatgctctgcagacacgccccttgttcatctgaaacgcacaaaggaggggtgggctgtgtgactaagcctgtgtgtggattcttacagtaagttatgtttctgagaaacaggcactaacaatagctcatttaaaaaacaaaacacaacgaaataagcaccattacaattggtgaaaaacatgtttaatcttttgcctaagaaagttttgatagcccaacataattgaaatggtggctatgcatcgttccaccctagttactcttaacggcatgttttgagtcaccaaacgtgcgtcctgctcagccttgcccaggcaactgtgaacgacagccctttccagaggacctcagaatgacaggggcatgtcacagcaccttcctttcttccaagaaatgccaggtcacagggggtgttcacttattctcaagtgacattcttgtccttaaaatatttttttcctccattatggttgtgacaattgttagcataaatattagcctgaaagaaggacaattcttatgaagcccaaattgggtttaagttataagtaacagttgtgtttttaaaaaataactcatcctcatcatacaaccagataaagtagaaatcaattgtcatataagatatacaaaatttgggtataaataaaaagataacaactggattaaaatgatcctttgccatattttactctcttggaagtgaactctgagcatacatataatgatatgcctaaaaagtgtcaatgacacagctattttcaatgaaattaaggaaataaaagacccaaaatgctcatacttaagatttgttaaaccttatccctggtcaacattctatgcagatctgaaactgaaactattgcaaaatgatgcaagactgtaagtactctctggagtttgggtgcattatttttgtaattccttttatgtaatggaactatttctttttccagggccatataaacacctgaagagaggacgatgtcaggtcgacagattgtggaatttagattcagcacctaagctatttgaggttgacactcactgaaatcttgagtgtttgcacctgctgtggaataagtcattgtccttggacaccttacaaggtggagtttgtgcacatttgggaagaaggaggcggctggcagagtgacttccttatcgacccactcaccagcatctccatctccctcagggggtgctgtccacccaccgtgttttgtttacatcagtagcaaagacatatgaatcatcttccactttttagctatgaatgaagaagtaacctctgacacccactagtgcgactggcccttacatgctggtatatgtcagactcttagcatcactctcatttcatactgctgttgatgatgtgaattttggaaatattctcccctattgggtctttctccatgacagatgatgtcctttggcttcggttttttgcctaagaactgtaagtggtgcttgctagccctactaagaatcctgccattgttgcaaatttcagaaaaaaggtaatgcatttaaggaacttttccctttgttaca

SEQ ID NO: 37066 - DNA, 2300 bp, Homo sapien
acctcccagggttcaaattactctcctgcttcagcctcctgagtagctgggattacaggcgtgtcccaccatgcccagcaacatttttgtgtttttagaagagatggggtttcaccatgttggccgggctggtctcgaatttctggcttcaagtgcccacctcagcctctcaaagtgctgggattataggcgtgagccactgtgcccagcttgagagagaagtagatttcttttttgtgtaagctgcagtcattttggattttctaccatgggcagccaaacctaaccttcactaatgcacacctgtgatttgaaagtgtttgggtgctcttagaagccaccatttatgtcttctcgttttacttcttcaataatcctataaagtgcaaggaataagaattgtcattcctgccgggcgcggtggctcacgcctgtaatcccagcactttgggaggccgaggcgggcggatcacgaggttaggagtttgagaccagcctggccagcatggtgaaaccccatttctactaaaaatacaaaaaattagccgggcatggtggcgcatgcctgtagtcccagctactcgggaggctgaggcaggagtattgcttgaacccaggaggcagaggttgcagtgagccaagatcgcgccattgtactccagcctgggtgacagagagagattccgtctgacaaaaaaaaaaaaaaaaaaaaaaaaagaattgtcattcccattctccagtcaaagaaactgaccttgtaagatgtcgagtgacttgcatgtggtcaattagcaagtagagaagctggaacaaatagaggcgtattatctctttaaaacaaatcacacatatgcttacactcaaacatggtgcacaggctttggagtaagatagacctgacttcacatttttgtgtctcattcctgtagctttaagcaaattacctactttttctgatcttcatttccttatctgcaagatggtaaacaacatctctagcgattaagaattccaaatgagataatgttggtggtcctgctccagggtgtggtatatagtagatacttagtaaatagagctctattgtcagcagaggcttatccttctaaagattatttatactgtgacacaaaaagggtaaaaaaaaaaaaaaggaagaaaaaaaaaaacattattcaaatatggaagtaaaatggagtgtaaacgagagcctagaaaggatgtttcagcttgaagttctgcgtccataaggaatttgaaatattttgataactttctggttttaaagaccagattaggctgggcatggtagctcacacctttaatcccagcactgtatgaggctgagcaaggcaggttgattgcttgagtccaggagtttgagaccatgctggacagcatggcaaaaccccatctctacccaaagacaaaatcaaaaattagccaggtgtggggacgtgtacctgtagttgcagctacttgggaggctgtggtgggaggatcccttgaacccaggaggccacggcagcagtgagctgtgatgactccactgcactccagcctgggtgacagagtcataccccgtgtccaaaacaaaagaagagtgagaataagaataataagaagaaaaagaccaaattagtgggcctggatgaacatgtttttcgaacccctggaacatcctaaacgtatttctttctatctgtatttgccattaaatgtcacagaaaaataatctttgcttttaagcccctcatgaagctcaagaagacgagaaagtagccattccaaagaaattttatttcatttattttattctatttatttatttatttttcacatggagtctccctctgttacccaggctggagtgcagtggtgcacacgcctcacactgtgacacagcgggagagcccagagcgacagctgttggaatgactgcactcttcctgctcaagtctgacctttccaaggtaggatttgattacaactagcaatatggaattacaagcagggagaggtgccgagaccacaagacatcaggagactaaaatagcaaggtggtgaggcaatctgccttttattcccctttcaagctatgagaagtaggcaaatgatgcggctgaacaatgcctccttgacttcaggatataaaaactactttcatgagcttcaagtcagggtaagtggggaaaatgacaataaaagtaaatttaaaaaaccacatttaaacccagtcaacttaggatattttgtagtacaagcgccaatctatatggttcctctgagatgcccacatc

SEQ ID NO: 37067 - DNA, 2300 bp, Homo sapien
aactataaggagtagaactcaggaatcagaggagctatatacagatagacagggaatttctttttttaaaggtacactaattgtaatacgatctttttttaattcaggagtacttagaatagatttcagcaaatttggatctttgagaacaatactcctcaagttactaggtcttctgtgtggtgagtcagcccaggggtgacatcctgcactgtgtaattgctggcatggctttgggaaccattgccaggctggttaacttagtttaggtattaagaagatatgaattctagtttgacttgtgccaaagcatacagaaaagaataaaagaaggtgttttttaaatttatttttgttttattttattttttacagagccttgctttgtcacccaggctgctggagtacagtggcactatctctgctcactgcaacctccggctcctgggttcaagcgattctcctgtatcaacctcctgagtagctgagattataagcgtgcatcagcatacctggctaatttttgtatttttagtagagacagggtttcaccatgttggccaggctggtctcgaactcctggcctcaagtgatccgcctgcctcagcctcccaaattgctgggattacaggcgtgagccactatgcccggctggaaggagctctttactgtcacatcggttgcaatttttgtgtgggtttagagcatttctagattttctatgaaatttggaaagttatttttactttctttaaaatggtagagatgtctaatgaagtgaatctaaagaaatagagaaaaggaccgtttgcacaatataactataaaaattccaatttgaagaaaccaaaagatcatctactacaacaatttgtaaaatgttggcatcccttcagtagtatccttgttagagattgctttatcatatagcggggaaatatacagctgtaggaaccaaatagaccagggtttaaatatcagtcccatcacttcctggctattttagctaagtcaaattgcttaatttctactagcctcagttttcttatcaacgaaatggtgcataaaagctaccctgtatgtggctggtaaaaattaaatgagattttatatatatataaagcacttagcactatgcctatgtatactataaaaaatgtcatacacaccgggcacagtggtcatgcctgtaatcctacctactactttgggaggctgaggcaggaggatcacttgaggccaggagttcaaggccagcctgggcaatatggtaagaccctgtctctacaaaaaatttaaaatttagccaggcatggtggcccctgcctatggtgtcagctgctcaggcggctgtggcaagaggatcgcttgagctcggaggttgaggctgcaatgagctgtgattgcaccactgcactccagcctgggtgacaaagtgagaccctgtctcaaaaaaaaaaaaaaaaaaacaaatcatacaaagcacttaataaaacttaaaagcaaaaccatacaaaactctctgttctgtgagctttttaacttgcctacctactttgaagtgttgtcattagggatagaattatatatttaaagcacctatcacatggtagagactcattaagttagaagggccattattatttctttcagatgatcattctacatcattcattcattcaccaaatatttaggtggaattgactgtgtgccagtggtttgagggaactcaatgagtgagacacttgtgttccttgttcaagtctggaggtgattggcttgaggtggtttgagtgtgacaggcagagagaagcagaagtttggggctaagtgacaggtaggtgttggtgccattgactaatctagggcaggttggaggaaaataagactttggggcagaagaggatgaagaagaaatcaagggttctatttttcctgtgttaagttcaagatgctcatgaaacattcaagtggaaggtcatggaggtagttgaatatataaggcaagagagatttgactggagaaaacaatggtttcattatgacatatacatggcatttaaagcaacagagcttgatgaggtgctgaagaaaaagtgtgtaaaagagaagagaggtccaaactgaaatctgaggagcctcaacattcagaactcaactgggcgctgtggctcaagcctgtaatcccagcactttgggaggacgaggcaggcagaacacctgaggtgagaagtttgagaccagcctggccaacatggccaaaccttgtctctactgaaaatataaaaattagccaggca

SEQ ID NO: 37068 - DNA, 2300 bp, Homo sapien
tcccagacagccatgaccaaccttccagaaactggtttgcctgctttagattctccttttctattcaattgaggctcatttgttgttctatggtcagggtggttttgtttttagttttttgttttgtgctttttttttttgagcctcccattctttgtctgccatttagtgggaaactaattcaaaagacatcagtgaaattaataaataatcatgggaaatggaagctgtggaggaaagctggaataacatgttcattttgcagaaaatatatatttaagtcaaattaacaaatatttaatcagtgcctattagatacgaggttcaccagcctttgaaatggttcacgccattctcctgcctcagcctcctgagtagctgggactataggcgcccgccaccatgcccagctatctttttgtatttttagtagaaacggggtttcaccatgttagccaggatggtctcgatctcctgaccttgtgatccacccaccttggcctcccaaagtgctgggattacaggaatgagccaccacgcctggcctattatttccattttatgaatgataagactgagactcagagagtttaagttgtttgtcctagggcacacagaccaactaacataatcagaatttgaagtacattggcctgacttcagtttgtactttgtatgaaagtttaagatgtactcctgttgcaaattacatgtctgactacagccagtattatgaagtctgagacgacatgctcattttctgtaagatttgattcatccaaataattagggatagaagcaaggaacacttaattttagaacaccagccgatagccagttgaaattttgccaagaaccaaatctagcctggaagtttcctatcccagctattggcctttctgtcttcaaaatatacagatcaaatgtttgctttaaatttgcctttaaagtattcaagagcaggggtgggcatggtagctcatgccggtaatcccagtactttggaaggctaagttgggaggatcccttgaggccagaagtttgagaccagcctggtcaacatagcaaaactctatctctataaaagtaacaacaacaaaaaaaagtattcaaaagcaatctaataattaactaacccagaatctgtatatctttattcaaaatttttatatacaaccagttactacattttttatttttaggcagaggacacatgtacttaattttacacagaacactgaattcgccagaattttctcaactaggcactctttattccatcctgctttgtggggaaaagcaagagagatcagattgttactgtgtctgtgtagaaagaagtagacataggagactccattttgttctgtactaagaaaaattcttctgccttgagattctgttaatctataaccttacccccaaccccatgctctctgaaacatgtgctgtgtcaactcagagttaaatggattaagggcggtgcaagatgtgctttgttaaacagatgcttgaaggcagcatgctccttaagagtcatcaccactccctaatctcaagtacccagggacacaaaaactgcggaaggccgcagggacctctgcctaggaaagccaggtattgtccaaggtttctccccatgtgatagtctgaaatatggcctcgtgggaagggaaagacctgaccgtcccccagcccgacacccgtaaagggtctgtgctgaggaggattagtaaaagaggaaggaatgcctcttgcagttgagacaagaggaaggcatctgtctcctgcctgtccctgggcaatggaatgtctcggtataaaacccgattgtatgctccatctactgagatagggaaaaaccgccttagggctggaggtgggacctgcgggcagcaatactgctttataaagcattgagatgtttatgtgtatgcatatctaaaagcacagcacttaatcctttacattgtctatgatgcaaagacctttgttcacgtgtttgtctgctgaccctctccccacaattgtcttgtgaccctgacacatccccctcttcgagaaacacccacaaatgatcaataaatactaagggaactcagaggctggcgggatcctccatatgctgaacgctggttccccgggtccccttatttctttctctatactttgtctctgtgtctttttctttcctaagtctctcgttccaccttacgagaaacacccacaggtgtggaggggcaacccacccctacactgctttagctaccaattctttttggaacaaagatctctccccc

SEQ ID NO: 37069 - DNA, 2300 bp, Homo sapien
ttacaaagtaggtgtgaaggtcaaatagaatgattactgcaaaaggttttggtaggcactaaagcactatcaagaatgtaagatcttataatctaggtaaccaaatagtactttacagaagcatatgttcatacatggttgatgctggaaatgacctgggagttcatgaagtccaacactcccagtttacagatgagaaacagatttggagaggtgaaggaacttttcaaagttctcagctggagactcaatggtagagagtttagaacactatgaatagtgagtggcctgttagctgaaccattattgtgcaaatttgataaacttggttctagttttagctctagttatgacttcctcagagttgaatttgaaattacgctacaattaaattgtccacaattccaaattgcaggtgtagccattcattatgctcttttcccatcccttctcaacacagtatcccagacagccatgaccaaccttccagaaactggtttgcctgctttagattctccttttctattcaattgaggctcatttgttgttctatggtcagggtggttttgtttttagttttttgttttgtgctttttttttttgagcctcccattctttgtctgccatttagtgggaaactaattcaaaagacatcagtgaaattaataaataatcatgggaaatggaagctgtggaggaaagctggaataacatgttcattttgcagaaaatatatatttaagtcaaattaacaaatatttaatcagtgcctattagatacgaggttcaccagcctttgaaatggttcacgccattctcctgcctcagcctcctgagtagctgggactataggcgcccgccaccatgcccagctatctttttgtatttttagtagaaacggggtttcaccatgttagccaggatggtctcgatctcctgaccttgtgatccacccaccttggcctcccaaagtgctgggattacaggaatgagccaccacgcctggcctattatttccattttatgaatgataagactgagactcagagagtttaagttgtttgtcctagggcacacagaccaactaacataatcagaatttgaagtacattggcctgacttcagtttgtactttgtatgaaagtttaagatgtactcctgttgcaaattacatgtctgactacagccagtattatgaagtctgagacgacatgctcattttctgtaagatttgattcatccaaataattagggatagaagcaaggaacacttaattttagaacaccagccgatagccagttgaaattttgccaagaaccaaatctagcctggaagtttcctatcccagctattggcctttctgtcttcaaaatatacagatcaaatgtttgctttaaatttgcctttaaagtattcaagagcaggggtgggcatggtagctcatgccggtaatcccagtactttggaaggctaagttgggaggatcccttgaggccagaagtttgagaccagcctggtcaacatagcaaaactctatctctataaaagtaacaacaacaaaaaaaagtattcaaaagcaatctaataattaactaacccagaatctgtatatctttattcaaaatttttatatacaaccagttactacattttttatttttaggcagaggacacatgtacttaattttacacagaacactgaattcgccagaattttctcaactaggcactctttattccatcctgctttgtggggaaaagcaagagagatcagattgttactgtgtctgtgtagaaagaagtagacataggagactccattttgttctgtactaagaaaaattcttctgccttgagattctgttaatctataaccttacccccaaccccatgctctctgaaacatgtgctgtgtcaactcagagttaaatggattaagggcggtgcaagatgtgctttgttaaacagatgcttgaaggcagcatgctccttaagagtcatcaccactccctaatctcaagtacccagggacacaaaaactgcggaaggccgcagggacctctgcctaggaaagccaggtattgtccaaggtttctccccatgtgatagtctgaaatatggcctcgtgggaagggaaagacctgaccgtcccccagcccgacacccgtaaagggtctgtgctgaggaggattagtaaaagaggaaggaatgcctcttgcagttgagacaagaggaaggcatctgtctcctgcctgtccctgggcaatggaatgtctcggtataaaacccgattgtatgc

SEQ ID NO: 37070 - DNA, 2300 bp, Homo sapien
ttctcctattttacaaattggtattttaaaaatttgaattacatattgcctgaaaggcagggagcatcatcatttttttaaatgcttaggttttgaaagtcttaagctcatacaagatacagaatttttcatcaattttacttgtccaaaaatggaacagaaaatgcaatgttgtgatgcagtttagttccttgttgctagggtggttgaggctgagagcaggcgctgatccttggatgtgacaaaaagatgatttgtttttgtagttgctgtagtgtagggctagatggcttttaagatcccttctcatttgtgctcctaagattctgagaaaaagcaattttccttaagaaagaggaaaactgagattaccaatactattgccctttcatgacgaacttcagaaatgaagagagaagtgcaatacttgtgatacaagaatctggaatgcattcaatatttccttctttttgagtgatttactagtggtgtcttcatgaattcccttcttaggcctggagtgtcagtggttaaggcttgggacctaatacggagaggtccttggattgatcttggtaaaagctagttagctctgagaggtttgatgtgcttcagtgcaagcacatcacagctattttatggtataaactttattgaagattgcaaccttcttcactgagtatgtgcagagtgacaactaggcaatggagggtgggtggatgagttaagatttatctttcctgttaaaaaggcagtgcaagatcttgtcctctgtgtatttgttggatatctgtaacatctcatgtttattctcatcacaatgagactatcatccagaggtgaccatccttttgaatgggccttgggtttattttgcaaaaatattagatacgcatttcttgatgccactaaaataaaaaaaaaagaaaaatttatatactggaggatgaagaggtttcttgtgtctcaaaaattattcacatgtaatgaattgtctaatagaggagaatttgattttccttggttacatccttgttctatttattcttggggggaggacagaatagctgatgagatagcaatgaaagcaaaagacaaagccacctagaggttgccatgccctaaatatactcctgcctctattacttgcttggttcttaatctcattctgggctattctgagaacatgggaaggaaatcagctacgaagtagcctgtattgtgtaatacccctattctattgagacaaaataaaacatatagcaaaagcagccttgaagaacaagaaaaatcacatcagagcagcctgaggatgtgtgtggatcaggaaagaggctgtcatacccacttagttttgataatttgcattacatttctctacagcagccttcttagcatggattggcagggcaaggatgggtttgtatctgggaatacttttctcattttcataagttataatcatgatctcgacaaacagcctgaattccctgctgctggccaaagatcaggcagaactgaacttcacagcaaagttacctggaagaaacagggtcactggaactttccacatcagagaagcaaagtcaaaggtgggggaactttgagatgatgagctgttcctccaaagtcagagtgtattagataatacaacagcaggggtgggtggggtgttttctaggcacagcattctccattgttgattggttctactctttcatcttacaactagcaatgttctatgccagttcgtgccaaccacataaaatcttaccatgtaagtgaaataaatcactagtgtttgtatctaggcgatatattgttaggtaacatgaaccttgaacctttatcccttagtctaagtagagcttcgcctctagacccgcatggagtgttacataacttactgcttaagcctctttgcacattgtttgttgatccaagtcatcaccatggttacctcctcagtttgggcattacctagagctctgtaggaggagctgtgtgggatttacaggtcctagactgtatgttctagcactggtcagcagcctttttagttctgggcatattgcaataagaattactgaggatctggaataaaaacaacatgaagaggcacttgagagaacaaaaggcgagagggagagggagaagagaagagagtgggagagggaggaaaaaaaacagagagagaggcaaggtaatgggggagagaggaagggcaatggaagcaataaaagaaacaaaatatgaccacaataagatgcagctattgagatgcaccaggggtttctcag

SEQ ID NO: 37071 - DNA, 2300 bp, Homo sapien
agcttgagcagccaatggcacaagaaaatggcacaaggaggccactgtaactgacagacacgcctgctctgccactgggactgatcttgtgtggggagttctgatcagcaccaggcactctttagaagcaccgtgtccggcttctgtcctcttctactgtcacgtggcagaaaattcctctctcatgctatcctgggtaaagtcctttcttcaaaaagatctcccttccatagtcctcccattagaatcttttgcactctgtacaaaaagacaaacattctgatgagtccatcaacattaggcagagttgttggagacccaggaagatgggctacagaagtctttatgcacacaccgggtggtactcactgtctctcagcaccaagctcacttcttggtacttcactctgtggtgccagggctgggacctgcgtatttctctcattctgtttccagctgacctgaccgtgggcagcaccagaaaaagcctgagactaccttctgtctccagtccctgtcagcgactctccagcgacaggcaacggcgccagctccagactccagctgctctgggcctcccagaatcagccacaccatgcttgtcagaagtctcagcaagaattttggagaatatctagagaccaataaagatggaagcagagagggcctaaggaggtgcacggccagcaagtgccctcatgtgatcaatgaattttagaatattggtacctaaccttcaactgaattataactataaatcataattataaaagtaatataggcttgccataaaatatccaagcagtttaaaacggcttcctgtcaaccatgtaaatagccaaagaaactatgctgtatatattattcactagttttattttttcacttaacaatgcatccttctaatgtctaagtagtattccctgttaagaatataacaattatactctaatattctccaattgatggactttaggttgttttgatttttaaattatgataaaaaaggatgtcctgtgacttatgtacttgttcatgagcacgtaattctgtaggagagattcctagaagagaaattgaccagaccctgacaaattgccccaagcagtgttctgtgaaccctcccgcctatggactagggatgattctccacatcctcacagagtagatgttctcaatctttaaaaatgctctccagtatgattggcaaatcaggccacctctgtatttcacattccttgcttaacaacaaggctgaacattgttaatatattcattagccaattgtgttccttttcctatggattgcttttttgtatctttgcttatcttttctgttggggtgctcatttctcttaccaatttgtagaaattctcagctacatcagggatctgaagcccttgctatatgtgtcacacatgtttttggcttgtctttatctccatggcacatctaggaagatgtgagcagccactgtggccccggttttgggatggagagacagctcttccaagagagggcagccaaggtaaagaaacacagatgagccacggaaagagggcatctgtcttcagttacctctgcagggtaagcagtgatgcattgaggaaaaagtatatgatttggagattaaagggctacagttcatcccctgctaactatgtgaccttggaaaaatggtctaacctctccaaggctcagtttcttctataaaagagaggaagtaatggttacttcatataggattgttgtgtggaataaacgagtaaattcatgtaaaggacttgctttggggcctggcatccaatcagtgtttgagcaatgaacagtttacggtgtgaacccaataaaatcacatgcacagatgccttctgatgatttaaagggctatgaacacataagtaagtagctgttacttttacacacaattatccatgtcaggtaatgtactagaagtctgtgaaacattcagccactctcttagttctgagtttggagactggaatgctctctgagagcgtcaggtgccctcccacattcactgattggtaaaggggaagatgggggctgggaagggggaggctcactcaggagtccagacagtggtggggacaacctgagtgctcagtcgtaaagaggaaaggcagaatttttccttgctatggctggaacaaacgcacttttgatgctggaaaacttcatagatggaaaatttttaccttgtagctcatatatagattcttacgacccatcaacaggggaagtgtattgcagagtgccaaatagtggaaaagacgag

SEQ ID NO: 37072 - DNA, 2300 bp, Homo sapien
gatagattttgaatttgtatatattcagatttattagctttttttcttaagggttttggaaagttatgctccactacaagataatttttgaaaaaatattattttttctcatatctgtgtcagattcattattttacatttgtatctttgatttagctgctattaagggctaacataggaatcccatttctccaccatcttttctctatggaaagatggatttattgtagtacctttttaaattactatagctttttagtacctattttttggtaggctgtcttatttttttcactcctttttatagtttttctgagttatctcacatgcctctttttcccatatgagctttagaaacagcttgtcttgttactaaaaaaagaagaagatccagctataatttttgttgttgtatttactgctagcaagagatttttgaaggaaaaaaatactgtctccagagatgccaaaggctttagataacattagacattattattatcttagtagattttctagtattgttctagtcttatgatgaagaaccgtctccagttggtcatggtggattattcttttaatgtgatggattttatttgctaacatttaagatggtttcatctattcataaaattacttgcattcgtgtgtatgtgtatgctctttggattttggtttttcttgtgatggttttacaaaaaatttagaatgatttcatcttcaaataattcagtagcattgaaatgatttgttttatgataggatttatctttttgaagattctggggtcaaatttgaaagttttaattttcttagaaaaacgtccatttcatccaaggtgacaaatgtatttgttgtgcattgtaccaaacattgtcttattcttttagatttttctgtgtctgtagttacttctctattctcattttcagtatggttttctctcctctagtctcccctttctctctgcccagcattttttttttttttattaccttgcaatttgtttttttcttccctaaattttggttccaagatctgtaattagttctcctggtttaattcattactttgtaagtttgggtatgacttaatgtattttccttatgttttttgcttttcatttcctacccttctgagtagaatatttaacatacatgcatttttaattcatcttaaaagtttttatggccaggcgcggtggctcatgcctgtattcccagcgcttaggaggctgaggcaggtggattgcttgagctcaggagttcaagaccagcctgggcaacatagtgaaaccccatctctaccaaaaatacaaaaaaattagtcgagtgtggtggcacgcatctttgatcccagctacttgggaggctgaggtgggaagattgcttgagtgtggggacaggttgcagtgagccaagattgtgctaatgcactccagcccgggcgacagagtgagactgtctcaaaaaaaaaaatgagtttttatttatggaatttctaacagaaaaatgcagaaaataatataataaacactcatggaactagcacttggttttaataagctaacattttgccatgtaaatttcagatctctatttaaataaactgttagattggaatctagcctcatcctttgcttgttccttcctaatattttaaagttgatattcatcattcccactttcttcttatttaattatatcttactttcctatgaatactacatttgcagtggctgatgggttcttttagaattactgttattttctggataatccacaattttaattttcatttcgtttttaagccaagagtccaagagagttttagaattttggttgctggggagttttgttatttttgttatgattactggttttattatactgtttatcagagtgtgtgatctgtactctgtttattgagtttgtggcccagtgtagttctctgtagtttcataggcatttgtcaacaatactgttctgtttgcagaatacaaaatacaatacttttctgttagctattttttcttttctttttttttttttttttttttttttttttgagatagagtctctgtcacccaggctggagtgcagtggcgcaatctcggctcactgcaacctccgcctcctgggttcaagctgttctccggcctcagtctcccgaatatctgggattacaggtgcctgcaatcacatctggctaatttttttatttttagtagagatgggatcttgccactttacctatgctggtctcgaactcctgggctcaagtggtctacccgtctcggc

SEQ ID NO: 37073 - DNA, 2300 bp, Homo sapien
accttacagagtcctgaggggagtggaacaatcctaactttttctgaagaagtcagtgaaggctttgccattgaggctctactgtttgagatgcagtagatgctgtgcaatatttagagttttaaaggagtgcgttattgacgacctaagggcaaattatatattatctgacagaagtaacgttttcttattcattgttcctgtagtactttgcttatgtggtctataactcattcacttcatacctcagtgagttgtagttaagcttgtaattgacaattacagtggagtggaagctgccatttgtattttaataacacaatttttttgggggggtgcagagtctcactctgtctccaggctggagtgcagtggcacaatcttagctcactgcaacctctgcctcccgggttcaagcgattctcctgcctcagcctcccgagtagctaggactataggcacgcgccaccatgcctagctaatttttgtatttttagtagacagggagtttcaccatgttggccagaatggtcttgatctcttgacctcatgatccgcctgcttcagcctcccaaagtgttgggatcacaggagtcagccaccgcgcccggccaataacacaatatttttaagcacctactatgatctgtgataaatcctcttatacggatacattattcacagctcgcgagttagtgtctctatctcctttttacaaagaaacaggctgcaaaataaaaattacctaagggtgtaaaataataaaaacacttaagccatgtaacattagcaactatctctatttttctgtaaacttttattttggagccacattaaacaactatttttgtagtcaaacacattcaaatgcatgaataaattacgttccaagccacttacaaatataaactaaatttggattactcttatttctttctattgtgcatagcaaaaagctgaggaagcttttaattatctctagaactcaacatttgcctttgatgtgaagtatcatcatttcaaaaacacaagctaaaactgaagtggtgttcagtataatgaggttggtttcttatatagcattattaactttatgttctgagaaatgaggacatttaatagcaggttatagattcatgcatcaacaacattcagcattaccacctaaggccagtgctatgtctaaaaagctatatttaatactcgcaatgttacacacaattatgtcttcaatgaatgttcagtgaatccttctttatgatgctgataaatatcgtctatatagctaaaatcgtttacatagctaagggcaaatcgctgtttactagggatagtaatgccgaacggagtgaatacatgaagtcgtaaattatatgaatgcagggtgacctaatatagccagggtctcaatttaataatatatacccgtttaaaaatagccttatttccttctctaaagcttggactctttttttttttgagataaggtctcactcactttgtcgcccgggctggaatggagaggcccgatctcagctcactgcagcctcgaccgcctgggctcaggggatcctcccacctcagcctcttcagtagctgggactacaggtctgcaccacagggccggctagtgtttgtattttttgtagagacggagcctcgctatgttgctcaggctggtctcgaacacctgagttcaagcgatccgccctcctaggcttcccaaagtgctgggattacaggaaggagccaccgcaccggcctgggctaaatctgattccaagtttacacaagtttgttgaatgcccactgtgtgcttaatgaaagatcaaagtttgataaaacaaggtccctgctcttactgagcgcatagctttctcagattatcaggaaccaaatttggaaaataatccagaacgctggcgtaggtagctcaaggttccccgcttgcaacatttagtccaaaccagtcaattctaggcggcggatttccccatccccctccgtcgcccaacctttgggtggggccactcccaaacgctccctcccctcgtcccgccatgcacagcagtgcgcatgcgccctcagggaggcggacagtgaccctgaggcattgccgtcgcgcggtgcacagctaagacgtcgcgcttgcgcaggcgctcggcgcagaggcctgcgggaagccaagatggcgcataggggttctccaggctgcagttggcgccttatcagtatctaagcggagtgttttggaaggagttaaggggctgtggcaaacgccctctccgccgtcatggccc

SEQ ID NO: 37074 - DNA, 2300 bp, Homo sapien
tttccataagcttatcagatagcaatatatccaacattagcctaataaaattactgcatgtgaattctttattggactatgcatattcccaaacatattattgtcatacaactgagggaaaaatgtaaaactatatctgggaaatgaaaaattataaattctcaaaatgatacataggaaaatgatttacaaagaaaaaaaggaaaactgaacttagtatctttctactttaaaggggttcaagaacttaggagtagttacacacctcctaaaatcttgaaaaagaggctatgaactcacttcacaaagggttcagatactcacattgtgtccaagagactcagcaattgggaatcttgccagttagattcataaagcaatccgaaagccagaatgcaatttctttaggggtggtttctagatgtttattctagatatttttaaaagattttgtttatttttgatgtgaagaaagaaaattattatagaatctagaaataaatattggctttaaaagtattaatttgccttgtcctttgtaattgtgatccgaaatatctcacaataattttgtttcagtgttattttcttctcaggaggaaaggaatgttaaaaccttactagcaactaacacttgataaagatttaaactatataacaattttaaagaaagtctaaaacaccagatagtcttgaaacctcgcatgcttcaccgtttaataaaattatgactcattttagtaagaacatgcttttttagtaagaaaaaatgctttctgagctaagtttgaactgctggggcacatgggacacccacaaacccagtcagcagaagtctcaaactcctaaaagattaaaggaaaaatacattagtgtgtacagagaatgaaaaaaaaatccccaatggttctaatctataaacggaagtaaaactaaaactcccctaaaatccccccagtcatcaatccttataaattcagcacttatcttcttcctttacttctggagaccctcattaaacaacacgaaagcctttgctgacttttatctcgtaaaatagagccctcaaatgacactaagcagggataccgacctccaaaatcacaaactgttttacttctaaaaccatgcatgcaaacgtggggtttcctgagttctgctaggggcgggctgtctggacccccgtgtattttttttttttttttttttttttttttttttttgcaggtgtgcaatccagggtgcgcgctctgtgcagggaggggagcaaaggtgtgcggtgggcaccgcctgggccgggcggggcggggtgggtggggcccgggtgtgtgctggggtgagagtgaaggacatgtgacaatacgacggtggcggctgcaggatccgggaggggagtgaaagctccgctggggcgctccattagtgagcggtgatggttgccgcccacttgtattgaagcgtcctttgtcactaacaagttaaattagagatgttatttatttaagaagaaggaaaaaaaaccctagccaaacagcctatgaatacatatgctcacatcccctactcctccaactcctaatttccccgtctccagagggcacagttgtaaaccttgacgaaaatccaatcttctgtgcgggaatttccccccaccgcttgccgcccccgcgacagtgagtgggagctggaggagctctggtcccgctgcccgggagcacgcggagccgggcgaccgcggtgcggcagccagggaggaggggaggcggcgggactgggcgcgggtcggcgccgccgcgacccgggagcggggtttgctcaggaaaaggcgccgtcgcggcccccggccacccctccctggccccgggctccctgcccgcgcgcctcccgggcctcgcggcgcgctaggcgcaccgcggcggcgcgagcgccgaatgggagcggcgacccggccagcccggcagccccgcgggcggcagccagggcgaccgcggaggcggcgggcagggcgcgtgcgcactgcaggggcgccagatttggcgggagggggagtgtccaaagctctttgtttgatggcatctctgtttacagagtttacactttaatatcaacctgtttcctcctcctccttctcctcctcctccgtgacctcctcctcctctttctcctgagaaacttcgccccagcggtgcggagcgccgctgcgcagccggggagggacgcaggcaggcggcgggcagcgggaggcggcagcccggtgcggtccccgcggctctcggcggagccccgcgcccgccgcgcca

SEQ ID NO: 37075 - DNA, 2300 bp, Homo sapien
atctttccctttgggatcccattttccactctcgtctctgtctgattcagaaaacaattggggtggctttcaaagagtaggaggttttttggtctcagaagttctcactagtgctttgagagataaagagtgaagtattcttcatcagcagcatcttatcatccaccagacttcaccatgtccctctcgtggtgtgtaggccctgctgtgccacattcaaaggagtaatttccccaaggcagctggaactttacattgtgttggagtcttgtaccgcgaccggtcagaataaacatgaagcgttatcgtattgaaaatactcctttaccaaggaaatggaatggttaaaagatactgatatttctagaaaacgacatgcattccagattgtgtaactaagagaaatctaactaggcaatagagaaagcctgatctcagagggtggagaagaaggaaacaattaaaaagagaaaacaactaataggcccaagggaaaggtctctgttagaaacagttttctgtcaattcactttaatctgaattgaaatttttgtttgtgaaatttgtgtgatatatttctgtgcagaactgataatgctatcaagaaccactggaattctacaatgcgtcggaaggtcgaacaggaaggttatctgcaggagtcttcaaaagccagccagccagcagtggccacaagcttccagaagaacagtcatttgatgggttttgctcaggctccgcctacagctcaactccctgccactggccagcccactgttaacaacgactattcctattaccacatttctgaagcacaaaatgtaagccattcctgtgaatctagtttaatgagagagacggttagtttagctccaggtaataatcatactttgcagttgtatacttttcagagaactttcctgagcatgatcatggccagtcttcacctatgccctttgaagtagatagggtgtaggtatggtgtgttacccctggtttatgtctccagaaacgaggatggtaagcgctttgcccagggtgacacagctcatagagatagtgctgactagaaaacgagctgtccgattctaaattgctgcttcaaatctaatttgaaggcaacctttgaatgtaaatttacttaaggtactattgaagaataggggaatggagtcgcatttgtagatgtaatgtttttctcttccaaaacgaaaagggaaggtagtattatgtttaaagaggagagagtttgacactgaaattcagtggttatggtatgtttcattctggcagtgatcaggcagacatgtcttaatttattcactcagtaagtgtttaccttcttactctgagtcaggagcagaactttgtgacattcattttctgatgtctccttttagtctccgttggatcagtgtgatcccttccttatttctagatatttatatttagggaaagtgataatccataataggtggaaaaagaagaagaaagaggaaaaaaatcgagaaactttaatcttaagaataacaatattaaatgataaaacttacccaagaatagagagctcatatgcaaattatatgcaaaacatgttcataaatagtttttattcttctctgtccatggatttgactacaaactttacagaaaggtctcagatgaataaattatcataagaattcctgtgctttttattaaaactcaaaattattccaagaaaaatatttttatttacaaacagctggtgccatcaatttttcccatagaaacaattttgaaacattcattaatgtattttataatatattttttattgtttttttcattgtgtttttctctaattaaggaacacttcccaaaatttaaagtgctcatcaacacctcccaaggatttttcaccatgttcctttagctgtttagccattttaaaggcctggctaaatttcacattaaaaggttttaaaaatttgtttagtgtattttatcagtaaagtgttttttttctctcagtcccagaacgaaacctcaggaagccaagtcccctgaagcatatgtagccctgaatgacgtggcctttgttttgtcttttgcatctaggtctccagtcatgttccataccctgtagcgttacatgtaaatatagtcaatgtccctcagccagctgccgcagccattcaggtaagatcattgatcattcactgttcaaagcaccacttttaagaaatgcttatttctttcatctaaacacatatttttacctgagcaactaaagtaaaaaggaaagggaacatggagag

SEQ ID NO: 37076 - DNA, 2300 bp, Homo sapien
tcagttcactgctggatacttgagggggaccttttgcagatcttcatcgtctgtggctcagtatcttgaaaattgttgtttcatgtgttttgttcaggtttgttgttgttgttttagacaagaggtaaatgtggttcctcctactctatctgggctacaagcaaaggtctagatgttctatgtattttcaaggtagccttttgatagattgtatatagattgtgagagataaaagaagaaagaggatcactacagtctgatcttcctagagtgggctttagtggtcagagaaagccaaagatgaagacagaatttaagaccatatagacacgacggggtaaacaagaagaatagggcctagaagtcaggagctaaggcacaaaagtagggcagtgcctgggataccctcagaccagcaagtatccatggggtctttgtgtgtgtgtgtttgtgtatgtgtgtgtgtgtgtgtgtgtgtgtaattagctgcccagatatttacatatttcacctaaaagaaatacagatttctgacttcttgaaaataatccagagttctggaccacagctctacattctttgatgacatccatcaatgagctgagatagactgcctcctttagatgagtcatccattctccagtttgccacagtccattgtatcgttgtctctgctgtattatctttggcttgcttcccttattcaccttatcagtctagaatatagattccttggaaataaggccaaaagggtacacttcagaaagattaagattgtgtgctatcagtgctttttttcagagcttaacctttcctttgttcttttatcattctatctaaatttactgtcctttcttctttgtaatttctgaccttttcattctcagtcatctgacttcatttcacttacttacacatttcttcattagtctattcagggtgccacagagaataccacagacttcattgcttaaactacagaaacttattttcacacagttctgggggctagaagtcccaagatcaaggtgccagcaggattggtttcccgtgaggcctctcttcctggcttggaggtggctgccttcttgttgtgtcctcacatggcctcttctctgtgcaaaaagagcacgctctggtttcatctttccatcttctaaggactctagtcttattagattagaaccccactcttctgaccccatttaaccttagttatctccctagaagcccctgtctccaaatgcagttacattaggagttcaggtgtcaacatgtgaattttggggaaatatcatttggttcacaagaatctctattcagtcctatttaatacctgattttgaaattcttgtatctttttcaagctcctctgtggtgtttctcaccattcctagacaacttagaagatactctgttccattcttcagttttcctttttttttcattgtttttgtgttttctttctcctaatataaagtgcattactacacactcatccacaaaacatttgttttatattttgctattgccattgaatcatttggaaagctacattgttcattccacagatcaggatgttacagctttcttatatataaatttccttcatttcttttcttgtcatgaatgaatgtcctatacttttgtgtgtgtgtgtgtgtgtgtgtgtgtgtttgtgtgtgtttccacctaagttgatagaactttctgatttttcccaggcatctaatatttttctgagacagatgaaatttattttattctgtaagtccacagataattgtttaagattttgaaatttattttattcttgtccctttatcatggctaagaaggagcccaaccagccaaaggtttgtctgttaacgttattttaagcaattccttgtctctcatccccgtgtatactcattagttctgccggatgtttttctctgtcatatcctcacatttatccccatttttgtttccactgccacggccctagatcaaagcctcatctgagcttttagctcagctctcttttactggctccttgtttctgatctttccctcctatagttctgaaatgagaaaagaacagagccatgaggaccaaggacacataatggatacacggatgaggaagaacaagcaagcaggcagaaaagtcactctaatagaggtaaggggaaaaccaatagaaagttgcgctatgttgtcaacaggaaaagatttaggaaagcatggtcagcaaggacaaataccagagagaggcaagtaaaataaggactgacaagtcccatttgggatctgta

SEQ ID NO: 37077 - DNA, 2300 bp, Homo sapien
ccacccttttagtgatgtgcattcctcaatactaattactgtttttaaacagaagtgtagccatttctctgtagattgttgtggatttgactattatttttcattacacattttgaacttttctccaaaacaatcagaacacttattaccctcaactattcaaagactgcttacagaacaagagaaactttaaagctgtaaaagaaaataagtgctccatgaactggaatttggaatgtttaacattagtaggtgggtttcaggaataaataaataaacaaatgcatatcatgtttcatgatctttgtcttatttgctttttaaaattgtcccttcaacatttaattgtgttttgctgctatgaatggaaaataaaactgggttaattatttaatgacattttttaactccctatattttctctgagattgtgtacctaccaaccatgatttcattttaatatgagtgagcgaacatgcatagaaatggcccagaagcacatacacctacgtaagtaacagttacataggttagtaagatttcagtatttttcattttactctttttgtcaaactattttctaagtattataatatgctaaacatgtattatttttctttcttaaaaatgacatttttaactggaaaaaaaagtaacaaaaagcagagcctaattatttatctctttatttttccaggtattaatatgcctttcggaaggattaaaatggcccaaatggaagcggataacacaaataaatacaaacaattatgaacacttgtttttttcatctaaaggaaattttctatacagaagccaactgattggtattcaaggggtcaaattaaacaccctattttatctttaacacctttagttctgtgaaggcagccacaaaaaaatctgcagaaatattcataaagacttagtttctcagatactagaaacagaagccgttcagaagttcttctgctcttccccctcctccagcctccacaaatacatacatcaacttgtatcagactatatagatttcattgtaaaatattaataggatttaatacatgacttctgatattccttcaagctctatgcttttaacatttcaggggtttctaaaacactttgacataggccacagttggagtataattttgcaattaaataactctttcttcattttgtcattactttttgtgttaatttaactttgcatatttaaaatttagctctactctaacctggtatgtttaaaactcataattttaacagtctcactcccatcttttcctcactttttgaagagctgtcatgtaccatgcactaagcagattctgggaatacagacactggccccacttgaggtttcgaccttctgaaggagaataaattactgcaaggtgctaagtggtatagcagaggaatgcacagatgatgagagcacagagatggcaactacatttgcttaaagaaatgttatatccatcaaaatccttctaaatttacttctaataggctatcatttgggattcaaaattttacaaaattaaaaaattcttaaaatgtttttatgatggaaaatcctttgatttatataataagcttggtgcttttgtgtatgttcttgagttaaacaattatgaaaaaataatgtggttttctcaagagatttttatctttacaggaggaaggacggaggaaataagatattttaatccactgccctttgcatttgaagcaaatgcaaactttgctattattacaatctatgtacttacattattgactttataatgaagtgaacctggaatcacaacatattctttctcttacattatattaacaataaggttcccctttggttcaccgtttaattcctttgttcaagacatttcattatatatagccctgttactttatatggtcatcttactggatacctaatttctttagctataaactattatatttccagttataatatcatccctataagttggtagttctacttagtttcccagcatttagcagttatatagcattctccttctctaacatctgcagtaaatgttcagtacttataattttttttttttttttgtattttatctggcctgacttgttcctccttcagctaatcttgagatactgaggtgatggatccaagaagttctatagacttaacacttcaattctggtagcctgtgtttcagggcctgttagcaattttgtatttccttgacacaccttgtaagtcaattagaactttgaagtattactaataaaactgttcaaaatct

SEQ ID NO: 37078 - DNA, 2300 bp, Homo sapien
tgatatcacaagagagcagaggcacttacgaaaatctagattttattcagctagacatttaaagttagcaagttacttttattttatttttatgaaaactccaaatagcctccaaaaaaatgttccaagaatgtaaagcatctcgaaactaaaaacatttgagaattgcagatatgaagactgaactacaatggtggaagaagggctcattcaacagtggagcttgagatagactaggatgctcaaggtaggggtgagtgaaggagggacaagggcgggtatttcatatgaaggcaaagttgcaaataagtgggaaaggacctgttgtattcattaggcactcaaaagcttagctggttggaaaccagagtttgtaaaagaggagataaagtagtgtactggatgaggcccacattgtggagtgtctcaaatggtagcctaatacttgattgtgagggatgtgaggaataatggaaggttttcgggtgagtgagaaaaataacaattgtatttgaggatgaattaatgcaggcagtggcatggggagatcttgaagtagtaacatcagaattagatggcagtcattgatgtgtgaggtgatgagggtctaatgaatacgagagacagaaagtaggaaccagcatgatttagtgactgacaaggtagtaaaggaggagaaacagtcaaggcttttgaggacctttattgttgttatcagactttcattgagtgtctgttgtggatagggcacagagtcaaaccctgagaatacaaagaacatgatagtgggttcaatgttttcattttcagcctaggtgattgggcacagagttttccttaattacacttcctactctaggagcagcagcaagtggttataaagcctcctgacatttctttcagtttttgttaccttgttaccctcctctcccttttcttaattatgtggttggaggatgcagagaaaagatgggtagcatggagtctggagaatgcagagaaaggatggggagcatggagtctggtacatgattgacacttaacaaattcttttgaatttttcacattcctagtagctggtcataatgctgtctccagaggaactgctagatcttggtactatttgtgaaaaacctggtacctgtctagaaagcatgcccttgaagtaacagtctttgagtaggtccattaagctaggcttgaccctttgaataatccctcttagccatatagagctaataatggttactcttagctagtaatagctactcatagggtggctgtgatgaatatattcaaagacctttgtaataaagtacaactttcatgacatatagtaagagcccagtatatgtttacttcaactttttgaattataagaaacagaagaactaaggctcactgaaggttgcaagagatagaattaggataaataaacgtaactggtattttctacagtagacattaatacccagaaaatttgggcttcatctggtagaagagggtgaaaacattaaaattttgaagaaattgtaataatgaatgagagaccaataagggccgattgattactttgaaaatacattttggaaggcagccacaaaaggtgattattttaagataggcaaagagagaataagcattcatacattctggcttaagctaggccccataggtacttgtggtcttaaaaaaagcttgtgactttaacaaaagtgacttactagtgctgtcatagaataaggctgtgacatacattcttttagtagctatatagaagcagtgtggcagtgatggctttagagtatcagatattgaaatttttctattcatatttaggtgaattaagtactacttaaacatgaagaacaaacccactttaaaaatttcatggacactgattctctttttacaaagcaatttactatggtttttcaccattctgcgtacttgtttttctctttctctgcatcataaaaggacttaaaagaactacagtaattgaaattaaaaactagccttcgcgttttaatgtttgctaatttatattttttaaacgtatgttttttaggcttgccgtatcccaaacaaacacctcttctcactaaatgcaggagaacgaggatgtttttgtcttgatttctcccacaatggaagaatattagcagcagcttgtgccagccgggatggatatccaattatttgtgagtaataatcctacctgtttaatctgattgtagtccacgtggaggacattctttagtttttttaaattcatggaaatcttaacttgagtaatc

SEQ ID NO: 37079 - DNA, 2300 bp, Homo sapien
aaaacctctgactatactaaaaacacaaaaatcaaccaggtgtggtggcatgcacctgtaatcctagctactcgggaggctgaggcacaagaatcacttgaacccagaggaggtggaaattgcagtgagccaagattttgccactgcactccggcctggataacagagcgagattctgcccaaaaaaagagacaaaaacctccatttagttagcttaaatataagttttgtttaatagggttttaaaaatagacctttgaaagaagatatactaaaatactgaaaaaaatgtaacgaatggcttgaatgagtttaattatcttgaaatgattttaactttttaaaaatttaaaacataaaattttaaccattaaaaatactgatattaaacaaatggaagatttgtgtcttgtgtaaatatacagtttagtctttatcataattatttcaaacatgtgtattgatcacttcctttgttcagcgtgaaatctggcacagtaatgtaaatgctgtaccgacagtctgaaattgttgtacacgtgaaaagagagctatcaggaaaatattttaaaagccatttgggctaccttttgtcaaaaatgatctggaagtgtgcttaactaactatttaatgttctttgctttttaaaactaagaaatttcagcatgccatattaatcttttaaaaatgtttctgactttatgctattgctttattggatatatttattttcaatgaaggtaacattttatatgaattcttattttaagcttctgggagccaatggaaatgcaaacatcaactcaaaacttcgcttgcagctatattacccacctactaagcctcgatccccattaagtgttgttgaggcatttgaatggtggtcaaaatgtccaagaaatcattacccatcaacactgtacgtaactgtaagaggactgaaagttccagactgtgtaagttaatagtacatattaagtgtatatcatctagtgttgaaattaaatggtgacatagcatgtttttcatttctaaaaagataaggcctctaataataattttaatagatttctggggttatatattaagcctgtaatagctgatatttaaaagatgcttaaatgaattttaaatgtgaaatgtggcttttagtattaggaaaaatgttttgttataatttgattttcaaaaattaaagataaaaggttgatttaaagcaggagttgaaaaatagtttctgtaaagggccagatagtaaatattttaggctttggccctgtagtttcagtcaattttgcctttatagtgtgaaaatagctacatagacatatgtaggccataactgaacaaatgggtgtgatgtgttccaataaaagtttatttacaaaaacaggtagtaggccagatttggtgtgtgggctgcagtttgcagactcctgatttctgggcacatttttcacaatattattcaaataatcagtatgtaatgtttctactgctgctgttttccatagattaatattataaataatcttagcaaagaattggccctaaaataaaaaagttttgcttttgtctagtttcttgtaagacattaatttttcaggtcatttgcacgttctgtagctgatatgtactgtcaccacagggctgatttgcattggtttggatggagttaaatctattatttgagaaatgaggatttttaaaacttgagatttttatgatactagttttgtgatattaaagccagagatatgatagtatatcagagccatggcataactcataagtattggtgaagaagcagaaacaaaggatagagttattaaaatcatttcatgtgacctttgtggtcatattttttcctccaaaatttttatggctttttggttacaggactgtagttttaagcagcttttttattttatttagaataatgtacaaataaaagtagaatttttttctggattacattttgaaaatattttcatattatttgtttcagtattttaaaaactatatgctagaaaaagaaaaaggtgaacatggtatataaattttcatattttaatgcatatttagataaagccatcttaccgctctatgatggctcttcaggaggaaaaaggtaaaccagtgcattgtgaacgtcaccatgagtcaagctcagtagacacagaacctggattagaagagtcaaaggaagtaataaagtggaaacgactccctgggcaggtgaagtgtttgataatagtggatttatttagatgtttacttattaccttaaaaactccaa

SEQ ID NO: 37080 - DNA, 2300 bp, Homo sapien
gtgtcatttgacactaatcacaatgtcacccgctcagcttataacctccattgtctttacattctttcctaaaggggtaggggaaaagatgggctatattttgccatctctttttccttgttgatgcatcattccttaacttatcattcctgaacaacgttctgaattttgcctctgccactaaagcttctccaaccaaatcactagtgatttctgtttgctaaatatattgaacattttttagttattttgtcacatctatgcatttaacatatcacactcttgaaactctgttaccttggttttcttgacaccatcctctcctaatttttcttataccattctttgagtttccttcatggtcttctacctacctccttaatatcagtcttactcatggtttcatctttaacccacttttcttggaaccacttttctcacctgtgcttcagatttgtaaattcagtcacctgctggacatttcagcttggatgacttatagatatgtcagattcctccaaactgagtatccgtgctactctctctgccacttcaattggtggtaccaccatctgtccactctcccagatttacgaacttagagttacactgttttggtagctacaagtcacatggctgtttgaattcaaattaaatataattaaaaatttactttcacatttgtgctagccatacttcaagtgcagggtagccacatgtggattccgtattggttagcacaaattggttagagtattcccatcattatagaaagctctcttggacaatactatcttagagcctttcttgcctctttgtttttttttactttccaagttacataagtctacaagtaacagttgttaaatgtgttccctgcactcagtgcctattcttctaatttaagatattaagttacatgagtctacaagtaacagttgttaaataccttccgggcactcagtgcttattcttctaatttaagatacttcatgttttgtgtgaactgttgcaaagggttcaaactatctttctgctcctaatttgcagaagacataaaggttagaaagacgtttcatttcctattttgagtcatggtctaatgaaagagaacgtattctgagttggtaagatttttatgtttctcataaaaatctccatttagggccaggcgtggtggctcacaactgtaatcccaacactttgggaggccgaggtgggcagatcacctgaggccaggagttcaagaccagcctgaccaacatggcaaaacctctgactatactaaaaacacaaaaatcaaccaggtgtggtggcatgcacctgtaatcctagctactcgggaggctgaggcacaagaatcacttgaacccagaggaggtggaaattgcagtgagccaagattttgccactgcactccggcctggataacagagcgagattctgcccaaaaaaagagacaaaaacctccatttagttagcttaaatataagttttgtttaatagggttttaaaaatagacctttgaaagaagatatactaaaatactgaaaaaaatgtaacgaatggcttgaatgagtttaattatcttgaaatgattttaactttttaaaaatttaaaacataaaattttaaccattaaaaatactgatattaaacaaatggaagatttgtgtcttgtgtaaatatacagtttagtctttatcataattatttcaaacatgtgtattgatcacttcctttgttcagcgtgaaatctggcacagtaatgtaaatgctgtaccgacagtctgaaattgttgtacacgtgaaaagagagctatcaggaaaatattttaaaagccatttgggctaccttttgtcaaaaatgatctggaagtgtgcttaactaactatttaatgttctttgctttttaaaactaagaaatttcagcatgccatattaatcttttaaaaatgtttctgactttatgctattgctttattggatatatttattttcaatgaaggtaacattttatatgaattcttattttaagcttctgggagccaatggaaatgcaaacatcaactcaaaacttcgcttgcagctatattacccacctactaagcctcgatccccattaagtgttgttgaggcatttgaatggtggtcaaaatgtccaagaaatcattacccatcaacactgtacgtaactgtaagaggactgaaagttccagactgtgtaagttaatagtacatattaagtgtatatcatctagtgttgaaattaaatggtgacatagcatgtttttcattt

SEQ ID NO: 37081 - DNA, 2300 bp, Homo sapien
tactttcacactatggtttgctgttgtctggctttttctttctttccccctgaagttcctttgaacacagtgagatcatcacagatcttaaagattaggttatatgtaaatactactatgggaacaactaattataacattgatttttttttccatgcgtgtagttgcagataataatgaagatgttgatggtgatggtgttcatgaaataacaagccgagatagcccggtttatcccaaatgtttgcttgatgatgaccttgtcttgggagtttacattcaccgaactgatagacttaagtcagattttatgatttctcacccaatggtaaaaattcatgtggttgatgagcatactggtcaatatgtcaagaaagatgataggtaattttttttaattgcacaactaattcttgaaactgaaactagtagaagtcttttttctgccattggtagttgaaagtcagtgggaatagagttatggatttgtattagagaatagtctactagttgtaggtgttcatcagtcattaacattgatcagaatgttgtagaagaaatggagaacatctaattcagtaattactttttttccgagatggagtctcgctttgtcgcccaggctggaatgcagtgctcaatcttggctcactgcaacctctgcctcctgggttcaagcgattctactgcctcagcctcccaagtagctgggattacaggcactcgccaccactcctggctaatttttgtatttttagtggaggcggggtttggccaggatgatctcgaactcctgacctcaggcgatctacctgcctcaccctcccaaagtgctgggattacaggcatgacccaccgtgcctggctcagtaattacttttaagtggaagggaataattcattttaagtggtagagagcttctgccagcttagtagatgtaatttatgacataaagttgcattgtaaatattttatattgcattgtaaatgctttaattgtctaacctcatatttttcttttgaaagtaatgttatctgggcttcaggtaaggtaaatgaatcttgaatgttttttctaagagtacttctatagctaatgcatgcttgaaatcccaaatgaaaagtacaatgaaatacacatttatactagaattttttaaaaaattgtttggaaagccagtggggaatggaaacaggaagattgtccaaaaaaagcccattcacctattcatttgccttagggcacacaaagaaaatatgacaactcaaagggtttacagtcttgtgccttttttatgtaaaatcaattttatgtcttttttttttttttttgagacaatatctcactgcgtctcactggctggagtgcagtggtgcaatcacagcttactacagcctcaacctccctgggctcaggtgatcctcccacctcagactcccacgtagctgggactgcagacatgtgccaccatgcccagctaactttttttctattttttgtagaaacgaggtttcatcatgttacccaggctggtcccaaactcctgagctcaagcagtccacctgcctcagcctcccaaagtgctggggttacaggcttgagccgctgtgcctggcaatgtctattttattataaactcttacaaaattctgaaggagttagtttatcccagctttatatggcaaaggtataatcatacttctcactttatatttctataataaaataatcatgtgaaaccaattgatagtagacaaatataagatggactgttacttttaagtcttataaaatttgtaagtttctagatggacactcagaataatttttccttttgtattattatgactattcattatttctggttgcctcaccttgtacactatatatttttttctcacctcaaaattatgaaaattgtgttaatggaagtatctttttttgtacagtggacggcctgtttcatcttactatgaaaaagagaatgtggattatattcttcctattatgacccagccatatgattttaaacagttaaaatcaagacttccagagtgggaagaacaaattgtatttaatgaaaattttccctatttgcttcgaggctctgatgagagtcctaaagtcatcctgttctttgaggtatgaattgaatggaccaattcaaattaaacgatagttaatatttaatagcacaaatgtaagctattatttttagtagtccagtaaggcaaaaaaaaaagttgtgtgagaatttaatctctaggatttagttttccaatgctgtggaatcaagtg

SEQ ID NO: 37082 - DNA, 2300 bp, Homo sapien
cagatacccaactcaacatgacccatactaagctcagtgactgcaccctaacaacctgttacagttatagctaacatttattgttgcttcttctgtctacggtactgttctaaatcatttaacccttacaacaaccctttgagtcggcactggtagggtgtttttatagatgaggaaacaaaagtcacgcaagtgactatggaaactaattctaggacatggattttaaactactgccctgtactgcattatattacagtgtaatgatactactaatctacttattctagttctagaaacatgggaattatctccgattctttctcctgcctcttcattagttatttaatctttctaaaatattacctcactccatcacctggagcgcactggtgcagtcttggctccctgcaacctccacatttcaggttcaagcgattttcctgcctcagcctccccagtagctgggattacaggcacccaccaccacgcctgactaagttttgtatttttggtagagatggggttttaccatgttggccagacaggacacaaactcctgacctcaagtgatccacccgccttatccttcccaagtattgggattacagacatgagccacggcgcccagcaggcttttttttgatgaatcatagtcataatataggtcagctttttcctggcctattagatgaccatcgagtagtataaatattaaatttttatttgttttatgatttttctacttccgtgctctcaggtttcaattactcatgctgtcattgcacttgcctttgcagcttctcttttctaatttaatatagactagaaagtagaagactagatttattaaatttataactgctagaaggagtaaatacaggctcctatcactaaagtataggaatttttactccatggatttagtgatgtctgttttgactgggtgccacgtagttgttgcctaagttaactgacatagttaggtatgtttacataatcattcctttctttttagaatttcttagacatttctgcaagaggaacatgaatgtggatgtccagggaattggagcattaaccaataatgccttgggcccagtgtggtggctcacgcctgtaatcccaacactttgggaggctgagtcgggcagatcatatgaggtcaggagttcaagaccagcctggccaacatgatgaaaccctgtctctactaaaaatacaaaaattagctgggtgtggtggcgcacacctgtaatcccagccactcgggaggctgaggcaggagaatcgcttgaacctgggaggcggaggttgcagtgagccgagatcacaccactgcactcgacaaagggagactccatctcaaaaacaaacaaatcaataattcctgaaccagctttttttttaacactcttcagttttagtctcaaaaacatgcatattacattctaaatgttctaatgtgagaatatgttcattttagacatacaccgatttttttaataaaatgggcaatttagtaatatacatactgagttgaaccatggttttgagtagttctgacacagtaatacacatccaggttttattaaagaaagatggtgcaaatatttgtactatccttctctattgtagcagaattttcagtggcagacacagaggtatttaaattcactgtgagtgtgctacccacaagcatgctttaatgtaatattgaatgctcttaggaaagtcaatcctgagatggagtttggtttcttaaaagtgcgttgaaatgttcattaatgtattaaaacactttaaaaagtttattaacataccacattagatgtgcactgccttcaaaatgttttttttgtttcaaatatataaatactttattcagatatgatctagtttgtttcccttgattttagagccctaaactgattcaaatgtacccaagtcatttgcataagattgggttaagggaacatagctttattggtataaacttaatgaagtagtggacatacaatggcatgatcttgtgtgaagaacgttttataatttttatttggaagttccatattacaaatacatctcctttgtttcgataggatcctgattgagtcaatgctttgcattctcagtcctctgcataaagctgagagatgcctacaggtaagacttctatgaaatttatgtataaaatttatattttatacatttacttttaagtttggtttattttaagggattcttgaacagattaatgaatacagtagatgtcattgaccaaatatactacatttaga

SEQ ID NO: 37083 - DNA, 2300 bp, Homo sapien
agaagcaaaagcaaagcgagtaaaaaagactcaggcttgagctctagtgtcaccacttactgatgtgtggccttgggcaagctacttaatttctaatccttggtttttccttgtctgggaatttaaaatggcacctattttagtactgtaaggagaagagaaaataccaaaaagcaaagtaatcagtacattgcaataaaattactttatgtccattattattgtattaaaaataagtaaataattacaaataaaatatataaatcatatacttatttactattaacagcttaatacacaactaaactaataaatactaatattatgtaatgataacacagcaaatacagtacagaaatcatctctaattttttttttttggagacagagtctcgctctgttgcccaggttggagtgcagtggcacaatctcagctcactgctgcctccgcctcctgggttcaagcaattcacctgcctcagcctccctggtagctgggactacaggtgtgggccatcacacccagctaatttttgtatttttagtagagatggggtttcaccaacattggccaggctgatactgaactcctgacctcaagtgatccacccactttagcctcccaaagtgctaggattacaggcgtgacccactgcgctcagccatctctaaatcttaatatgtactacagcaaacatgatagaattaacggctaatatttgattagtaacctctgcaaaaaatcagataggactttaaaagacacctctgattcttatatattccattattttacaacttctccctcacaaaccctttcacaggagcgtctaagagatattacacaggaaaattaaatggattacatttcatctcattttattttacagacaacctgattatcagccaatatgtggctcaatatcattgggagaaaaaactgagaggcttgataattcgctccttaaccaaatgttatcgcaagggaaaaaaagacaaacaaaaatcctgtatacaaaattcaatgaataaatcaacaagattcttcataagtaaacaagattctaacttcataaatattattcctcataaacaagattctaggtatggtttaaaaacacttttggtatttgaatttctttcaagcattctttaaaaaatttcccagagtactcataagaagcaatcttcctcctaacgcccaagcagtaacagcaactgttaatgcaacaggtgaaaaaatcgttggcatctctttctcaaaagaaaggggaaagctttattttcacaatagatgtttttacaggaatgctaaacgcagcacaacctttgataaggattcttaaatggtctacatttttgttctatttttatgcatctcgaaacaaccctattaatataatttggctcttataaatataacaaattgatcaccttttctcagacataattaagaaggctttgacaggttgaagattcagccccaggttgacactctaaaaggaaataaacacactcagtacacatctgatttaaaagcatttaaataagaatcgggagtaggaaaggcaaagattgaattctctatcagagcaccatgctcaactctccggggacacggagaccagtgaaagaagcgcaaaagtacggtgaggactctcagaaatcgcattcccccgggacacccggcccacgctcgtcggtcactacgctatcagcctccgcgctctcggactccagcagccccgacacgccgcccaggagagggccgggcaggccgagcaccccggcccgcgctcccgccaccagcgcacccatgatgtactcacggagaggggtacgcagaaccgcccgtcccgccggagccgacacccggagcagtgcaaatcaactcccccagcctagcggcgcgtgcgcgaagtgaggcggccacgcagccacctaacccgccagcgacccgtgtcctgaaagcaagccgcggctctgtgccgcagtgcggacagcgcgccgcctgctgacgtcagcgcctgcctacgccgccgttcccatggcgaccgatgcgtcccgcgctctaggcgaagaccgcggccccgtccccgcgcctccaccgccttcttccaggaggaggggccgtgcggcgcctgcccgggggccctcaggccgcaggcgggcgcgagcttcagggaacttagggggctcccgcctccccggccacgcgagcgggaacagtctcctccactcggagcggtaagggacccggaaatgcgcgggtgcccctacagagtcttgagttttccccg

SEQ ID NO: 37084 - DNA, 2300 bp, Homo sapien
tctaccttttagttagccaacttgaactttttttttttttcttccagttcttgtattataccaaactttcttgtagtgaacactatacgccaccttcttctacctggaaacccttcctaacctggacaactctacacattattttggtctttacttaaatgtcacttctgctatgaaatattccctgacctcccccaccccactgcacctctgcatgctactgtaaatggagaagcaagagatgataacagggttacacatccgctagtctggggattgtattctgaaactaacaccctactaagaatgagcagtcagagttataacttccctttggaaaagcaggtacttaaatgcagttgtgaggacagatgaaaagtacataaaacacctacaatgcatacctcctagaaggagctcaatatatgttatccattattcattcaacaaatgttcatgaaatgccaactatttcatagacactgtggtagatgctggggatagagaaaatacaaagtaaactatgaaactatagaatgagcatccaaagtctaatatatagaatgagtatccgaagtctaatagggagtaggagtgtttgaaggagtcagtcaacctgcttaagattcaaaggatggacaacatttggctgtgatgcaggagtgtaaaaggaggaattttcaggaagagaggacaatatgagtaaggacggggcgtgaaaggctatggattgtttttcatggtacacataattcaatgttgcataaaactgcatggtacacatgattcaatattgcataaaattggaacaagaagctaacgagagatgaaactagtcagggagatggagaatcttgtatcctaggcaaagtaatcattttctcttacagattgcctttcaaaaattttcagcaggagagtgccattatccgatttacatttttagtcaggtcattctgatagcagtgtggagaatttaagagtcaaactggagtcagagaactggtaaagggcccatctgaggaagttaaaaagagagaatggatatgctttggcataagatgcatttaggatactctactgttcttactaaaacactgggaggattgtggtggcttacagcaagatagaaatctaggagagtatgtttagaacggaaagttgaacagctcagttcggtacgcattggattagtaatctttctcgttgcttcctcacaggatttagggaagcacaagacatatagtttgtaaggtgtggcaatgtcagtaagaatggaaaagctggcctccataaactcttactgtacaaatgaagcaacagcttacagcgggtggctgtaggtacaggaaatggcctgtattcacgagtgtattcacgagtccacgagtagcgcatctagtatttttccagccctggtgactcagagctgaagatggcgcctgtggcagaaatcagaaaagtgggagggagcattaggtgtagaaaaggatggcgttttaacttttgttttgtttttcacacacagggagatagctctaaaggaacagtggataattttttcttaaaattttgtctgtagtacaacttcattttccacgccttaaaaccatgttttcttttgtgggcgcgatcgcgtggggagtgacaaatctgtttctttgcctcattcattcattttcttattctgggcggcttccatgacagcctccccagttttcctttgcccagtcagtttttccctgcgctagctacaattctaaggcgaaaagagcattttcggaggtgagggcggggaaaactcaagactctgtaggggcacccgcgcatttccgggtcccttaccgctccgagtggaggagactgttcccgctcgcgtggccggggaggcgggagccccctaagttccctgaagctcgcgcccgcctgcggcctgagggcccccgggcaggcgccgcacggcccctcctcctggaagaaggcggtggaggcgcggggacggggccgcggtcttcgcctagagcgcgggacgcatcggtcgccatgggaacggcggcgtaggcaggcgctgacgtcagcaggcggcgcgctgtccgcactgcggcacagagccgcggcttgctttcaggacacgggtcgctggcgggttaggtggctgcgtggccgcctcacttcgcgcacgcgccgctaggctgggggagttgatttgcactgctccgggtgtcggctccggcgggacgggcggttctgcgtacccctctccgtgagtacatcatgggtgcgctggtggcgggagcgcg

SEQ ID NO: 37085 - DNA, 2300 bp, Homo sapien
aaaacatagtggaaaaaattaaatgtgatacctactctttcagtaattccctcgtgtgtgtttttcaaatgaagagttgattaatgataatatgaaaaacactcctgaagccagcgtatcaattactgtctttaaattaatgagccctaggtacttttctttctgattgacatagccccttttaaaaatttccgtctctttaattgagcataaaactataattgttttttacagtctctttatggggtgtgccataatacactgacattctgtacaggagtttataccttgaaacaattatatgtttatatcctggataaaaaattaagttattgaatatgattcaagattttctaaatcataccaaattcttcttcacaggaaatatgtcatatccatgttttagtgtagtgtgtggtaacagtctttggatcacgtgtcacataaatagtaccacggtagcatttgtatttgacaagtaagttatagctataaataagccattatatggaggagaatatcaaacttttctttacttctttacccaattagcagattttaagaaaggaatttagaattcattatcatacctttatcagtagtgatgaagggtgtgggctctggaggagagaatcaggggagtaaatattagccttgcgacttttggcttgtagagaggaaaaacttttcctatgccctcttatcttctgtagttggggcctgtgaattaaattaatagaagacagattaacagaagaaaagcatgcaaaatttactggatgttaatctttgtacatgtacatgggctttgaagaaacagaaggaaacagcccaaagaagtgactagacttggccttatacaccattttaacaaagagtgataaattatggagaagtgactacacaaaagaaaggggcttggctttctaggagtggcaaattgtgggaaggtaaatatatgggggaaattaactgctagataaaggttatgtagtaaggtttgtctatacagacttatttaggtgctgtctccatttccagtggtacagtttgttatccctttcctgatatggaaggtggggaaatactttcacaagaaagctttatgccctatgtttaggcagataggggagggaaaagagctcttcttgtgtctgctttttctcaattgccttcaacttaaaataattattatgccaaagtggcatattttggcgtgacatattctaatccccttcagatgttatgactgtcagcaagttcttatactcctccaagcctcagcctcctcctgggcaaatgaagacaataatggtatctatttcttagggttgttatgggcattcaatagataatacatatgagcagctcagcacagaagtaggtacataataagtgttcaataaaggagagctatcattcttatttttatctccagaatccgttttttgctttcacctatagagatatagacagtacatgcataccaactctgcccattaattagcatatatatatatatgtatttaagaagtggaggaatgagaaaaaacaatatcaggatcatttagtcttaagcgtaaagtgttaaggaggatttaaacagcaatgtttaagctgaagataaaaaagggaggaggtttaaattaaggaataaaaatatttaggttcagattaaataatttatcagatacaactccttagttatgggtgtgtgtatgtaattagatctcctcatcatctactcttaaaaccagacttatcgcttttactctccactccaatcacccaccaggtcatgctgatgttaactggctcatgcccatcacttctttttagttcccaatgttacctcctaggctgagttttcatcttgttaaacctagattaatgtaataccttctaaacagtctcttaatcttttaatatcttccttattctattcaatcctgtgttctgccaaccaattactattcctcaaaaaccactttgtttaatctctctgaattccgactgcctacatagtaagattctaattctttggtttagctttcaagattctattcaatccaactttaacctaccttttttgttccattcctctcccctccccatccactctagttagagggatgtggactagaatgggaataaggacgcagactccagagcagactgcctgcatgaactccaggtccccaccagccagttctaaactaaaagttcagatattctgaaccatggaacaaacatgatgtggcctgctgaagtagaaatgtggacttttgggatgtgagacc

SEQ ID NO: 37086 - DNA, 2300 bp, Homo sapien
tatttcacctcaaaaccaggctcttctcccagtcttccccatgtcagtaaatggcaactctagtccagtttgcccaagccaggaacctggaaattactcttgattcctctctttttctcacacctctcatcttcaaatactgccaacgctctctgcaaatacacaggcccccttccaaaatctggccctcccaccttctccactgctctcacccaagtccgagccatgatgtgctctcacttaggttagcacagtggcctcatttattggtctctctgcttctactcttgctccctaggagtctatcttccacagagaaaagagagaaatctcttcagaattcgtgtcgaatcatagacattcctcagttcaaaacactctgataggtaggttttcaccttggaataaaatctaagtcgtgtgcatggcctgtaagacatgtcctgatcttgtcccagacataccttctgaaacttatttcttccctttgctcattctcttccagccactctatttcccttcctgttccttggctctgccaagcactcatgtgttgtgggacctttccatggcttcatctgcatggaaggtagaggcacacagtacctgctatgtcccatcattcgggcctccgctccaagttgctttatcagagggctgccctgatcatctttcctaaaatagcacacacaccacacacacacacatgcacgtgtacacacacacctcattctccttaccttattttgaagccctcattgccaactgacattatacgtttacttatttttctttgacaatttccctgcttctccaaaatgtagactccatgggggcaaagaaccatctgttttgttcactattgtagcttcaacaccaaagataaaccccaacaactacagggatgcttaatcctagcgcctaggctcttagggatacataaatactttctttctcaaagaaacaatattagtatttgaaaaaggaatgtggacattctttagtgttgcgcccacccctaaaacatagtctgcctcggagcaatggagaaatctgattggcccctgtgggtcccatgcccccttgtggctctgtcgtgggaatggggctgggggcaaagtccatgcaatccatagaagatagaggaaggaaagttccgcccaccgcccacccaaaaaaggtctgttagcagaatttaggatggggatggggaaaaggaggaggatgtgggggaggcagaaacaacagatggcaactatggggatttttccagagtgggaagtgtaacccagggataagctggggtccctggtaaaggaagtatccctaaataactggaccttcatactctttgggaaagaacaagctgaggccccaggcacacctgcatggcatcaccatagccttgcttcttgaatgactcctgctggcatcaggaggcatctccctggcaggaacaagcctgaggcttcaccacggaagctggaggaaacgcagggacccatggcacaaactgacacaggagttctatgtttcattgcacatcattttgttcaccagtgcatttgtacgattctgcctctatggctatcaagtttaattaacaactcatttttaggtaagagtaaaaatgaattaggtaaaaaaaaataagcaacagctgccaagtgagcatggagcacatacactcacagatggaaaaaatctacatcttgctgctatgatttagctcagggttttatatttaatttttgttttgttttgcttttgtttttatacacctcaccacaaggtattttaaattctttaaatgtattcccgaatatagaaaatgtttcttgggctctcctgagagtggggtgcccaggctgaccacaggcacacacacattcttcccatagtacagtactttaaaattaatagcacatgcagaggaaaaactaaaccctttgacgtcactcttgaaatgaggaaacataaacagaaaaggctccactccagtaagctgccagagttgaagccgattggtctctgcttttccttgcctgtggcaactgacagcacctcccagcctagcaggccggcggctgctcacccagccagtcagttggtctgggcactgcagcaggctcggctctgtcccagcacttgtctgggagaaaagtggtgttactcacccagggagagtctctctttctaccttccttctttctcgatctccttgtgtgcttttgtgtttctttatttcttttccttttttttctttttttttttttgttacttaattatattcctaatcc

SEQ ID NO: 37087 - DNA, 2300 bp, Homo sapien
gaaaagaaatcagtatattgaaaagctccctgcactcccatgtgcacagcagcactattcacaacagccaagatacggaagcaacttaagagttcaccagcagatgaatggataaagaaaatgtgggacacatacacaatggagtactattcagccataaaaaagaatgagatccagtcatttgcaacaatatggattcactcggaggtcgttagattaaatgaagtaagctaggcacagaaagatcaactttatatattctcacctatttgtcagtgctaaaaatgaagcaattgagctcatggagatagggagtagaatgatggttaccaaatgctgggaagtgtagtgggaaggaggaatggttaattggtacaaaaatataattagatagagtgaataagatctagtatttgatagcacaatagggtgacttcagtcaacaaaatttatcacacatttaaaaataacttaaaaagtataattggattgcttgtaacacaaagaaagaaataaatgcttgatgtgatagatatcccatttaccttgatgcgattatgatgcattgtatgcctgtatcaaaatatctcatgtacccataaatatatacccttactatgtgcccacaaaaattaaaaattaaaaaacccttaaacaacaaaaaaaccccaaatcccccccgcctttttttttttttgagacaaggtctctctgtcacccaggatagagtgcagtggtgcgatcttggctcactgcaacatccacctcctgggttcaaatgattcttttacctcaggtaattcttttacccaagtagctgggattacaggtgtgtgccaccgtgcccagttcatttttttgtatttttagtacagacagggtttcaccatgttggccaggctggccaaattcctttttgtcataggaacgagataggcataaattctccacgaaggaattatttctattggaaagaatatgggaactaaatttttttatttgcttcagatatgggacttttggtgaaatttcagttttctgcgcattgtactttcacaacaagtttttagaaatcacgctgaaattctcaactgagagatacgtatcatgatcaacctttgccacttatactctgatacatgtggtggtgtatttccagatttttactatgtgtggctgtaaaaatgctgttatgggctagagtgtgtcccctgccaaattcgtatgttaaaatcctaacccaagcacctcagaatgtgacctatatggagatggggtcttttaaaaggcagttaagttagatgaggccactggagtaggccctaatccattatgactagtgcacttgtatgaagagaaaattaggacacaggcccagagggaagaccatagaagtgacatctacaagccgaggggagaggcctcagaagaaaccaactccacagatgccttgatcctggactttcagcctgtaagactgtgagaaaatcagtttctgttgtttaagccattgagtttatggtgctgtgttatgacagccttagctgattaagacatatgcccgtaattttatgactcagtaaagaaaatattcacttttacttaattaacccaatcatgttctttacacacaaagaaggagtctttcagatctgttaccccaggacctgtcacaatgcatggcgtacggaggcactctgtgcacacgttgagtttatggactgtccctgaatgtcattcagatggaggactttgcttgtggccctagttgtgtgatatgaacagacttcagcatggccatccctgccgacgccaccatctcagatattccatcaatgctccttagccccgagagcaggccaaaaagacaaagaacatggtctccaagcggcccagccccaagcaacacaactccctggggtttctccaaaaagagaagggtgcgttgagtggctcttagctgttcctaccaggatatacaggtgagccaagaaaaaccacatggctagctttatcaggagctgctgacaggcctgaaagatccaaaacggacacctgacccatgtgactgttgtcagaacactatccaccatggcaaccaggccagtttccatcgcacatgtgtcccgcagctccaccgaaaaggatcaagaaagtcaggattctaaataccaacagcatcactctgtcaaaaccacccttgcaacctttctcagaaaaggaaatgtaatgacaagatgaaagttagccagaacggccatgtccagaaaagctctcagtagtacagccatctgtccgaa

SEQ ID NO: 37088 - DNA, 2300 bp, Homo sapien
cctgtattaaaaaaaaaatgccactgcgtcttttttgtcttttttacatctccttttttcatacttatataaatatgcttaatcagagtgcattttaattcatactttatgtttaaaataggttttgctgatttgggaaaataaagactatggatcaactaggagtattgttcgtattattgggaaaatgcttccactggaaccttgtcgaagacctaattttgaggtaagtcagtcaacataaattgtttaagtaccaagtacaaaataatcctaggtactcttacaggtatggggtagaacaacaaaggaagaaacatttcctgcaagccaaaaacctgtagtttacccttgggaacaagccatttcatatatgtttttgtgtttttgtttatttaaatacaatcatgcatcgtttaatgatggggggatacattttgagaaaagcgttgtttggtgattttgtcattgtgcaaacatcacagagtgtactggcacaaacctagatggtatatggcctattatgcacccaggctatatggtatgacctgttgcttctagtctgcaaaccttttcagcatgttactttaccgaatactgtaggcagttgttacacaatggtaagtgtttgtgtgtctaaacatagaaaaagtatggtaacaatgcagtaaaaattagataaaaaatgttacgtccgtatagggcacctaccatgaatggaagatgggaagttgctctgggtgagtcagtgagtggtgagtgaatttgaaggcctaggacattactgtacactactgtagactttataaacactgtacacttaggctacactaaatttatacaaaaaccctttcttcaataatacattaaccttagcttactgtaactttttttataaatgtttttattttgtaaaaatttttgactcttttgtaataatacttatcttaaaacacacattgtactgctatacaaaatatttttatatccttattctataagctttttatgatttaaaaatttttaaattttttatacttttaaaatttttttgttaaaactaagacacaagcacacacgttagcctaggcctacccagggcagaatcatcaatatcactgccttctacctccacatcttgtcctactggaaggccttcagtggcaataacatgcatggagctctcatctcctataataacaataccttctcctggaatacctcctgaaggaccttcctgaggctgtggtatagttaactttttttttttttttttaagataaggtcttgctgtcgcccaggctgaacgaagtggagtcgcgtgataacggctcactgcagcctcaacctcctgggctcaagtgatcctcccacctcagcctcctgagtagctgggactacttgggaggtgtgcaccaccacacctggctgacttttttttggtctggtagagacgggatcttgctatgttgccctggctgatcttgaactcctggccttaattgatcctcctgccttggcctcccaaagtgctgggattacaggaatgcaccaccatgcccagccaacttttctttttaagtagaaggaatacactctaaaataataataaaaagtataatatagtaaatactaggtgataggaatatttcagtttcatcataatcttatgtgaccccatgtatatgcagtccatgatcgacctaaatgttacgtggtacatgtctgtaatgacattcacagatgggcaagtgtgaacaataactgaagagcttaattttattttgcattttgtgatagatgaaattaaccaggggagagaatattgcttagtgcttagacttcagcataacattttccccagtgttctttcgtgctaacaggtacatgtttttctattgaatattctttttatttttctttcttttggattgttaactaatttaataccatggggcatgtgtcttctcctgactccctgcagagctctgactatttttttctttttttactttagttgatcccgctcttgaactctgtagactctgataattgtggatctatggttccatcttttgctgatattttgtatgtggcaaatgatgaagaagccagttatctcagatttcggtaattttatatgcttatcttgggaagtgggctataaactgaattcttgcatgtgtcgaagcttgttaagattgattgagcttttttgttttgtttatcttcaaactgtgctgtgccctactgtatcttcttaataaagaagactggctgcttttcatttttttagccag

SEQ ID NO: 37089 - DNA, 2300 bp, Homo sapien
caaatacaatctgggctgtcttaaaaattgctgggattacaggcgtgagccaccgctcccagccaagataggttcttgattgctgtgttcaaatccttaaaaggctttgctagagaagagacatgttcaaatcacataggatcaggagactggtatttgatacttgtccgatctcctcattttaacatgttacatatttaaaggacagaaatcagagtcagtaggtaaaaaatcttagggacatagacttactagctcaatatagtgagctaattcaatataatgagctaatacttgacaactagatactttaaaaagtgttaacatgcagcttgtgaatagcaagttttctacctggatcaaactgggggaggggaacacaggaaaactccagaaagcaagccactatatttttgaacactactcagagacaacagaaaagctagctttgtgatgtcagaaaagctttcttggaccctatctcattctaagagttcaggaaaatctaatttcgtgtaaaaatgagcaatggaaaaagatgtccaatcacataaaatgtttttgtcaaaatggaattatgaatgctttagtaaactggaagaaatatctctgaagaatttagaagaaagttgtcagcaaagcatttatggatgtagtatttgacctgggtcctccttgctacttaaatcagttggaatattaacctatgttaatagtgcagctggaagagtagtggttccgttctcattctggagggatgttttcattctggccctgtctgtttgctgtttgataagagagtgggaaagggagggggttataaagtcgtgatttattcacaagggcaaagggaaggacaaggaacttgagaaaattactccatctagggtttctgatccatcatcatccttgttctgcgctcactcagccgtatccagctctactgggcatatcactattattgctatcaattgttttgctagttgcttagtcccaaatcattatcatcttttctgtcattccacatttaggtattttattcaacaaatagactgaatgcctattatataccagacactcttctaaagcactggggaaagatagagcatggatcaaaacaacttcctgttctcctggagtctacaattttgtttggtggtagtggaagcgtaactaaatatatatgataagtgctatagagaaaagcaaattagggttagaatggaacgagatgccccgctggcctgtaagctccaggaggacgaggacctgccctctcattaaggtattttccgtgcttagaatggtgtctgctacgtagtagatatctattattggttgaatgaataagtgatgttgaccatagataaattagttcaaaacttagattttcaaattatgtcagtagcaggcacacatcttaaattgttatatcactccagtgcacgtcttgctgaaattcagaagaggaagctatttcgtatgaagccaataacctcaaatcagaaatgaaaactgggatatcacctgtcatatcacttgccatcctcggctaagccaggagagtgtccggcccaatattcggtagcctggatacgtaggtgtatttagtgaacgaaagaatgaatcctagccactgcaaagctgcaaaaccctcgggggtagtgcttggcttctgccagttccacaagtattttaatattagctgaacaaatgaaatgaccaaaaaataaatcgcgattttgtgtcagatgaacttgggaaggcggatgcgcttagggtccggctgtagcgagtaagacactccctgcgaagagttctgtggggtacgaactccggactgcgagtccagctcacgagtttgtacctaaaaccttgccctgcgggagcgacgctgtcctaacgcgacctgccctgcccgtcagctcctattggctgactctcggaagacccgcctcttgagaaggaaaagcagtcgcttcccgaattgcctgacatcatgcaatgaccaatcagaagcagcgatcttcagttttgcccaatgaggctggttacgggtcctggcccgcggagtttgatttcgtcctgggatgcggaagtagcagtcctgtcatgcggaagtagcagtccggtcctagggactagcaggtgggttggttgggcgcaggaggacgggggcgcgcttcccataacattaccctggctgagcgtgaggctccagggctgggcaccgggttgacctcttattcctcgctgagggcatcgttaccgcctgtggctgcaagccgaggcgcgcgggt

SEQ ID NO: 37090 - DNA, 2300 bp, Homo sapien
attcaaaatgacctttgccaggtagactaatctatatcaggccataaaatgtctagtagtagaaatgtggggaaaggcagaaagggagcaactgttttgaagagattaggggacttggaagtactgcttggttccaattctggctgtcactaagtactatctacatgatatttggaaaataacctcttgaaccttgcttttctaattagaaaaatgagaatgcatctgttttgcagagttgttgaataattgggttattttgaaaataggcacgtttgttactagaagctgttatggacagtggtagtatacaagtttaatagggcatgctattaacttactagatgtggaatctagagcttacaaacaaggtttttttttgttctgttattttttttgtttttgttttgcatggggcgtattgatgttgaaagaacagattctgagtagtgaatactttttttggtttttaacttaaataatatcttgggttcaaagttgttaatttagttttcccaacagtttagtctgtcctcgtgctctgacagtgagtatcttctctcctcattacatagaccagattttgatccagaggagaaaaagtagagataattgatgaatagacaagaggatatgccattggtttttatcctcctgtctggatgaataacatgttaatatgtaattatgtatatatcgtttgtaatttacaaagtagtttcatttacattatcttgttacttgtggacttggtaatacctaggtgaataggaaggtttttttgctcttgattagatttttttctttgtgactctgggagcaaataggtgagtagttgatatcatttggagatacgtactttcagttttatgaatgcttatgaatattatagccagacttcccagagtaaatactacttattgttgaatactagcaaggatgtccacattgcttagcatcttactgatgtataatttctcttcattcctagatgcctctttccatcttcctaaattatatagtatttgaaaaagcaatggaacaagaaggaggtgaattgtgacccagttaaactaatgtccgttgcaatacctgaattgagaaagggcagtatatggcccaagatactgagtacaggattgcgaatatctttctggctttgtttctacccttgttcaaccaattggtttcattaataatattttacgtgcatgttatggaaattatagaattcttacttctgaagtttttttttttattgggttggtcagattatttgggaagagcttgatcataatgaggcttaagtaatgagaaccattatgttaggatctcttttatttaggtagaaggctacattacaactacagattataacatctgtcattgttcaactattgaaaacagcatttggaaggatgagggataataaggatgtgctgagtggaaaaaatatttgtatcatttactgtacaaaaatttattatagattgttttggataaaaacctgcaaaattctcaagataattagcttttaataatttccccagtcccactgcactttgtatacacaaatgtttagtaaaaatagtcaagtacattttttaacaaaaactaagtgatagtatcttatatgattcattattttctgatactaaaatgccagtttagaagctggcataaaatttaactctataatatgtgtatatatattttttctatttctcccctgaaatctgtattttatatctgtcttttatagggagataaaaaattaaggtgtgactctgctgaccttcggcatgacattgatcgccgtagaaaagaaagaagtaaagaacggggagattccaagggctccagggaatccagtggatcaagaaagcaggaaaaaactccaaaagattacaaggaatacaaatcttacaaagatgacaggtaattgttcaaactgactaagataggttttagcttctaattagcctttaataattgtcagcttaattgctttcaattttgactgtgtaatcgaatgtttaaatttaaacaattaaaattatttgttttacagcaaaaatgtatttgtcttttacacggcttatggtggatgaggacaaaaactttggaatagcaagctaacactgaaaaaaaaaatgacaaattaatgtgtcctattatccaggctacatcaggaggttggacttcaatgcagtgcatttctagaaacagtttgtgtaagaactttggttcgttatgcttgattccgcactttttcaactcataacacccagagtacaaga

SEQ ID NO: 37091 - DNA, 2300 bp, Homo sapien
gcttaagtcttaacttaaaatgctgtattcccaacgttagaatagtagtgcctggcatgtaaggcacttatctcaagttatctggaaagtttagggttctctgtatttgaaagatgggattaatatgtagctcatgagattatcaggatcaaatatgacattattttatttactttaagtcacctagcacagttcttggcacatggttggtatttagatgtttagtttactatgatttgttgctgataactgttctcgatttggtttttggaaggcagggaccacttacatagatacatttcctatagtaattagcattgtgctttgtatatagactttcattttttaaaaattagttgaactaatcagtctttgatactgacttatttattgtgtgttacattttgtgtattatttgagttattggtgtggatacttgaatatatttatagattgtgaacaggaatgtatatccactggtctaacagcctgtattccctgttctgtcagttttttatatctagtgtttattttctttgaacttcaaaataccatgacggagtaaagagatctggcagttgggtcttctctggatatatatatatatatatatatatatatacacacacacacacatatatatgtatatatatatataaattagccttttggaattgtttagggaagtgttagctaaaatgagccttgtaccacttctaggagtgaatcagtagtaatgactttccaggtcagaatagttttatgacagtactccagtttagaagattgccatttttttctctggccacttggggttttgatattttaaaaactaaacttatatgtcctttagaaatcctttgtttttgtacccaatcttgcttggctttttgactttgctacttttttagtgtttcccttaataggttccgattcctccttcctaggctgaacctcaaatctctccccagttggagggccatggatattttaggagacgctattcttgattcaccagtttaatgttaccatttcttctttgtatttccagtctcgttttatttttaaaattggatcttggtaagagttacagatttccatttaaacttgttcatgaattctttgagtgctgatgtatattaatcttgtattccttagtttctgttcgcctggtgcttttgactatcctttgcacatacttgatgtgaatatacataaagctaaacttttcagtattggtaacttgaatattttgtgcaaagtttatttacagattaatgataaattattttaggaagaatattgactttcagtagataaaagtttcattgctgactgttcttttatttgaatgtagacgtatcaagatgcttttaggcacagaatttaaagttactatgatggctgttaacgtggatttaaaaatcagtttcacatgaaactaaattgtgtgaaaggaagtaccaaaagagaataagtagcagagcattaaactcatattttagatgttataaagtagagcattatgaaaattaactacagattaccttttttttttttttttttttttttttgagatggggtcgtgctgtgttgccaaggctagagtgtgttgccaaggctagtcacaggtgtgatcacagtgcattgcagtgtcaaactcctgggctcaagtgatccttctgcatcagcctcccaagtagctgggactacaggcttgtgctaccttgccccgctaccaagatggcattatgttagctacgttggaattttctgatggaacgacatatcatatgttttttaaggctcaaattactaaaattagaattcaagtagttaaaaagatgctgtcagtttcatgatacgctactgcattgtggtttacaaaaaagttgaattttaagcttttacggttaaaagtttcctatttcctgaattagtttttccttccctgaaattgtaagtgcgtttattagagtttatggcagtgcccattatatgcattgtaaataatggttatttaatttaacataaatcacaataatggtttttttgtctttgctaggaattcgaatttagagtttaatttctcagagcattctctccaggaagaatttttacagtatctcaaagacttcacttgacttcttgatcctgcataaaaccaaggtaaaagagcattcatttttctagttttcacttttgacttttttgaggaaatgtcactactgaattgatgattcagatggagtgattaaaaatgatgtggtccgaagctttgttttttgtttattttggtg

SEQ ID NO: 37092 - DNA, 2300 bp, Homo sapien
cgggcgcatcacttgaggccgggactttgggacgagcctggccaacatggtgaaacactgtctctattgaaaatacaaacattagctaggcttggtggcgggagcctgtaaccccagctacctgggaggctgaggcaggagacttgcttgaacctgggggtgcggaggttacagtgagccgagatcgcgccactgcactccagcctgggcgacagagcgagactctgttttttttttttttttaaaattaaaatcagcttactaatttatctcagcattctctttgtacctttttagcagtttggtcatttgtttacaacttgtatttcttcttgagataatgttctatttttctgcaatgctcatttgttaaatgggctcttttttcctctgctcttttcggcgtttgtattttaataggaaaaaaatttattacaaagaatgaatctgtaatggtggaatttcaggttttgaaaataagaatgtgcataaaacatctaaattcaagaacctcctactttgtagattgggaaagcatcacgtatcaaatggatctatttcaagggaagtctgtataacttccacttactaaaggctttgttccaaaggatctcctttgttactacctcatgttatgtaaataaaatcataatcagttatattgcctcaaatagatacttcattttcaacacatgtgcaatagaattgcagagggaggtcgaagataatatcctagcctgcaatttggggtattttgaataaatgaataacagcatgtattgggagcgccccgactcccaatacatgcagaatagcagacgtgtattgagcccttagttgttttttttttaaatatagttcattcactcaacaaatatttctgagaacctgcgaatgcttgggacatcagggcacaacaaaaaggccaaggatttctgtgtccacatcctgaggtggtaatggggtgagggacagactgtacaataaaaaacctacgattcactccatgaaaatgttgtcgtttttctagttcagctggtaaactggactgtgaagaaagaatgctctaagcacagtgttaaattcacaaccagggcccaatcctagtttcgattcactcactgacaccctggttgctaattacaagtctgaaatccatcaaggtagttaacatctctaaacatcaaagcaatagcggttttaggccctaagaaagtgcagcccggagaagtattaatgcaaaatgtgctacggctgttatttaaattctattcaaatcgaatgtggcttgcctatttataatctgacttataattctggacaaccaagctacgttgggctgtgttcctcggctgccacaaatcatcgtcacaggctgaaagctcaactgcttcgtgctctttattttttcatgcctatgccaacgttgccgatgtggtaaagctgtcatcacgccgccagaagggcggccttctttggcacgagcagcctaagaggtttccggctgctgcggcttgagctccgatttgatcagacgccacgaaagggatttagatcgtggccatttttcaactaagtgcgtctgccgaatttaatagcaaaccaaaagccacattttctaatctccagttaggcgtccaagaggaaaagtggcgcttgctggctgagggagcagcgtgtctgcaattacagccacgtcttgcctcctggtcttttcctcagtgtgggattgtctttttgttttttgcctggtctgagccggccccacagaaagaacagaccagacgagcttactgaggtaaaacgcaggggcggcggtgaggtctagggggtctactcagaacgaggcagagacaccagcgaaaagcgccgtatggcgaagctaactcaggcctgacaaaacacccaccctactctaccgcctctccggccaaggctgacgctacgggccagagggcggagccgtcacatcttcccgcgagaccagccacgcgacttcccagaaggccgcaggcaacatcttaatagcagccaggaagccggaccggagcggaagggtgggcggggcttgcccgcatatttagcggcacccgaggccacgccccagatcggaagtgacggagacgtgctagcgcgtcgaaggtagctctatggttttcctcgcgttcttgagtcgggaaatggccgctgtgtggttgcaacggagataaattcccggaaccgcgattcggcgtgtcaggtaggcctcgcaatgtattcaagttactccaggggcagtgaagaccgaggacaggccatat

SEQ ID NO: 37093 - DNA, 2300 bp, Homo sapien
tattactatggtattcttgaaataagattttagataaatgtcatattaatcttgttctttttctgtctcttcatgtagaagttatatgagtgtttcttctgaagaaccaaagctgaaatttaatgagaatttctacaattaatggaattcctttcctgctataaaggagcatcccctccacccgttttctagagttcttgaccatcattttgaaaagatttattaaaactagctaaagacaacagactggatagcttttctaataattttcatcaataggaaaaaagaaatacgtctcattcttcaatactttaaaatggctttttccagtgtgctccttcttagcaatcaatatttttctgcattctttaaaagacaagagaatttggttataaaagaaatgggctgactaggcatgatttttttggtcttaaaagcttaacatgtaaaattggcaaaaaaaattttttaccttttataatacttgaaaaataagtacctctttgttctacaagtagaatgaataggagaagagtttaagcctgtttttttaaaatattattgcaaagagctctatttgtagaagcaaattataggcagattaccaggttcttataaatacagcttgtacatggacattctgcaaacccagctgtcacatttttcttgcaactccttttgcaaaagcagactaaaatgttttaaaatgtgaaaaaacattattttttcaaagcaagaaaataatttactgccctcttacataatgtatttataaagtttttccagataaactaatcaaataaattagaataatgtgacaacattacaaatttaatttgttagctgcattccttctgatgttaccacgatagaatgttactgatgattcagggctatttctgaagtctgtatgttgctgctgtccccagtgatggtggacttatctttgccttacctgatcacaaattatgttggggaaaataaagatttaatatttctttaaatagaaaaagaatttggttttgctcgtttaagagcaatgagaaaatgatggaatgttgactgtgtttggcacacaggacacggaccttcatggaagtccttgctctgcgtggcatctgtcagcttttcacctttcattcttattcttcacttttgctgctgagcctagctgtacaaacttgcactttcatttgctaatataaattcagttttattttaccattttagagactactaatgattaaatgtagaaggagagggtgcacatgtttttatgtggagtgtttaaaagataaatttataccactgtaatgtgcagcttttattaaaagagaaattggttgaactgctaggttgaatgagagacttcatctattggactattttttttaatccaggcatatggtctttagtaatggcttgtaatttgtgaaaacattaatttgggggttttccctgttttcagttgtccatgtacacatagtcattatattagaaaagaaatctgttcaacaaacttgtttaatttgtttaaatcaacatagcatgaaacaccaaataaaatgtttgacatagttttacttttagctttctcatatgttataacttcactcagattgattcttgagtcttcagattgtccttcatttaactcagtgacattttcctagcctcctgttgattaagcatataggatagccttatttaaaatttagagcagtaggtgtattttggctgtttttctttttcatgtgtgtttttaaactttagtcatcattagcaaacggaaagccttctaagtaatcaagttttaattagaagtggtgcaaaattcttaattatattgtgttaaagagcagcgctgccagagaatgaccctgacctttacaatggctggcttgctttttggccagcactggaaaaatctatatttacttgcagaccttaaggaggtcttcagtattcaccctacattaaggggagcgctcaggaatcaaatatggccctcagtatgaaatgagagtgaatgggcttttagtttccttcctacaccattgcaaactatctaggccaatttagtcaccaatcacaggtccatttggtggtacctctagctattacaggaaagtaaggctatatgtgtcctcctacataaccgcaccacctcgtggtgtgttactataaaagcaaatctaaaacagttatctatatgacaagtttattagcaagcagggcttctggaaagcttggagaagttctttctctgctcctaagtaaccccacaaacaccttgacta

SEQ ID NO: 37094 - DNA, 2300 bp, Homo sapien
gtcaacaaagacgaaaggactgctacagaggaaggagaaaaaccaagccaatggtagaccaagagcaaggtgattagaggatcaagtgctgcagaaactctaggggaatgatggatttaaaaataagtaatttgatttgtatacataagcaagaaaaactattaatatatagctttttttgaaaaataacggcaccaaaatccacatttatttttattacctttggtgaacaaaacatacgacaatagattctggagggtgggacgttaaaggaagacattttaagaatcaaagagtcttagctgtgtttattggggtagagcccttgggtgcagaaacatttagggattcgggagaaaaaagggatgatgtttgaaggaggcaggagggaagtggacggtgtcaggaggttcagctcctcccctggaatggggaaccctgaagatttgaaatggatgtgggagctccagacagatggcttccatgttccaagtaaagtacaacttgaagtacgacgtgatggtgtttgacatttaacagatgtcatctgttctctgcagagtcactcagcagcctcccctgttgcagacacctccttaggtttggaacacactgtctatacagggcctaagtgcaggattttggtgtgttccttatttcatttatttttgtttaacttgtggcagataaatacaggttatcaaaagaatgggacaatgagtaagcacacaccaaactaaacaaaacaaaacaaatagaaacatcacaagtcttgaatttttttttttttttttttttttttttttttttttttggtcaaagaaagaactcattggttgatttaagtcggtggtaaatcagaaagttgaaaataaatcaccctccttctccagggttcttccggatagttcaactctaaattcagctgagagtatttctgatgctcaaagaaaagtgtcttaaactctgatgttttaatgtagttaaaaaaaacacaaaaaatctttgctgaggcccaagctgaggtcaaaaactacctctagccatctggtgctttatttttattgattagaagtctctgataagactgatttgaatgtgatttaggaatatcacattctaaatggtcagtttgcctattccattatagaaatgacactacgggaaaattcatcatcacagaccacagcagaagtgttctttagttaaagctctacctagtcatccagaaagccagtaagtaaaccaaataaaaatagttcactgggctcagagtggcaagttttgcatgcaaagatcgtgaaaattgtaaccctaacaataaatccaatactgttctcgactctcttgtgtgtccagtgctgctgcagtccttggaaggcttttaaactgttcagagcttgctggttatcttcagccaagccagagagtgggagtgcagtgcattttagtgtaaccatgcggaactggtcgctccttgattttgtgccgtatgtttccatttgtgtaggctttttcccccctcagtattttgttgcttatcctttagagcgaaattggtttttcctcggccaataatctgtttctttaaaaaaagaaaaattcgttacctattgcctttttttctggtcttcctgagcaagccagaagtcacaaggtcgtttactaaacggaaactaagaaaaagaaaagccacatcagccggcacaagcctctctaacttgtgtgccctgaggctcatcagatgcgaagtcctggcgacaagatagggtcgcccgcagtggcttcctaaagcgcagatccaggccggctcccagcgtggaatccgacccatgtacttcgcctctccacgtggcatcagatgctctgccggctgtcaccgtgaactccagccctcgcggagccgacactgacctggctacttcagagttcggagggaaatagcgtctccgtaccctcgccccacctgggctgctcctcggaccgccgctcgtcccagactccaggaggcgccaccaggcctcgctgaccccgctccatatctccgggagccctcagctggtcggccgcggcgaccggaagctccggactgaggtactggttccgcccgccgctcttccagccgagactcggcagcggcggtcggagcggctgccacgccgcacctgcccgcgagggggcgcgccaggcccaggccgcagccgactgccgcgctctctgtccccgccctccgccatccccggactgcgctcacctgtctgggccgctggcctgggaggcgggggccggcgggagccaag

SEQ ID NO: 37095 - DNA, 2300 bp, Homo sapien
aaagtttccttactagaaatttacttctattattttatacacctttagaaaaatctaatgtcacattgattcattgatacagttgtgtagcggctaggtgtttttcctcatgactatttccttccttcctttaattattatttttttttaagatgggggtctcactatgttgtccaggctgatcttgaactcttgggctcaagcaatcctcccaccttggagaaaattaaagaactctttcctttaattctttttctttttctttttttagatggagtctcgctctgtcgcccagtctagagtgcagtgtcgccatctcggctcactgcaacctccacctcccgggttcaaacgattctcctgtctcagcctctcgagtagctgggattacaggcggctgccaccacgtccagctaatttttgtatttttagtagagacgggggtttcaccatgttggccaggctggtcttgaactcctgacctcaagtgatctgcccgcctcggcctcccaaagtgttgggattacaggcgtgagccactgcgcccagactttcctttaattctttactattcagctattttatccttccttcttacccagtttgaaatgtaattcatggctgggctgggtggttcacgcctgtaatcccagcactttgggaggccgacgcgggcatatcacctgaggtcaggagttagagaccagcctggccaacatggtgaaccccacacccctccccctcccgtctctactaaaaatacaaaattagcctggtgtggtggcgcatgcctgtaatcccagctattcgaaaggctgaggcaggggaatcgcttgaacccgggaggcagaggtcgcagggagtcgaaatcgcgccattgcactccagcccgggcaagaagagcgaaactccgtctcaaaaaaaaaaaaaagtaatttacattttcttctgcctttttcacaggactcactagtctcagttcctggagatgggaagtacaaaacctgtttctttactcagttgtaacttgcactggctttcctaacaattacagcattctggggttctctgggaacttacacatctgttctttgctccccaaataagcaggtactttttttgattgctcttaaacaatctgggtatttccctcccggcctcgcgtgatgcagtttaaaaaatagaataggtcacgttattcccctgtttcatcttgttgataatttgtggagtcgggtagagactccatcttctatcttaagtatctggcgcttgtgggggaattaagatcctaaatgagaatactaagtccttcggcagttggcactaatcaattactcattactgataacggaatgagccactggaaattttaaaaggaaaagtacatgggagaacctgatcaatttagccagccacttctggagtgccacagtcactaatgaagcaacctccagtgcaggccctggctccagggcgctatgtacaacctcctgcctcgcgcaacgtgggtctcccggagcctatcctgccagcgccgcgcacggtcccagtccaccaggccgccaaggcccggaggggggcgccctagtcgcggggaacactggaaatgcttcaggggcggactccgaagaccgagtattgcctcgagggactttctgcgccaccccgtaatcgcttgcgctccaggtcttcgtaggtgggggccgggtgggtgaagactgggaccctatgccacgcgcagcactcagaggagggctggggtcccagggccgcagcgcggtcagttcagtccgggctcgagcttcctagcagcgccctccttgggggctggccctgaccctcggtgccgctacgagtgggtggccagaagctggtggtggagagggagagcgtctgcaaggaacgacgaggctggcgccgggaccacgcggcggaggcgatcgaaagagaaacgaggccaggcaaggaggaggaaatccacccgatgaaggcgagctgccgcctaagagggaggagggtcctttcggctgccgctgctgctgttccgggacgccgcctggggagccagcccgctcgtaaggtgcgcgccaggtagctccgcacccagggggcgcccttcctggcccctcccagagcggccgggacggaaggagctgcgcggcgcggcgcggcgcggcgcggcgggtggcgagggcgggctgcaccccgagcgcggcgcccttgagctgcaccgcggcgcaggtttgcgagccgacttgtcagccggccaagaaaaggaagctccgtcccttcccgct

SEQ ID NO: 37096 - DNA, 2300 bp, Homo sapien
ggacattcttcaaggtactggagacacaaacaaattagacttggacattacttcgagatgctcaaaatctagtgtaagagtatggtttattttttatatgtttagttgtttatattttagaaagcttcacaggtgggatgaaatattttacaatgctataatcatgtatggttaggtaaggagcaggtaatagctcagtttgtgtgtgtgtgtgtatgtccaaggtcactgtaaatagtttaccccagctggaaccagcctttctccctcccagagataccacactatttttagcttagattggataactctttatatacaactctttgccaaggtcccagctgcttcatgtttgcttactttgatattttattaacgcctatttagcatttcaataaactccagaatgtttccaggttactttttgtagtattacgaaaaacacactgatcatttaggcactgtattaggctgcattcactcaacatttcctgaatgcttaaataccaggtccttgggatacaacagcgaacataacaagcaaaaatttctgccctcatgcagcatacattccagtgactacatatgataaaaatccaaaataatagaggccacactggtctggatcctcaagtgatccgcctgcctcggcctcctagtgtgctgggattacaggtgtgaaccaccgcgcccggcctgcaaaagtcttttaactggcctccccatctccaaactctatcctccatattagtgttgcaggactttttaaaataaaaccttggtcatttaatttctcacattagaaaacttccactgtttttcactgtttacagtagaaatccaattctcttagtatggtatataagactcttcatgatctagccccagtaaaacactctacagtctccccacccaatatttttttcaccgtatcccttccatctggccaggctgagtcctggcagccacgaccccctatggatcatgctggtttaaatctcctgggttgctcatgttattcctgctcctacaaagatctccatcttcttgtctacctaaagaaaacctactcatctgtgtgcaatcaccataaagacttatctctcttctgcagcctttcctgcaatttccatacctctggcacggacaatcaccttttaaaaataccccatataaatttatcatagcctctacagtattttgattacacttaactaattacatgacttctcttttagtcttcttctctaatctcttgaggccatggaccatatcccattattttgaatcccaaatgcctagtactgttcttggtatatggttaagatgatcatacgacttggtttgtgcctgttgacctggcttaataattacaccctctttactctcaaaagtatcttggtttggcagataaattatatttggtcattctccacatagtatatgcctggcaataaatgaatgaatgagcaccagcatctgagcacttattaccatacaatatatacatgtatagtaatactttttaaaaaagttgtatatgatgatgtgctgcttttttgcttagcttcattagaactggccagctcctttttctcacttgccaagcatggggagttggtttggagttggtgtttcatcttttccagttacagtgtgaaagtagcccaccagcccacgctcttattcctaaagaccgcagtgactccacggacttaagttctcattgcttccagtttccttgggcaacgcagcacgcaattttggacgcgctgcgtggtttcagagtcggctgtaacttttctcactttataatcatcaggaaaagttcctgatgccagtcttccaaacgctcaatgaaataaaaaccagatagcaccgcagaggaggctgagatgcaacgacaaaagctgtcgtaattattaataatacctaaccctggatcactcccctgatagatctgtatctttgcagcaggcgcaattcagtttggattcacccaaaacaaaaatggtctccgtcggagtcaacgccctttcctgtgcggaccaatcagaatctcaaacacagggcacggggcccacacttccgtccggtctgcctggtctctctaaccgcgccagtgtgcctccgactcggaacggcttccgcggccggggcagcgagggccgggggcggcgggcgggatgagtgcggtgtgcggtggagcggcgcggatgctgcggacgccgggacgccacggctacgccgccgagttctccccgtacctgccgggccgcctggcctgcgccaccgcgcag

SEQ ID NO: 37097 - DNA, 2300 bp, Homo sapien
tcagaaccaaatctaatcatcttttactgaaacaaaacaaaaatatacaaaactacttctactctattaatattttaaagaaagctcattatataggagctacatgttcctagcatggacagattcagatattcattcactaaagattatcttaggtggggcatggtagctcatgcctataatgccagcactttgggaggccgaggcaggaggactgcttgagctcaggagttctagaccaacctgggcaacatagcaagatcctgtctctatgaaaaaaaaaaaaaaaaaaagagaaagaaagaaaagattgtttacccaaactttgaaaaatacacacacagacagagactggatgggtggctaccactgggaaggaggggttcagatttgggaagaggcttctggaatgcaagcgatgttctgtatctcaacgtggatagtggttatacaggggtagtcacttctggataactaattgagctgtacacttaaaaatatgtgcattttaaaatataaatttacatttcaattaaatctaagaaacataataatatggtaaaacagagatttttaaaagaaacataataatatggtataagagattctttctcaagtggggaaactagaggtaatcttttttctttcttctaaatgtaatttccaaaattttgtcatgaggaaaacattaaagcttattaaacatacagcagcgacatctgaaagtggtagcgtttactttaaaagagattaaaataataaataactatgcccccaaaagaatgtataaagatatgtaaacttgtatccagcttataaatactaaactaaacatcactgagcatttggaagagcagaattgatactgcagaacacaaagtcaggaattctaaactaatatagaaattccagttatataaataggtgtattataggtctagaatcacaagtctacaaaaagaaaaagagtatctaatttagaaataagaaggataagaaagaaaagataaaatgtcagaactgtacaaatcatgatcagaaaaaaaaaattttcaaagaaaacgatgccttcagcctggttaacaagagagggcatagagcatttctcagcaattatccttaaagaatgaccccagacatttatttgtcaagttttaaacttttaaagacaagatcttacattctgttaagaagaaaggtggtgtaatatatgaatgcccttgacctcatttctcagatctctaagaaaggagaagctaaaaagaaaaagaattatacacagaagaactcagataaatctcttttaagactgagaatatataaaaacacagagccttaaagtaacatcagcaaggtcctacagctgctaagatcacaaaagacaataggtatatgaaagcagatggaaagacactaagaggtgagagaaagatactttctaagggaataaaaaatgatcaaagagtaaaattaaattaacttacaatctgtaaatctgacacattatgagactaaaggataaatatagtatgttaaaaataacttggctgggcgcagtggctcacgcctgtaatctcagcactttgggaggctgaggtgggcggatcacctgaggtcgggagtttgcgaccagcctggccaacatagagaaaccccatctctactaaaaatacaaaattagctgggcgtggtggcacatgcctgtaatcccagctactcaggaggctgaggcaggagaattgcttgaacccagaagacggaggctgcagtgagccgagatcacgccattgcactccagcctgggcaacaagagcaacattccatctcaaaacaaacaaacaaaaataaaacttaaaccacctactataccaacacaggttagtgtggcagattttaagtgactatgaattcttcacaggtcctcccatcaaacggtacagtctatttcccactctttgaatctgggctggccttgcaacttgctttgcaacagaaggaatgctgtgtggcttccaagtccaattctcaagatgacttgcagcttttgctcttgccctcttgtaaacacacaactgttaagtgcagagacctgggcatacctagagacacacggcctggaagacaaccagcactatccaccagacacattgaacgaggcctaataggaccacccggccctagttaagccaccagatggctggaaccacatgggtggccacaggaaagaccaaaagaagaactgctagggtgtgtctggtccaaattgctgactcacagaattgtgagcaaataaaattgtt

SEQ ID NO: 37098 - DNA, 2300 bp, Homo sapien
tctagaagcagaaatctgttatttgctgatatctgtaaaaagttaattttcagagttttgaatcaatatattttgactataccacacacatacacataatttgaactggtgcttcagacttcattatttcctaaataacattaactctacaaaaacagagtcacttaaacagccaatagtgtgtaaccacaagttttagcaacaaaaaccaagggctccccagagaaccggaagcacgtgtttcagtataatgctttccagctattcctggaaagttggcaccctgggccattcacaaactttttttgagtgcccacctgtcgggagcagggacgtggccctcctaggcaccgggcacataagctggtggactggttgaccccgagctctctagagctcaccaaagtgagcatccagagccccaaatgctggcccaaatgaagggctgctgtgatgctgctgatccctgctgtaatttttttttcttcctctgttgcggtaaatcacgacttcagcactttggctgaagtgtcgcgttcagcacagaggtggaagtaagaggcagaaaacagaagaaccacgagagaaatggatcctgtctattaaggcaacgtgatgcagcgctaaaaggttaggaggttacgattcccggggctaagagaaataaactgctggtggtgaacgaaaggggtgctggagcgcagcgatctcgaacctttcccttatagccaaaccctggccaaggccacaaatttcaaatcgcctgaaaaccaaactgtctggcgcttaacggttacctcggctgagcgaaacccttggctgctgctgatttaactacaggtccgcgcgagttactttccagggaactgaattcagaacaaagagttaccgaagccttactccctctccaaaattagaattccctttttctcttagtcatataggaaacacacagttcacaagtcctgtggtgcaaaggtgtgaaccctggcccagggaggtggtgactctccccgccctccgcctgccggttgtcctgcttccgaaagcaacccacgacggtcccgcagggtgagggttccctgggatcagttccctgggatccggagaacgccacgcggagtctccctgcagggtgaggggccccgggttcccgccccctccccctctactctcccattctgcgagcgcagccagcctcccctcccacgcttcgggaagcgtcgcccccgagctcctcggttcctggtggtggctactcgtgttagtgacttcgtttctgcgcgtttgcttattttcatctttgcctcagttcgaatgtgtccccgccaccaggccccgctgctgggcgagaccactgaaccccctgaaagcttccccggagccgcgcgcataatcccgggaccctctctggaaggcgtgcggagagcggtgcgcgtggcctggcaccggaaggagccagcttccgggctccgaggcaccccctggacagcgccccgggccgcgggttcctcctccgatgcccgggcgtcgtcgccgggatcgggagcttcgggggcccgccggcaccgacggttttcgcttccctggcgggcagctggacgaggtcccgccgctgcaccgggagggacagtgggtggaaaaagccgctgcagcgccggggcgagggggctgggggcgccgtcacttgttgcgaccaataaacggcgctcgatcctgatgcgctgtttctaaaatctttagctgtgtcccgatccctccaacccaagcccctcggccaggaggaaggggcaagcgagagccgctggctctgtggggggagaggggcgccgcgccccaagagcccccgtcccgccctgcggcagccgccccggggcgcccagccgcccgcttccctccgcagagcgtcttccctgacggtgaaaccgcgcgggacacaacccaccgcggctcatcacccacttacaaatagctgtcgctaggattcccgccactcctctcagaccggcccccccgccacctctgccacttttcggagtcccccgccctcgtcactgcctccccggagctgcggggcagtcggacgcagagctgcctaaccgcaagaacgcctggccggagctgccctctgcagccgagccggcgccccctgcccttcgccgccgcgctgggcgggcgcccccgccgccctcactccgctgctcccggctcctcgcgcgcaggtcgcggagctccgccaccgctgggtgcggcgaggccggcgcgatgcggcagctgtgccggggccgcgtgctgggcat

SEQ ID NO: 37099 - DNA, 2300 bp, Homo sapien
cagaagggcatgaccttaaaaccttagctttactgagaactgtcattattcaaaataaacaaatacctgaactctggtaggaaatgaggaggacacgtgattcacacaaacttctgaaatgcaagcacctttttcttattcacaggtaatatgcattaataagtaataagatctcaggcaggcaaacaggttgtcccactgataaaaattacgtagtgtaaacaaatccctcttttaagaaccagctactagtttatctctgttagctgattttagcatgcagggaagaagggttaggatttttcaaacgctctgtctttacacttcagctgattgttcctttctgtaataagcttgccttggttacaatcgcttagtgaccattagcaaatagaatgtgtttgcttttcctaaggtccatgtttcctgccagcttgttgccaccagcttccaaaataaaatattgtgaaattacagattgaaacaacactttcacgtagaagcatctttagtcgaggcatcatgaggaactttaaacatttaacctctgggagaaaaaaagagtataaacatataaacagaagtatagataagacattcatataaacagaattatagttaagtataattaaggtgtttcttgactgggcacagtggctcatgcctgcaatcctagcactttgggaggcctgaggcgggaggatcacttgagcctaggagttcgagaccagcctgggcaactaacaagaccctgtctctacttaaaattcaaaaacattaacctgtgttaatgtttttggtgtggtgacaagtatctgcggtcccagctactcaagaggccaaggcagcaggatggcttgagcccaggggtcaaggctgcagtgagccgtgatggcgccaatgcattccaacctaggcagcaaagcaagaccctgtctcaaaaaaaaagtttcttgttagcaacccacatcaactaaaccctaggctcaaataccaggagtgttgtgttcattttgagcagcacctttaacaagggctttagccaaccagaaaacaactttaaaaagtctcaaagccaagacttaaggggaagtgcagagagaaagaatccaggacttagtgaacccctggtaaccatatgcaaaggactttcttgcaaacgaggacattagatatatatgtctgttgcttcagagaataaaattaggacacatatttgggagtctctggaagacagagttcagttctgagtaagggagggtcttctataattaagtggcagctccgaggtactgagtttcctgtcactggaaaggttcaagtacaggctggtttctgctacagcttttgtagacggattcctccacagggttgggatttgggatagatgagatctaaggtccctttcacttctaaatgcctaatatgaaatatgaaaaaacaatatttgaaatcttttttttttttttttgagacggagtctcactatgtcacccaggctgcagtgcagtggcgcgatctcggctcactgcaacctccacctcccatgttcaagcgattctcctgcctcagcctcccgagtagctgggactataggttaataccaccacacccggctaatgttttctatttttagtagagacagggcttcaccgtgttagccaggttagtctcgatctcctgacctcatgatccgcctgcctcggcctcccaaagtgctgggattacaggcatgagccactgcacccgccctgaaattacttttctttcctttcctttttcttccacacaattgactagcttgcaactcattctctatttttcaaatactgccatagacatgccctttgtgtacagcgaagaggagccaagtaatactcatctgatatagtttggctgtgtccccattcaaatctcaacttcaattgtatctcccagaattcccatgtgttgtgggaaggacccgggggaggtaattgaattatgggggctggtcctttccgtgctattctcgtgatagtgaataagtctcttgagatctgatgggtttatcaggggtttccacttttgcttcctcctcatttttctcttgctaccaccatgtaagaagtgtctttcgcctcctgccatgattctgaggtctccccagccatgtggaactgtaagtacaattaaacctctttttgggtatgtctttatcagcagcgtaaaaacagacaaatataccatccttgaatgggacacacaggagcccagaagttcctccctgaggagtcagcaccagactgacacctctgagt

SEQ ID NO: 37100 - DNA, 2300 bp, Homo sapien
gcagatatgggcaaaagaaatggctgaataaatcagaatgcagaaatatcaatagaacctactgtgatctttctgctgaaacttctgactacgaacaccagtattatgccaaagttaaggccatttggggaacaaagtgttccaaatgggctgaaagtggacggttctatccttttttagaaagtaagtaatgccattattgcaatggtcagttaaacatgtattcatatcaggtttaacagtctcagcctcacagacagccttgcccagaggaaggtactctgcttggctgtattctggaccagtgggttgagtgagcaggacaaagtccttaaccttgctggctctgagtctcaccttgattgactgattgattgattgactgtagagacagggcctcattatgttgccaggctggtctcaaactcctgggctcatgctatcttcccacctcagcttctcaaagtgttagggttacaggcataagccaccgcacccagcctgagtctcatctttagagtgaaaggtttaaccaagtggtctctaagatctctcccagatccaaaattgatactagatgacaatgatatcaaattttgactttgtcttactactttgtggaagctatgtaatttgaggaacaaaatgactttatttaatgtgggtttatggactattaatgtctccacaagattgattaaacattgtcctgattatccactatgcttcttcttgtatgaacttggtagtgtgatgatgtaatttccaagtgtaacccagaattaaggcaacttcttcctggtatttacttttaaaatgttgccatcccctgagctatggctgactcagtcatgaaggacccactcagggctgccataatgagctctgcaagtgctccataagtccaggagcccttccggatcagaggtcagaaaactacccttgggacaaatccaacaacaccctttctgtttttctacaagccaagagttaagaatggtatttatatttttaaatagtttctaaaaatccaaggaatattttgtgacattggaaaagtaaaggaaattgaaatgttgatgtctattcataaataaagttttattggggcacaagccacactcatttgtttacacagttaccttagattgctttcgcaatacagcaagagtggagtagtgcaacaaagatcatatggcctgcgatgcctgaaatatttactgtccagacctttaggataaaagtcgcctggtctctgttctagatcattctaatcacatctctgattttccacttatcaagtcatgttgttgtcatttatcaccaacttttcaagtcacagaaatcttacaaacagttttgattgtattaaccatctactgtttatgcatgtgactaaggaaacagaatacttgagtttgctgttctaacatgggatcaggctgtgtgaaggttggtttcaaggttggtttcaggatggtttcaagatctggcatatctcaggcccaccttagtacattttggggcatctcctgtaagaaggtgtcttttaaggctgggcgcggtggctcatgcctgtaatcccaacactttgggaggccgaggtggacggatcacaggatcaggagttcgagacaagcctggccaacatgatgaaaccccgtctctactaaaaatacaaaaattagctgggtgtgttggcaggcacctgtaatcctagctacttgggaggctgaggcaggagaatcgcttgaacccaggaggtggaggttgcagtgagccgagatcatgccattgcactccagcctaggcgagggggcaagactccatctcaaaaaaaaaaaaaaaaaaaaaaaaaaaaaggatgtcttttagggccttgatccaagtaggattatatggtagctttacctaaggtaatttttcatctgaacatgataataccctctttctccccctttaagcacaaattggcccaccagaggtggcactgactacagatgagaagtccatttctgttgtcctgacagctccagagaagtggaagagaaatccagaagaccttcctgtttccatgcaacaaatatactccaatctgaagtataacgtgtctgtgttgaatactaaatcaaacagaacggtaagcctgaaatggaatggggcatacattcatgtaccactctgtagctaatgtgggaacaaacaaccctgatgcattgattctctgcatgtgaatctgggaagtcatgatgttcaaaagatacgccgcacaaaataaagttctatatacagaaatttta

SEQ ID NO: 37101 - DNA, 2300 bp, Homo sapien
gaagaagctgggaactagaaacaattgctcctagaactagctgtccctgccagggtaaagaggcactgtggggccttagtgacaagaacagcaaacaaataggaagcaagtcccttctttcctcatccagctttcaggattccttcagggccccttttggtggaaaggaaaagaaccagctaacaaacaagaaaagtggtttgaagaggcctcacgtcagcaccacgaagctaacatcccagcctaaggggccctctgacccagattcctcctctgtttccaagtctttcaggaaggaaaaagtagcatacttaggcgactcagaaaatcctgccccatcttctatctccttactccctcctcaccaaaaaagatcttttttaatactgaagaccccctttaaaaagaaaaagaaaaagaaaaagaaaacaatagttgctctaatttgagtgtcgtttccctttattggagcatttgaaaacagacatttaagggcaaaagagatggaacacatctgaggtaaatcgtgtatctatcttcaggctgtgcccaacctttagaaccacctagaaaggtacaaagctgagagcctctctcagatttttcatatagtatttcaagactcacctcttaattgcacccttcccccctcccattataaagagcatggaacctaggacccaccgccttgtgtggaagtccacacaccactggtcacaggccactcacaggtttgggggacttcatgatgattcctagactttctgagtttcccttgcctcatctgaaaaaagggccaggacctaactgcaggttgtgagagttgaatgaaatcaaataacaacttttcagtcagtgacagactgcatatacaaaggtggtctcatacgattataatagagctgaaaaaattcctattgtctctaaagaccttccaggaggacaggatgtgaggtggcatcagtggcactgacaatcctgaccctgtgcaggcctaggctaatgtgtgtggttgtgccttagtttataacaaaaaagtttaaaaagtaaagaaaaaataaagaaaaagaaaaatttaaaaatagaaaaagcttatagaaagaatacaaagaaaaaatattttcatactgctgcacaatgtgtttgtgttttaagtcaaacgttattacaagtcaaaaagtttaggtcgggtgtcgtggttcacgcctgtaatcccagcactttgggaggccaaggagggtagatcaccggaggtcaggagctcgagaccggcctggccaacatggcgaaacccagtctgtactaaaaatacaaacaaattagccgggcgtgggggcacacacatgtaatcccagctactctggagggtgagacaggacaatcatcaaaaccggaaggcagaggttgcagtgagccgagatcgcaccactgcactccagcctgggctacagagcaatgctccatctcaaaaataaataaataaataaagtttaaaagatttaaaagtagaaagtaaaaaatcatagtaagctaaggttaatttattattattgaagaaataattttttaataaatttagcatagcctaagtgtaatacagtgtttatacagcctatagtagtacacagtgatgtcctaggccttcacattgactcaccactcacagactcagccagagcgacttccagtcctgcaagctccattcatggaaagtgccctatacaggtgtaccatttttaaaatctttcatactgtacttttgctgtaccttttctacgttcagacatgtttagatacacaaatatttaccattgtgttacaattgcttgcagtattcagtatggtcacttgccgtacaggtttgtagcctaggagcaaacaacagcctgtaccatatagcgtaggcgtgtaagaggctataccatataggtgtgagtacactctaagatgttcacacaagaaactcgcctaagacatttctcaggaggtaatcctgtcatcttaaatgatgcatgactgtaagatctacggctgagtgcctaactgtatatcgagaaataacgctctatttcatccgtcttccgatattgaactttaactgaccatcagaccggcctgaataccagaatctctttgcaatgcactcgcctcgctcattaccagaaggaggttttacctgcctagtgacctggttggtctgggcatgaaccccgagaggtggaaactctcagactctcaggactgacagccgagtggctggggactataaatccgcgagaactgccctcgcgctgccatcc

SEQ ID NO: 37102 - DNA, 2300 bp, Homo sapien
agctgactgcaacattgcatgattttgcaaaggtcattgttgcccatgagtgtctgagctcgtgagtatctgaccatagtaacctcacagtccacagaatctcagccccttcccctcaggactcctacttcagaccataaaaagcagaaaagcaccttcccgttcctttagcttaattcttgtaaattcatggcagttgctaaaatcacattccttttttttgattcactagacatgtgataagggcttactgtgtccccagccttgtcctaagtgctagagttaaagcagtgaacaaaacacataacatccctgacctcgtggagcttatatcctagttggggagatagacaacaagaataaaatgaaacatagcctgccaaatgatgataaatgttttggaaaacaaacagataaaggtgccagggacagctgttggggactgctattttgggtgtcatagaattcactgataagataatatttgagcagagacatgaaggaggtgagggagtgagcctggacatctcaggaagagcattggagcagagggaaccttgctaatgtagggatgtgcctgatatgtttgagaaacagcaaaaagaccacccaggagggagcaccatgggttgggaggagagcagtaggaaataaatttagaggtaacaggacctggttatatagggcttagtaagggactggaaaaatgttgactttcaatctgagtgagatgggaaggcatcacagggttctgaataaaatgttctattctgacatttaataggaacactccacctgatgcagagaacagtgacagaggcaggcagaccagtaaggaggctgtggccacagtccacacaagagatgatgatagcaggttaccaaatgggtacagtggaggaggtgaaaaccagttggattctggttatgccatgaagatattttcaggatcaaacaatacatacaaacatactggtgcatgggcataatgattgatgatatctggtaggggtttcaaggtgaccttgggtgaagaataatcaaagctacatattgggtacaatgtacattactcgggtaagagatgcaataatatctcagacttcaccactgtgcaatccatccaggtaaccaaaaaccacttgcactattgcacagctactgaaataaaaaaaatacatattttttaaatgttaccactcctttatgttttggttttcagaaataaattttaaaaaattttttaaagaataatcaaagcaaaatcaatagcatcttttatccagaaaaataagagtgaagagcaggaaaggttaacctcattaagccctatgtcctatgagtggagattttaaataatatattagtgatcacagtccaaaaactcagattagtcattgtgcttatcacctgtgtttgaataacaatgtttctttttcttttctgaattcaagttcacaaaccattttgaatttttgcatgccaattatttccagaatgccgaactgcttaaaggacatgaatattactcggtggagctattaatgtcccagcaaataagaaagaacaagttgtttccctgttgttggctctacagctctatagttttccagagagggagaagggtggtgttcagattatcattcatgatgaaacttttaaaagatgctcagctgcccaccaaatcataggatgaaggaaagggcctagcagaaacacagttgctctgacttcccttcaatggacagcaccaaagtcatactgaacaccagtttttaaacacttctctgaaaaacaataagaaacacttagccctttgctaccaagacctggttgaagaaaatgctgttggttccctgagggctggctctgtagtcttgttcatttctgcatccccgatgtctaacacagtgcctggcatataacagttgctcaataaacatttgtttgactgaataaacgattcgagaagccaatggacaaatgttctttgacatcattctatccctttatggaatgtctattacaagcaaagaataacacaagaggagtttcataatactcctcaggccctgaggctaaccagatctgatttcagccctcactttaccactactcgctatagagccctggtcaagttctctccacctctctatctatgtctcagtttcttcatctgtaacatcaaatgaataataataccaatctcctagacttcataagaggattaacaaagacaaaatatgggaaaaacataacatggcgtcccataattattagatcttattattgacactaaa

SEQ ID NO: 37103 - DNA, 2300 bp, Homo sapien
taacactgaccatgtgaatacatttagtttttatttgcttcatttagcagaatggctctaatctaggatttttcccagtacacctccattgctccactggtaaaatgaggattttcttcctcattggcggtgacgtaaagtaatattaatacttctgtttcccaccagctaaatttctggacaaatgaataggacaaatgaacatttgttagtttaacaactaacaataaacattcctgcaatttgagtttttaaatttaccatttttataaggaatataacagatgcatagtatcgtgctgtgttgaagtaacaaattgacttattgatagtaaagctatttttagacatgttcaagtcaatcatatatatttcttcagttgtttgaccaggactaatatggtgattttttttttttttcagattaaaagaagctgtgcattttcactgttttcttttttcatctagatccagtataaaatactcacgcagaaggaagatgattgtgacgagattcagtgccagttagcgattccagtatcctcactgaattctcagtactgtgtttcagcagaaggagtcttacatgtgtggggtgttacaactgaaaagtcaaaagaagtttgtattaccattttcaatagcagtataaaaggtaagttcttgccattttttttctaaatatagagggagcagtaactaaaataggatcatgtgaggaaagcaaactcatttgcagtttcaaaagatctgttttaacaatattcatttgcattagttccattccttagagaagttcaaaattaaaaataaagcagtttctcacacatttaaagatatagaacaactaatttggaaagccatgtgatggccccttgacccaggaaagaaaaaatatataataagtacataaaactacacaaatgtttgcatttcaggattatgaattataagtcagtttgttacttcaccatagcaagatgttgtgaatccactaaaatgttctttatggggattgtaatttaaagactgaagagcaggaacgatcactggttacaactgtatgacgtggactggacaaagactcgagattaatatccaaaaaagtttatagatgggtttgaataatagataatgggtcatttttataacattttacaataattaattttatttcatcttttaatgtggggggtggggaggtagagatatatatgctagaacttgaactttagaactgttactctcaggtgtcaggaaccttaaagaagtttggacttttctttgcagttaggaaatgtaagtgttcattatagataatttataaaatatgaaaaaccagaagaaaacaaaataatctgtagttctaccatgcaaaaataccccattattcacagtttgatattttctttagtttttctacatagacatgatcatattgtatagtatatatgattttgtgtattgctttaagcatatattgtaactcatgctttgatgattatctttgtgtgtgtgtgtgtgtgtgtgtgtgtgtgtgtgtgtgtgtgtatacatatatttttttccttaggatttttttagaatagatttcataggtttaaaattttatgatgcaagtatattttcgaggaatggaaatataggctgaagagccagaacaaacacctaaaattcaatactaataacttcaagccattatatgaaggtttcaaataggtgatttaaagcagtgcaatgcattttatgctaattttcgttatgctatttgaaaaataaaacccttcttaatgctcaaaatttgaaataatgcaaatgccgcagatttgtttttagcctgaattatacactgcactgatagtatggccacacggtggcattgccgtggctcctgagcagcagccctgcctgcttgcctcaatgccttgcagccagcacttgctcagcccgtgggacttctaacagcactaatgttggttttgtagttattttcctttttacttttgtaatgatttaacttttttcacaccctgtaataagcgtaatagaagcattcattagtaacttccatagttagaaaattctgggtaacaaaatgccctaaaggatgccggacattgtcacagtatgttagagtgctgttaatttggaagagagaactatgaaaaaaaaaaaatactgaagattgtgctgcaaaaataaaaggcagcattacagcaaagtacacaatggtgattctagatgtatgtgcttggaaacaaatctttcctattttatattatttatgtctggtttataac

SEQ ID NO: 37104 - DNA, 2300 bp, Homo sapien
aatgtagactaagttaaattcctgtttatactcctttaatctcttcccattgctctccttgggaatgatgatcacgatttcagtacttgtgtaattccttgtttaacagctatctccctcagtagacagtaagctccgtgagggcaggggccatgtctgtcttgctcaggtctttatctctgtgcctggtcatgtcagtcacagacagtatcacttgataatattcacccaattaataaatatatttagtctccaaatgactaactagcaaagtcttcagaaggatacgtagggtggtgggtgctgtgattgtgaaacttgcccagatccctctcaggaacagaagactgggttctgtccccttcctgatgctaggagggctgccagtagacaccctcaaccgtcagcgttcctctggggaatgcctccatgaaagaaatggacagccccaaaatcatgacagttggtattcaatgactaatcagtgctgggctttaagacccagcccctcataccaactcaagacacctttacaaggccatcccaactccagagcgccccttgggagcctttactgggatggcatcacagatcaacttcttcctccgctctgcttcctccacctccccttcacagacgtttattccaagagcactccctaatcaatcaatgccttataccttaatctcgacctcagagtttactgccagggtaacccagcctgtgacaagtaccacaaaaatgtttacaaactggatatcatattttgtcctactccatagacgcctaaacggtaaagatcagttatttatccttgcatccttacaacgactagaaggtgtctttcatatagtggacatcagaaacacatcaaaggaaatattctccctaaacttagtctagattgagctaaattcttctgattcaaagtgtggtcctgttgaaaggggcaccagcatcccctgtgcattttgtccgaaatacaaaatctcaagacccaacctgaattagaactactgaatccaaatctgcattttatcaagatccccagatggttcacatgtatgttgaagtttgagaagtactgagctaagagatttattaatacaagtaaaatgatctggctgataatacctctagtttatatagtgtctttataaggattttccctctttaaaaattttccttaacactagtaatcatgcagtctttcactcaacaaatactaattgagtgccaagtaaagatgtcagctctacggagcttacattttagaaggagaagaaaacaaatatcaaggtgtatattatagtgtacagcaaggtgaaaagtgccatgaaaaaacagtagggcggggtaaggaggaggagaaggtgtgttgcaatttaaaatttttaacaaaagttcatgatactcagagaattgaaacaggtgagatcattagacattcgcatgtttgagcacaagcgctgaaggacttagcaatgtggctgcagtggaataggagagatgcaaaataacagacaaacccagagaggtaagagagcagacctcttcatgagaggctgcctgataaactgatttgacactgaattgctgagaaggtaatgcaaatagtttttttctccaagaacaaagtagttcttggtcaagccgatttgatttgggctgtgggaatctgcacaaaccatttcactagctaagtctcaggttcctcaaatgaaaaagcagggactggaaatggcttttgaagtctcattctcttctaaaaatgtcaggctccaagacaaccaggtgaagtccaagagttagtaaaataaggattgtggctcggctgtggcctaatgcaaacttgcacaaccccaggaaaccgaaaaaaactggaagaagaattgcagaatggggtgccaggttgaaagaccttaacctttgcactcaaattcctcccacacccagaagtccaggtcccgaccgcacgacgccgtgctcactgctgggtgctgcgcctgagtccgcctcctgcggcttcccggacttgaccccgcccacgccctggtcccgcctcctgccgacgccggcacagaccccggtgacggaagtgacgtaaggccggggctggagggcagtgctgggctggtcccgcaggcgctcggggttggagccagcgaccgtcggtagcagcatggctctcctctttctcctaccccttgtcatgcagggtgtgagcagggctgagatgggcaccgcggatctggggccgtcctcaggtaccgtcgttcgcggcagggctgcggccgggt

SEQ ID NO: 37105 - DNA, 2300 bp, Homo sapien
aggactagccactagcttcctcccatcacctgggactgcacaagttctggagcacttcccccctcccctccttttttaaataaccaggaagacttagtgtatgtcactatcttattggcgagtctggtgaattaagaaacattctttatgcttggtattaggaatgcttttggacattagtctttccacatccaatctaacctcttgaattaagaaactttccttccaccgagatgaaggtggtagaagaggctcctgtccaatctgcaagagcactaacttcctggccttgacgaagggctgttggccatttttcccccattacagaaaaacaaaattcggtgtagcaaaagcatccatgccaatgttgcgtttgcccatccttctggtattggccagagctgccttcgcagcgtgactgtcagtggggcacagcctcagagcgtgcaaactccggacctgggcgcgcatccctctcccactgaccgctcggtttgagtcaagggaaaggggggcatcctgttcttcgaagtgactcagcggcgcaagaggccccaagtgcccgaggttccgcgattgattcgatttcacacttccaccgagactctcagtcactagctagcgtttgtttcccgttccaccaagccgggagaggggcggtgtccgggttcttctagagaccactcctggggctctctcccttcccgggatttctgccttcccgcccctcgtgctgctgagctaaagtcttgatcacaaaaacacagcaagggggaagaaagatctacgcccacctccgcactcgcaccgaaggctccaaactccgacctcctctttattcccagaaacgactctgcgctgaaccgcagtgcccgggcacgcacaaggggctttctaggtcctttcgttgtttcccttcccccgtgcttctttgcccacgcaccccacccccccgccccaccaccccgacatcagatagtttattatgagcttctgatttccctgtccgacgccgtacggcggccccagcctggtggacccacccgcgcaggccggggtgccgctgagttcccggagctcggggcacgtcagcacagcggccagaggaggcccggcggagcttcgggcgcggaccgtcccaccgttttgcgccagcgccaaggtccaggaagcctggagtgggaacaatctctctggagctctcaggaacctaacaatctctctctctgcctccttggctccttttccttcccatcctcccaagttgcttttcttgtgacattaacatttttttttcgcagtttttggtctaggaagttaaagaattgtgcaaaactgaaattcttttagaaatccatgttttaaaacgaaagagaggacacagaaaataagagacctctccgccacaatactgccaggagcaaagccatcaccgaacatggacatcccgttgaaaccacaccagaagggcccaataaacaaaattgacagaatggaagtgtttaggaaaagagatctaatgaaaaaaaaatattgagacagagaaagtcggcatgcagtcttcccaccacccccagcccccgctggcagcaccttccctccgaccgcacctctgtccctcaaacctttccactgagacctatttttgcccatatttctctaaacttgggagcagccaggaaagaaaggagagcgaatgtttcaattcctctctccaaactcagaggaacctccaccaaccgcctggccaccttctcttgccttccttccgttcctgatgtgtgatttggttagagaaattgggaaggggggtggggtggaagaaagttaaaaaaaaaatcaggaaggcgtaagctggagcggtgagtgtgtcaatcagagggttttgtgcctgggggctcctagcggttcggagcagaggtgtcccagggcggccccacaatgaatatgaataggaatccttgctaaatgggacagcaaagcgcaccgccctgaatgatggcacgtcatcctaaccagcccaggatagataggagggctccttttgtctcttttctccgccgcagctctataaaagcccctctttttcagcgtgaggttagttcaagcacacaccaactagctgtccaggaagcagcctaaccagagagaggggcgtgggagggagagaggcggggaaaagcagcgtctccgcttttcttctcacgtcttgccgcggagaagtgggttcctgggcagtgcagattttttttttttaattcaagattttctttaatttcccgcctaaagcctccccacgg

SEQ ID NO: 37106 - DNA, 2300 bp, Homo sapien
aggtatgaacgtggcccctcaggcttgtcactcctctttactgcactcccagttcatgacaccagacagcaagacatgagccagataggggcagtggaagctgcaggaggattgaagtcatggagccagagatgagaggaaacaggccaactctgtttacaaaggagcaccagcaggagagtggtgtgaggattaacattccatgcagggtctttcagatacatgatcttcttctgccagctcaactgaaacccaggaggtttcctgaaggtgaaaccaagacccttctacctctgaagccgcattctgtctaaggtccgtgtttggctgttttgagaggctgggagacaggacaccaaaagagtacctgtctcacaggatctttcctgagaggaatggtctagtaagactggtcattatgggctttggagtaacacaggcttaatgccactggcgactctgccccttttggttgtggaaactgggcaaatgcctcaagcttcttaaccttcatataaaaagcatatataagcatatagcaagtacttgataaatgtcattttagaccctgtcatttctgctagccctggactccagcaaggtccatttacaatggatagctgactatccattgtttgaatgttgatagcacatttgtgaacaagaagagaggacaaataacaagaggtttggaactggaagaaattccagccatcggttttaaaagacgaggaccagtcttcagagaggccactagtgacactctgctccaaacttctttttgccaaaaaagtgccaccctccatccagcccccacccccatctctgcaagtccttactggcgagaggaggatacttttctaattaaaaacctgtgatatatggcctgacaagtattcttaaatgtaattaaggggaccatagtacagaatatttccatccggttctagtttagccaatctagtaaatgatccaaagggtcccgtgcttagagggcagtaagacagtaaaaacgccctaagactcctccctgcacagcacctgcacccccactgcccagggggctgcatccatctccacatgactcaccctccctgtgcaacgcatgggggtagggagggaagcgccagtattatcagccatcagcaccctggggtgaactgattatcaggacaactaaaaacacacctaataaagccttggagacacatggcaagcaccgtgatggactagaagcgatttctaagctgaaatgctgctttgaatgcaatgtcagctggatgcttggtgagcagaaatagacaaggggaaatggagcaagcgcggcataggggtgagtgttgttctgattcctaagtttacctaagactggggccacggggtcgggtgtcccctgggacctacgtctcatgcagcctggggtccagagctggcaggaacaatggagatggggaccaaaggctgtcaccgctgctttttctcgaaatgcccgcccgggtcctgtctggggctcccgcctacgcgctcatcacgtgcacagcccaaacttttcagagccggcccgaggcctgcgggcccgggcgccagggtggtttttagggttttctttctttcttatttcccttcttcttctccacagttgatgattttctgcagaaaaacaactgcgaaaaagaacctatttcatttccagttcccatcaccgcgatttccacatggatgtgacgtgaccccagcttccgaaatgcccaggtgactcacgcggggacaccccggggcggggcgagggagtttctccgggcgcctgcagggaccgggcggggcggggcagcggggcggggcagggaaagggggcggggcggggcccgcaggcccggtcgggcggaggccgcgcgcgcccctcgccccctgcgccctctggcggccggctggacgcacttcgcagcccgacccagagagtcacgtgactttggaaagtcccgtggaaatccccgggcctacaacccgcatacaactgaaacggggcaaagcagactgcgcagtctgcagtcttcgtggcgggccaagcgagcttggagcccgcgggggcggagcggtgagagcggccgccaagagagatcacacccccagccgaccctgccagcgagcgagcccgaccccaggcgtccatggagcgtcgcctccgcccggtccctgccccgacccccgcctgcggcgcgctcctgccttgaccaggacttgggactttgcgaaaggatcgcggggcccggagaggtaaccgccgcgcctcccggagaggt

SEQ ID NO: 37107 - DNA, 2300 bp, Homo sapien
gaaggtgaaaccaagacccttctacctctgaagccgcattctgtctaaggtccgtgtttggctgttttgagaggctgggagacaggacaccaaaagagtacctgtctcacaggatctttcctgagaggaatggtctagtaagactggtcattatgggctttggagtaacacaggcttaatgccactggcgactctgccccttttggttgtggaaactgggcaaatgcctcaagcttcttaaccttcatataaaaagcatatataagcatatagcaagtacttgataaatgtcattttagaccctgtcatttctgctagccctggactccagcaaggtccatttacaatggatagctgactatccattgtttgaatgttgatagcacatttgtgaacaagaagagaggacaaataacaagaggtttggaactggaagaaattccagccatcggttttaaaagacgaggaccagtcttcagagaggccactagtgacactctgctccaaacttctttttgccaaaaaagtgccaccctccatccagcccccacccccatctctgcaagtccttactggcgagaggaggatacttttctaattaaaaacctgtgatatatggcctgacaagtattcttaaatgtaattaaggggaccatagtacagaatatttccatccggttctagtttagccaatctagtaaatgatccaaagggtcccgtgcttagagggcagtaagacagtaaaaacgccctaagactcctccctgcacagcacctgcacccccactgcccagggggctgcatccatctccacatgactcaccctccctgtgcaacgcatgggggtagggagggaagcgccagtattatcagccatcagcaccctggggtgaactgattatcaggacaactaaaaacacacctaataaagccttggagacacatggcaagcaccgtgatggactagaagcgatttctaagctgaaatgctgctttgaatgcaatgtcagctggatgcttggtgagcagaaatagacaaggggaaatggagcaagcgcggcataggggtgagtgttgttctgattcctaagtttacctaagactggggccacggggtcgggtgtcccctgggacctacgtctcatgcagcctggggtccagagctggcaggaacaatggagatggggaccaaaggctgtcaccgctgctttttctcgaaatgcccgcccgggtcctgtctggggctcccgcctacgcgctcatcacgtgcacagcccaaacttttcagagccggcccgaggcctgcgggcccgggcgccagggtggtttttagggttttctttctttcttatttcccttcttcttctccacagttgatgattttctgcagaaaaacaactgcgaaaaagaacctatttcatttccagttcccatcaccgcgatttccacatggatgtgacgtgaccccagcttccgaaatgcccaggtgactcacgcggggacaccccggggcggggcgagggagtttctccgggcgcctgcagggaccgggcggggcggggcagcggggcggggcagggaaagggggcggggcggggcccgcaggcccggtcgggcggaggccgcgcgcgcccctcgccccctgcgccctctggcggccggctggacgcacttcgcagcccgacccagagagtcacgtgactttggaaagtcccgtggaaatccccgggcctacaacccgcatacaactgaaacggggcaaagcagactgcgcagtctgcagtcttcgtggcgggccaagcgagcttggagcccgcgggggcggagcggtgagagcggccgccaagagagatcacacccccagccgaccctgccagcgagcgagcccgaccccaggcgtccatggagcgtcgcctccgcccggtccctgccccgacccccgcctgcggcgcgctcctgccttgaccaggacttgggactttgcgaaaggatcgcggggcccggagaggtaaccgccgcgcctcccggagaggtaaccgccgcgcctcccggagaggtaaccgccgcgcctccccgtgccgtctgcctcgggctcaccgcagtcaagggctgcgggtgcatgttgggcagcgacccccgggctggcaccgtctacctggcgttggttttgcagcgctcctggactgggagtttgttggacgtttctgtctgggttttgaagtgctgggagttgaggtcactgctgcagaggttggagtgacagccctggatacctccagccagctgttcctttcagataa

SEQ ID NO: 37108 - DNA, 2300 bp, Homo sapien
ctgggcaacacggtgagacctaggtctctacgaaaacaaaaaatgaaaaaccgcaaaataataatagaacaataaattctatacttctaagaacagatattggagctcaatcattttaactcaactgccaatgaaattttatcatcaccctccaggtaccaacacagaggcaagtctgcctggcttttcaccctgaaatctttaagcataatcaactagtagaaggaatgaaaatctagaagtagacaaggaaagaagtttccaccaggaggccactctggcaaatgaaggaggaaaggtggcaaagaccagcatctacaacccatgccaacagcgcaggatgatgcaaattaacatgatgtaggatctctccagtgtggaacactgtaaaaagccagctgtgatttactagcccttagtagggtgtctggccacacttcctaatttccaagaagatgaagaagttttcagagcacaaagacattccctaggaaatttcacagtgattgttaattccattcctgcaacatcttatttgccagggcaactttccagttaataaaaatgttaaacctatggaagagggaggagaagaaacctagattttagggtagctacttctgtgtgggtctagactctcaacaccattgataaggtgttgagataattcttgtggcccactcaaaggagagaggttggactagatgacccatggtttctcctgaggagttttctggtgatagttttagattgggattcttaatctgattgctgggaaaggcatagtgggagtcattctctggatcagatggtgctctcttttgatgtcagacgtcctctacaggtggaattgggcaaaatcatagcaggataaaaataacacatatacctttcctttgtggcacagcaaaagtctctttcacaatatcatctatccgtccgtccgtccgtccgtccatccatccatccatccatccatccatccatccatccatctatccatccatccacccatccacccaacaagcactacctgaccacctactgaaggccaatcaccatgcttgatgatgggactaaaagtcaaagatgaccttattcccttccctgaaattacactaccaccttagtctgcagctaaggcaatggagttacaggtactgctcagatcccacagccattcaggggcaaagttttgcctaggagccaggtctttcaatacctgccccttgcaatcccacaacaccaaacctgtggctacagtgcctgccacaatcagatggaaagagatgggcagtaggaagattttaaacaaatgaggtgttatctctttttgcttgcctgactcttttatttttctcttctgaatctaaagatttttcaccaaagatctaaaatagtgagagctgtaaaccataggcaagacatgcaaatgtcaatatcggatacgccagtgtgatctcattggtagggttagccttgcacagcctgtaaaactgcctccttagaaatcaaaacccactgcccagatttccaggtcttggaccactctacgcttaagattaaagaacaaatgtttcagatacgttataagtggcaaacaatgcaatattacccttaacttttttttttttaacatttgttacctcactgtcttatttaaaggtagtttctcaacttttgtcactaggattccacagaacttctccgttactcaaactcttctcccccttgttttatttttccactctgggcagacatttttgtctgcattgtggaaattgatgaattatttatcaacaaatacctcatccaaatttggggatgtgcctctccaaaaaatcaaaaatagtacaaagaattgaaaaaaaaatcaaagcagcaccttaaacaatgagaatgaagcattcattggctgctcaataatctggtacattaaggttgcggtccagaagtccctttaattaacaatggttctgccaaaatgctaccctgagacacttgaccagactggctttccaaggcaagaagatctgaggcgaggagaaccgaaaacaaagcgggctcaaaaagagttaagctccttccttacttaatgccactgcttttctgagaggccaggtggcaggatgtgggacgactccagctgacaaagacagtctaaccgtggggtaggggctggagcaggggccagcgacccacgtctacatgcatacttctcttacactgctgctactggaaaagctgaaccccgcgccaggaccccagccccctgcaaggacccgtgagcgtctgggaag

SEQ ID NO: 37109 - DNA, 2300 bp, Homo sapien
ccatcattttatgaatatggctaggatgaatgattgcattgtctcaaataacttagtcacttacagttggtattcacctatagaatttgccctttagaaacatggacattcccctctttcaatgttcaaaagtggaaaacctatatgaaaaatcatcatcatcatcatcaacccttactatatgcaggaactatcttgagcactttagatgaatttgctcttttaacaatcattaaaacactgaggttagcactgtctgtcttacagatgaggaaatggaggcacaaaaaactgaactaacctgcccagtgtcacacagcgaatatgagaaagcgtgtaaacctgaaccatccggttccagagtctgtaccacatgttgggtatattattgttggaaacccaccagggtcaatgtggtctcttccagaaattgtgaagagctaatctctttgtgttcacctcggcattaatgagctcttttcctcaagcccatcggaaatggtttcattgaataacgaaaataaattatatatatcaagtccaaaattatccagagatattaagatgcctgcaaaactctcattttgtctgaagccactttgcttctggtcagtatttgacttataagaatttttttttctcacaaatatattatacatagctaattaaacaaatatcttcattacttttgaaaaccctgagaacataaatatcaccattttcttcacacagcttccacgatacaaaattaacttttggcagaacaccctcttgtgttctttgaaagtgaaaatattttcctgtaataaaaatatatgacgtggtttatgtaaaacttgaattatgtaaaatgaaggctagggaaattatttcatgtattttcagatactttctccatgcttttattcgtcctcaagaattgccagaaaatggcataagtcaaaagagtattctgtttctattgagaatatcaaattggaatacaatttaaaatatttttaagtagttcccacttttatattaaattaacagaaaaaataggggattcagaagaaatctttggaggtacagggttaagacatgacccccatacgatgtttcagtgattttcccaaggccaccgaggtgcctgacactgagaactcctttgtcctcagcggcacacctggctgccaccccacccttcctgtcacatcttaggagtcagaactgcgacgggagctagcccaggacaccgaaggggggatcctaaatgcaggttgcatgctgacgtatgatttttatttggaaaaacctcaaaatagtaaatgaagagtagagagagtgcagtttaaataggtagagattcgtgataggaagtggactgcagcagaggcgacatgaaattatctggggaagccagatgaagcctttccgaaaggaagcgagcatttgttaaattacatgttcattcatcaaattcactgagctccccttgagatccaaacacggtgccggacactaaggatacacagataaattcagcatcgcctccgctttccaaaatctggcaacccagcaggaaagaacagcatgcaaagagataagagtacccggggagccacggtccaaggtgcaaaggcggagcctaggaggaagggatcacctgtgtcagcaggggtcagggacgggcttctgggtttgggtgcacgcgtccaaaggagtgcagcctttatccacaggtgcaattagaacacccatctcacactgctgaaaactcagatatggcactgctgaccaccgccccacgatgcgacatcaggggtcagatattaggctggcgctgtgcagataaacaagtgtatatgttggtgcgccaggaagacaaaacacgcgcctggagaggccaggagagcgggactggagggttgtgggacgcgcgggaccctcgggccgccttccgccgccgcccggtgtcaccagaacccagcctgtttaccagcggccccgcccgccccggcccggcagggcaggtcggggcgggcgcgctctgagtcaccggaatctaggtggggccgcccggagcggcgtcctcgggagccgcctccccgcggcctcttcgcttttgtggcggcgcccgcgctcgcaggccactctctgctgtcgcccgtcccgcgcgctcctccgacccgctccgctccgctccgctcggccccgcgccgcccgtcaacatgatccgctgcggcctggcctgcgagcgctgccgctggatcctgcccctgctcctactcagcgccatcgccttcgacatcatcgcgctg

SEQ ID NO: 37110 - DNA, 2300 bp, Homo sapien
aggtcaacagtatcactcgtgtgaatgtataagcaggtgagagagtggaataaggatttcaagggctaatactgcagatggcagtaatccacagatggcagagtaatatagataggcgaacatattgctgctttccaagggtcaacacattgaggatttccaaaagggtctttgttgctgctggacatggcatccaatcttgttgggtgcccttggtgagtaatgtgtaaatatttgtacatttttagctcatagctacgggatatatttcctcttccctgggctattaggctgtaagacttttggacccccatgcttgttccctgctattatgccctttcattggccaatctgactccaacttcaagtggaaagttctttcacagtggattaatcctggtggaaatttgattgtttcaggggtttacagatgaagttctgtgctgcttctgttagcctaccatctgcccttggttcctacttctcactctatcttcatacctccgtttaatttttctaagctcttaaactggttatcattgcataaaggaaacaaaattggaaaaaaatcagctattcctgcactaattgagtgcactacagtgtttgccttgtaattgtgacaagccgacagtaagataacagtgacaaagttacagccacccaactggatgtaacagagttgggtaatttatccatctgtcaaaggatgaatctaatgaaaaatggctgtagtgttaactgtcatataaaaatggatactgtaacattgggttgttgaggggcacggtgagggttaggaaggcaaacatttttcctgatggtctgtttttgtagtctgtgtggctggcattatattaaggagtgtgtgactctcgcttcatcggttatgaagctgctgatggaaggattccatggaaaagcagcagagctgcagagtggacagggagaaatcagagctataattaactttgtatttcattgtgttctacagcagtaacccttatttctccaatgatgaaatcctatagtctaatgtggtagctttcacactctaaaaatcaatatatctttcagtttatgctgaaaatataaaacagataagagtgggcctactctggtttaagtgggggtggagaaacctggtaaaatgaagtcacattttatttttgtgccagtgtaactccatagggaaataatgggttgattaaaattcttggtctgtcgtttaattatttagagtagatgcttctaacagacatttttgtctttgtaactctttaggtttattcctaaaatattttaatgcccttgttttccctaacctttaaaatatccaaatatctctcctttttttttttttttgtctctcccctgacactagataatgttgcatctaggcacctcttatcggccaatgctattgatggttcatttgtatttctgtcttggaaacatgttcattaagaacctgtcacaagactcagatctacttcttgatggagactataaagcaaatgttaaatttataaattgttgaattctttgagttgaggaggaattgacaaactaatagaattttgatgtatattgatgagacagagtgctgatggtgatgcatataatttccaggtaaggaagaggtagaagcaaggcatagaaatctacttaatgatgcttcctagagttgttcacccccaggtgtgctgggtgtgagcagtgctgttaatttgggaaagaacaaagcatgttcacagactggccggggtcccaatgtgtactaatgagtgtaccaggtaataattagtgaaagtctttgtgtttgctcttcctgtagccataccaagaaggcaaggggttgatgggctatcatttctgcacagcttctttgctgtgttttctcttaagcccatgtgcatttttattattggttatagtttttgtgtatgtgtgtagtggcatttgggggtgggtgtacataaggcttacatcacttgactgccagctttactgagctcacatgttgtccttatttttgtgtttgccagggagaaatgcctgctgcctctccagttggctttggaatccaagaatgtgaagctggcccaacatgctttggcagggatgcaggtatggctttgactgaatgcaatgggatgatagaaattgacaggccactttggcattgaaagggcaaatagttaacattttaaatactggctgtttaaagactcaggcagaaatttgattgaactaggaaataactatagagaataacaggattttcttatattcaccag

SEQ ID NO: 37111 - DNA, 2300 bp, Homo sapien
agactctagcctaaaatttcagtagaatgcaggatgcattttctcatagaagtaaagatataaattacagatagttgcttagggcagcctacagatttctctttcatccagaacatacaggaagtattctgtattggcaataaatacaatggaaataatagaaaaataaaaataaaaaattcttaattatgctaacattaaaactgtacttaaaggactacatatatatagatatatagagagaaccatgtggaaaatgcttatgatttaaagtataaagcaagaaataggttggctgcagtggctcacacctataatcctagcacttcgggaggccaaggcagatagattgtttgaacacaggagttcgagaccagcctgggaaacatggcaaaaccttgtctctacaaaagaaatacaaaaattggttgagcatagtggcgcacccagtaggctgaggttggaggatcacctgagacctggaggtcaaggctgcagtgagctgtgattgcgtgattgcatcactgagctctagcctgggtgacagtgaaaccctgcagaaaaaaagaaaggaaaaggaaaagaaaagagaagataaaagaaaaaaaatcctatacacacaatgaatataactataaacacataagtagatatgatgagaaatcagtatacaagaatcagtcaacatgatgggatttacaattaactttttctcttttggaatgcccataatgttaaactactagcacttctttaaattcatcttttaaaatattctacacacacacacacacacacgcacatctatgtcaaaatttaaatataaatattgagacctgataatatgaactcagtctctatctcttaaattagtcccgtaagaccatcactcaaccagaaactctggctgtgagtcctgcaggcaacttgggctttccctctcctacctactcactgcccatgtcactgccagtcaccagctgctccttattctgcaaaccaggtcagtgcactcagccacacctttctgcattcagcccaggtggccccttcctactgccacctacctggattaagtcctggtacctctggctcagcctcttccaataagatatttcacgatgccaaagacttggttctgctgattcctgaatcatcctgcaaacccatcctccccctcctcaccttccatgtttaacacccagctctgtctggatcacttgcctgcttacagagagcaggccctctagagcctcttcaaccaccctttcaggctcatcgtccactatccctcactaatctcagtttccatccccaggactttttttctctaccaagaatgccctctctcccaacataattatctgaatcccacctacctttcaaagtccaactcaaatagtatcccctccttaaaaggatgttctgccctgctaaacatgcttcttcctcctgaatgtgcctcctgaactcttctcctgattaaacatacacagctaccttgaattgtggtaattggctgcctctttattgctttcctactgaattataaacccttgcctttgaatattttgtttttaatcctatatagttttatgcactgttggcaacaaaaatatatttccttaataaatcaataaaaaaaggtctaaaaaagcaacaaatttaaaagttccacgacttattttttcaagtttaatctgtaacaagcagattttgacttaatctcacagctgggtttttaagaagtcaaatttcattggtatgccccagataacaccctcactccttccttttctctttccctctcagactctctgcagaatgagagcctcatctcaaattgtctctgcccatacaaacacagaacttttgatagttttattgtttatacttatagacctgaccaagcaagctcctcaagatagggttgttaaagggctacagccaacctgattctctacatctgaaacaataattacagagctcttctggaataatcaaatcataaaactctacctcgtaggatggaacagaaacattggctcagctaaagagtgggtgttttccttagattgtggaatcatggctgatggttaggaccttaaatatatcgaggtggctaattgatgtataataatttacaaaattattcttctatgctacagagctacaattcaatttacagtagtaaatatgagggccttcttaaggaaccagaaatatgaggatatgcacaatattattcacattttacagatcagaaaattgaggcacagattaagtaacttcccaaggct

SEQ ID NO: 37112 - DNA, 2300 bp, Homo sapien
cggatggtatagtctaatgagaagattgcaaataagcaaacaagtcatttatgagactgatgtctgctctgaagtaaatgaaacaaggagatgtgatactgagtactttagagagggggatctgggaatgtctgtctgagggggcgacatctaagactggaaagaagccaatcaagccacgtggcaaaacaaatagaggaggagccaaggacagggcttttcagccatgggaccaccactgtgtacttacaggggcctggaagacatagcctccctccaagcccagggtaggtcctggtgaccccactgtcctcagctttcatccctccctacctaccaaatcccagttcccaaagattgtcatgaaacaaaagaaagctatttcccatgaggccaagaggcagttgctacccaatccctttttctcaatcgccatggcactgagacaattttttttttttttttttttttgagatggagtctcactctgtcacccaggctggagtgaaacagtgtgatctcggttcactgcaacctccgcctcccgggttcaagtgattctcctgcctcagcctcccggatagctgggattacaggcaaccaccaccacacctggataatttttttttttttttgtatttttagtagagatggggttttgccatgttgcccaggctggtctcgaactcctaatctcaagtgatccgcccacctcagctttgcaaagtgctgggattacaggtgtgagccactgtgcccagccaactgagctgatttttatttggtgttgattcttggattaagtccctttaagaatcaaaagactgaggagcacacctgcaattaatacccacccttgtgactaaatatggcaaaaaaaaatcttttttacccccctttaattgcatacatacttgctttctctgaaggagcgactgttcctagggccggcctagctgacagctaagactgagagatggggagagatttcttgtcacatctgacaattgcagtttcctgtattaagtaaatttgctaggcttccatgctccttcatgaattgaacagatgagaaaaatgctcagaagactgcccctggcaggctaagctgcaggcagggcatggctgtggggtttgagatcaaggagcagacaccagcacctttgtgtctgttttctgcagcaagaaaagtcagagctaagtgaagagggagagagtagcctcttacctacaaattgagaagcagttcttaaaatgccacaggcttttattgatctgttccctaaaggctctacaagtagaaagtgaagtttttagtggtccttaaagatcttgcaaatgtcattgacctattgtctatgtatcttggaaaataaggggagtaagtaaacaccatgtaacattctggaggaaattgcaagagggaagaggaaaatgcaataaaagaatttctaattccgtgtggatttgggaaagggataggaatagaaaatgacactgacatttgagtttcagaagaggtggagatggctttgcctcgtgagtgagcacatggagtcggattacttgagttcaacacttgccacctgtatgaccttaggtaacatatttaatcatggagttctagttttctcaccagtaaaacgggggcaataataatgacacttatttagaaggtcaacctagataattcatgtgaagtgcctagcattaagcctggcatttttaaaatgactgctactaaacaactcttttgaggtttttgctgttactggacacacctcctggagctgttgagagatgctgtttctggccagtcttgcaagccctttccatggggagagattagcagcctttattttttacaggatggtctctactttgttaggcaacatgtggccactaatgagaaagcagtgggtgggatataaagaaatattaggtaaagcaaatagcaaaggaatcataaaaacaggactgcacaaatggcatatgaaacaacagtgaatttccatactgttaaccccttgtctcttctttcatctctcaccttgttaaaggttttactatgcatcacctacacgccaacatttgatctgaatgggagtgccgtgctgaagatcgcggaggtgagtactgcttgtgtctgtgcctcctgttcacagctgctttatctctgactgggataaatattggggtggaactaagccccagcactggagtgaatccttctctgattactaccgtggggaatttccgctaaggaattgatctgtgggaagcgtgctgtgtggtgcgcc

SEQ ID NO: 37113 - DNA, 2300 bp, Homo sapien
gaggccaaggcaggtggatcaccagaggttgggagttcgagaccagcctgaacaacatggagaaactctgtctctactgaaaatacaaaattagccgggcatggtggcacatgcctgtaatcccagctactcaggaggctggggcaggagaatagcttgaacctgggaggcggagattgcagtaagccgagatggtgccattgctctccagcctgggcaacaagagtgaaactcggtctcaaaagaaaaaaaaaattgtagatgactaatgagaaagaatgcagaaggtgacttcagatgtcagtaatgcaaaatgctaaggcaaggccaaaccacagtgtcctccttgaacaaaggtttcaagtcattgcatgtggtaggataactaagtgatggtccagaacccagaaatatagcaagccaacctcaaaggaatccaaaccatctcctaatgtaaggagcaaagtgatttttagcaaaacatcatttgtctcataaatgtgatactaattttatttatttatttgagatggtgtctcactctgttacccaggctggagtgcagtggcttcatcttggttcactgcaacctctcccaggttcaagcaattgtcctgcctcagcctctgaagtagctgggattacaggcacccaccaccacgcccagctaatttttgtattttttagtagagacggggtttctttcaccatgttggccaggctggtctcaaactcctgacctcaaatgatccgcccaccttagcctcccaaagtgctgggattacaagtgtaagccactgcgcctggctgttttatctatttttttgagatagggtctcactctgtcacccaggctagagtgcaatggaatgattattgctcactgcagcctgaacctccccaggctcaggtgatcctcccacctcagcctcccgagtagctgggactacaggcacatgccaccatgcctggctaatttctgtatttttagtagagacagggttttgctatgttgcccaggctggtcttgaactcctgggctcaagtgatccgctttcctcgacctctcaaagtactgggattacaggcgtaagccactgtgcccggccttaatcttattttttatttgtttttaatctgaatatcgtggtcttggttttgtggttttttttttaaagaactgtgaatgtaaggatttttatgtagttcatggttgtaaaatacttaagtaaaattgtgagactcctttttcagttaacgctggggatctgtgagagcgattttgttttcaaatgggtctctaaattttattcaagtctgagaaacacggacctaaattgtgtttctcagctaaaaatgtacagctgactcagtgacttgttactgtacatatctgatagtagttacacaatttggaccaagctggcatttttccttttgtttgctgcctgccttgtatcttctgttgctaccaggatggtcattcttttcccttagatccagataatcatcagcttcaccgactcactgatttcatcaagttaaaaatcagccatttctcgagttcacaaagctcagatttttctctgataagagcctcttcttcctgagcctcccctcatgaattttcttcgtctgcttaatttcccctttagaaaactggccaatctgccttccccactataacccgaagggtcttcaagtgtgcacttgtgtgaagtgccaaagccagtgactagatgacaggtgtgaacagttcagccaggtgggtccccctgggcctgctgcactttccttgccaccaggggtcagtatgtctctcattctccagagagatcttctgtaggtcacctacatggaagagacccaagcctgtggctcaatgggatctcgtgatcagtggtgtatacataccgggcatcacacacagaacaggcacgagtgttggctggcgtgtgtaggcctgtgcaggtgtgtgcatactgcacccaaggcaccaggtgggttctggccctccagttgttaccttgtgtgatggcatcactgggttcttgggcctccctctcttctttttcttcttggacacaggaggcagctgccatctgggcaagggctgaggcgcagttagcagcaacgccttcagaggagacacacaatgacttcttgactgagtatatcctctaaccattcacctagcagaaccccttctaaagggtccccctgccccaccctgctgggtcattcccagtgagttctgcaggaccacggccagggaacactactcccgctggtacctagag

SEQ ID NO: 37114 - DNA, 2300 bp, Homo sapien
aagacaggtaataacaaatgctggagaggatgtggagaaaagggaaccctcgtacactgttggtgggaatgtaaattagtacaaccactatggagaacagtttggaggctcttcaaactaaaaatagaggtatcatacaatcagcaatcccattgctgggtatatactccaaagaaggaaaataattatatcaaagagatagctgtactcccatgttcacaatagtcaaaatttggaagcaacctaataagtatcagtattagtccattttcatgctgctgataaagacacacccaagactgggaagaaaaagagctttaatggacttacagttccacgtggctggggaggcctcacaatcatggcggaaggcaaggaggagcaagtcacatcttaatggatggtggcaggcaaagagagagcttgctcagggccacagggtacccagacatttggccaaacattattgtgggtgtgtctctgggggtgtttctggatgagaagaacatttgaattggtggagatagcagagcagatggccctccctaatgtgggtgggcctcgtccaatcagttgaagacctgaatagaacaaaaaggccaagtaagagggtactttgcctgcctgactgtttgagctggaacatcaatcttctcctgcccctggactgtacttacatctccccgttctcaggctttcagacttggactgcaactatacgactggctcaaggagaactcattataaccatcagatctcatgagacttattcactataacagcatgggaaagacccggcccgatgattcagttacctctcacggggtccctcccacaacacatgggaattcaagatgagatttggggagggacacagccaaactgtatcagtgtccatcaacagatgaatgcataaaggaaatgtggtacatacacaaaatggagtactattcagccataaaaaataatgggattctcagcactttgggaggccgaggcaggcagatcacaaggtcaggagttcgagactagcctggccaatatgatgaaaccctgtctctactaaaaatacaaaaattagccgggtgtggtggcgggcgcctgtagtcccagctactcaggaggctgaggcaggagaattgcttgaacccgggaggcagaggttgcagtaagacgagatggcaccactgcactccagcctgggcaacagagcaagattcagtctcaaaaaaagaaaaaaaaaaaaaaagggattctgtcatttacaacaacatagagggaactggaggttattatgctaagtgaaataagccaggcacatgggagggcgggtcacatgaaaaatggtgacagtgaagcaaggacctcgttgtagcagtgacactggtcacatcctccaaggtggacaggcatgggggaggtggggactttccaagcagaagaacaaaatagcattgagataagagtttggggtttggttttgcttgtagaggagtgatggaaaatggaactagaatccaaaaatcactacagaatatatgcagtcttgcatacaagtctacgtttaatgattggcctatttgtagaggggatccgttgatatttctatattaaaatggtttaggaagtagtattttgacaatggaatactggatggttgagagacaaggagacttggcagggagctgcagaataaacctgtgcatgagcccatatggcctaaattttgtggcaacaaaatggaattcaagactcctttgtggccgggcgcggtgtcccacacctataatatcagcacgttgggaggccgaggtgggtagatcacctgaggatgggagttcgaggccagcctgaccaacatggagaaaccccatctctactaaaaatacaaaattagccaggcatggaggcgcatgcctgtaatcccagctactcgggaggctgaggcaggagaattgcttgaacccgggagatggaggttgcagtgagccaagatcatgccagtgcactccaggctgggcaacaagagcaaaactccatctgaaaaaaacaaacaacaacaacaacaaaaaaaaaactcctttacttgtttcttttggcagatacgtccttgtgacagcgggccctgtgttcactgaggagatgtggaggcttgcctgctgtgccctgcaagatgcgttctctgccacactcaagccagtgaaggtacatcactgggaggaagccctccctggcacagttctaaccatctttagctcctgatcccttaccatgttgggcacatgggttctgcctcctct

SEQ ID NO: 37115 - DNA, 2300 bp, Homo sapien
tgagagtaatgtgttttccctcagtgaggactacacaaagggcaaagttaacattgagatttatgcaggatttgtcattttctgttagaaaagcactttttcctacttacacaaatttttacattcaaagtcatagacataaagcaaaatgttattaacatcatggctagaactttgaaattaataacggttgtcataattttataattatccagtttggggcattaattggccatataatggccacaactattttcataaaattataagagcagtgaaaagaaatgaaactgtaaaccaaaaccacattggcaaattaaaaagtttggcaaacatagtacaggttgagcatccctaaccccaactttttgagtgccaacaggacactacaaatggaaaattccacatctgacctcatgtgatgggtcataataggaaaacccaaaatatattctgtgtccccaagggcaaaaagacttcccagcccccttcaactgtgatatcttttgatgtcacagttaactctctgatatctgtgatatcttgacaactattaatttggcataataacttatattctatagctttgggaattttttttctttttgagacagagtcttgctctgttgcccaggctggagtgcagtggcgcgatttcagctcactgcaagctccacctcccgggttcatgccattctcctgcttcagcctccctagtaagctgggactacaggtgcccgccaccatgcccggctaattttttgtatttttagtagagacggggtttcaccatgttagccaggatggtctcgatctcctgacctcgtgatccgcccacctcggccttccaaagtgctgggattacaggcttgagccaccgcgctcggcccagcttcaggaatttttttaagtgtcaagaactccactagttgtgattaaaatggttatcacacagtgcccaaaaagtatgccttctttcatggaagacatttgagtagaggtagtttagtttgtaaatttgcatagatcgttctgaaacgggtaacgtctatattgctttgagacacctgatatagggcagaaaaccattaatcgagccctctcttttcacttgaagcgtgtctttcagggaaattgtggtgagcctgctgtctcatcaggtgttactccagaacttatatgacatcttgttagaagagtttgtcaaaggcccctctcctggagaggaaaagacgatacaagtgccagaagccaagctggctggcttcctcagatacatctctatgcagaacttggcagtcatattcgacctgctgctggactcttataggactgccagggagtttgacaccagccccgggctgaagtgcctgctgaagaaagtgtctggcatcgggggcgccgccaacctctaccgccagtctgcgatgagctttaacatttatttccacgccctggtgtgtgctgttctcaccaatcaagaaaccatcacggccgagcaagtgaagaaggtcctttttgaggacgacgagagaagcacggattcttcccagcagtgttcatctgaggatgaagacatctttgaggaaaccgcccaggtcagccccccgagaggcaaggagaagagacagtggcgggcacggatgcccttgctcagcgtccagcctgtcagcaacgcagattgggtgtggctggtcaagaggctgcacaagctgtgcatggaactgtgcaacaactacatccagatgcacttggacctggagaactgtatggaggagcctcccatcttcaagggcgacccgttcttcatcctgccctccttccagtccgagtcatccaccccatccaccgggggcttctctgggaaagaaaccccttccgaggatgacagaagccagtcccgggagcacatgggcgagtccctgagcctgaaggccggtggtggggacctgctgctgccccccagccccaaagtggagaagaaggatcccagccggaagaaggagtggtgggagaatgcggggaacaaaatctacaccatggcagccgacaagaccatttcaaagttgatgaccgaatacaaaaagaggaaacagcagcacaacctgtccgcgttccccaaagaggtcaaagtggagaagaaaggagagccactgggtcccaggggccaggactccccgctgcttcagcgtccccagcacttgatggaccaagggcaaatgcggcattccttcagcgcaggccccgagctgctgcgacaggacaagaggccccgctcaggctccaccgggagctccctc

SEQ ID NO: 37116 - DNA, 2300 bp, Homo sapien
agagatcaccacagaatccatttttttcccagttccacaaaacactctgtttgccttcagtttttactcactagacaataattcaagtttagaaacaggtaatcagctatttgatcttaaaaggcaatgaattgttgggatatcagtgaactatgttgtatacttttgaatttttacattttataaatggaattgaaagttggataactgctttttttaaattttccaacagaagtaacaccacagttgctttgtttctttttatagcttacctgaggttcagttcttctttgtgaacctgtgagtactccacagtttactgggggaaaaggcttcagtaaagcagaggctagaattacagtatttatacatagcaacttttcataaagtagaaaaattcaaaggaagctgtctcaatttgagaataccagctgggcacggtggctcacgcctgtaatcccagcacttactttgggaggccaaggtgggcagataacctgcggtcaggagtttgagaccaggctggacaacatggtgaaacctcgtctctactaaaaatacaaaaattagccaggtgtggtaggatgcacctgtaatcccagctacttaggaggccgagacaggagaatcgctcgaacccaggaggcggacgttgcagtgagccaagattgcaccattgcactccagactgggtgacaagagtgaaactccatctaaaaaaaaaaaaaaaaaaaagtgaatactgtatcccaaagtatgttagttgtttgtttggaaatcagcattctccccgatgctctattatgggatccaaaattcttgaacataagtttaccctgtactgtgtccaaacactgttctagttctagcctgattatgggtcccaagaataaaaggatgagtaggtgtacagagctcttgacctacaattttttaagagtgttttggtaccttcccattgtcttctctataactcagtcctaacatactctgcactcgagttaccagccatccacactgacatcagatttcaaccagaaccatcactgagtgacagcagtacttctcagaggtatttgcagcttgatgcaaagtagtctctaatgagtaggcattcaggtggttcttcccagcaggtggagaagaaagggaggagatgaagaacactgagaggggagtggcaccttcccaggctgcccagctcagtctcttgccctgttcctgtgactcagctgcccactcccccaactttgtttccctccctcccagtctctgaaagtgtcaggtgtttctctcctcacagtctcttttgcagcaacagtaagacaaaattcaaggcagccttttaaagttacgaacagttattagcatgtatttacagacctaagcagaatgagagtttatacattgtttttagttgcctgtatttatagccaaaagtatattaccttaaagttgagatctttctcttcttttcctaaattttggtaaagtgtgcttcatgaaacaaacatctggaaaactccaagtataagagaccctggactgatgatggcccagccaagtatatggagggacagagttctctctgtcattaatgaggacatcggttttcacaattgaacctcatgcactgtccacagcatctcacctagctcctgtatctcctgatctgcttttaaaaatagttagttaggctgcctttttacaccaccttctctctctccccttgtggtaattttccagccttccccatagatataaaactagaacacctttatgatttggggtctatgtaatgactgaccgataagaacccaggcagatgctaacatacttaacagctcgcattaaaatactttaaatcaggcgtgatggctcattcctgtaatctcaagcactttgggaggctaaggtgggtggatctcttgaggtcaggagttcgagaccaacctggccaacgtggtgaaaccccgtctctactaaaaatacaaaattagccgggcatggtggcagctgcctgtaatcccagctactcgggaagctgaggcaggagaattgcttgaacctgggaggtggggattgcagtcagccaagattgttctgcagcatgggtgacaaagtgagacttcgtctcaagtaaataaaactaaaatttttaaatcaaacatgacaaaaatgttaatataattcagaagtaccttgaaattgaaacatatttgtgcaatgatcattaggctttttgtccttgttgttttaaaatgaggcttatacagagtgagttgagagtcaagtagcct

SEQ ID NO: 37117 - DNA, 2300 bp, Homo sapien
aggcagggcagtgcccccctgcccggcccaggtgccactaggcacagcaccagagtaaaaactcaacagcggggaggccggaccctcgaggtttgggagtttaagcacccaacttctggctcagggatttggggagtagggtaaacaaaacctacttggaaaagaattggggaagaaaaccaaaaattgccttctgcagggctggggacagggaaggaggcagggccagggaaaggcacatttcatatcactaatctaacttgggaggctgtgggggaccgtcttcaactggccttacgaggaaagccacatggccgattggagaatccacaggagggagagaaggaaagggaatgtagctggtaggatgcaatagccccttcctttctgggcacaggagggcagccagggcaccaggtccaggcagtaacctcacaagaacagcagtttttgcagcttagagatcacccacctggcccacccagctactcattctgctcagcgtgggctggtgtagggccactctccgccccgagggagtggacagctctgtagcttggggccctgcctcttcttctgaggcagtactgcctctgcgcccttggcctggggctcctggctctcaggggtggcaacagccttcccttcctgggcagcgcccttgtcgctgcaggcattgatcttcccccactcctgttcttcctccataggtgaggaggcagaagagtcaccccaccctccttcccatttctcttgaaggacaagctgctcttagaaacccttcttgaaagataattatttatttatttatttatttatttatttatttatttatttatttattttagacagggtatcactctgttacccaagctagagtgcagtggcgcaatctcggctcactgcagcttcgacctccccaggctcaagccgatcctcccacctcagcctcccgagtagctgagatcacaaccccagcacactcagcttttttttttttttttttttttttggaaggcagctatgctctccactctactatcaacgctattttattgtatttttgtagagacgggttttcgccatgttgcccagtctggtctcgaactcctgggctcaagcgatcacccctgtcttggcctcccaaaatgaagggattacaggcgtgagccaccgtgcctggccttgaaaggcaatttcgtcttcttggaagtctccttgcgagggagggagcctcccctttggcctcagcaccctggctagggggtgctggctccatggcattgccaatggtcccggctgcctcttctgttcacaggggcctactccccttcacccttgggggatgtcaccattgcttttcacgtggccaccctcctgtccgttggctttcgcgtggggagtgcctgctgcctctgcggcggtcacgtcgccccggagagcctcggagctctggctgcccacgatgggagtcctctggggggcgccggagccgtgccgggtccccgccgcaggggacagtaacgcggagtcggcctggccggcggaaagggggtgctggggaacagagccgcaccccactcggctcgggaaagccctggtaaccaaaattcttgaaaagcactagtgtctggcctcggcactaactctccccgagtctcgttaagcctgcggggatgactcagagggtctggggtcctgtcggggaaaagttcagaaaccagaacagttccagattctctccatgtgtctgtggtcccaccacctcctccgcaagggaccctgaaagctgtctgggacctaggacaacttcttgggatgagtacggccattcgccctggctgagccccaggagtgcgggcaggggccgcgggggtcgggtcgccagccgccacctcctgcctttctctgcctgcggtgcgctgggacaccctcgaggcggctcagcgcccgcggttcccagcgcgggcggggccgcggcagaggttcccaaaccggttgcacagaaacagcgccaccccctactgcccgcggggccacctgtgtgtgcctttccttcaaaaacaaaggcggggcgggggcggaagtgcctcaaaagaaggcgggccgaagcgaggtgcggctccctgtcgccgcggaggggcgggggcaggacgcgcaactccggccggagctgtccggggtcgtgagccggccccgccttggtggcggcgccccctcgcggtccagaggcagacgcatcgggtgggctcgggtctccagcccggccgggaggagggaccgggtctgcggagcgggga

SEQ ID NO: 37118 - DNA, 2300 bp, Homo sapien
actacattcatctacctttgggaaagatgtgtcactgcttgatagatggtctgcacagtcacccagtgggcgaaaggctaccttgaagactttactgaaaggtgattatttcaaagtaaatcctcctctgagcccttggcagccttgatcttgaagggataccctgagaattccatacgcagcactcaagccataggaggattggaggtacaaattaagagaagtacctgacattcatgacaataattttcattttagagctatcagtaactttttaaatgtacttagatacctacaggagaaaggaaattaaatcaaatagaaaaatttttttaaaattctgtcagaggggtgagggtacacgtgatgaactatggattttattttcaggtaacaagcctctttctgctttatctccagcatcaggcactggccaagatgatgctgatggccactcagtgtacacccctgatcactactctacactaggaaggttcaatagctgtcggtctgctgggcagcgctcagaaaccagggactccagctgtcagacggaggatgtgaaggtcgtaccaccttccatgaggagaatcagggcacagaaggggcaaggcattgctgcccagatgggccacttctcaggttcctctggcaacatgtctgtgctgagcgattctgcagggatcgtattcccttcccgccttgacagtgatgctggcttccatagtcttccgcgttctggagcaagggcaaacattcagtcccttgagccgaggctgggtgccctcggccctgcaggagacatgaatggcactttcctctaccagagaggtcacccacaagcagatgaaaacttaggccatttaggaggtgcctcagggactggaacacttttgagacccaaatcccaggagttgagacacttcgagagtgaaaatataatgagcccagcgtgtgtggtttctcctcatgcaacctactccaccagcatcatcccaaatgccacactgtcttcctcttccgaggtcatcgctattcccactgctcagagtgcgggacagcgggaaagtaaaagttctggctcatcacatgcaaggataaaatccagagaccacctcatctccaggcatgctgtgaaaggtgatcctcagtctcccggtcgccactggaatgagggccatgccaccattctttcacaggacttagaccctcattcccctggtgaacccgcactgttgtccctctgtgactcagccgtccctctaaatgctccagcaaatagggagaatgggtcccaagctatgccgtataattgtagaaacaacctggccttcccagcccacccccaagatgtggatggcaagagtgaatctagttattcagggggcggagggcacagcagctcggagccctgggaatacaaatcctcaggtaatggaagggcatcccccctgaagccgcatttagcaactcctggctattccactcccacaagtaacatgagcagctgcagtttggaccaaacgtccaacaaagaggatgctgggtcgctgtattctgaggaccacgatggctactgtgcatctgtgcacactgactctggacatggatctgggaatctgtgcaatagcagtgatggctttgggaaccccaggcacagcgtgatcaatgtttttgttggaagagctcagaaaaaccaaggggaccggtccaattaccaggataaatccctatcaagaaacatctctttgaagaaagcaaagaagcctcccctgccaccctcccggacagactccctccgcaggattcccaagaagagcagccagtgcaacgggcaggtgctcaacgagagcctgatcgccacactccagcactcgctgcagctgagcctcccaggcaagagtggcagctcgccctcccagagcccctgcagtgacttggaagagccctggctgccccgctcccggagccagagcacagttagtgctggcagcagcatgacttccgccaccacccccaatgtctactccctgtgcggggccacgccatcgcagagtgacacaagcagcgtcaagtcagagtacacggacccctggggttattacattgactacacgggcatgcaggaagatccggggaacccggcagggggctgttcaaccagcagtggggtgcccactgggaacgggccagtccgccatgtccaagaagggtccagagccacaatgccccaagtgcccggtggttcagtcaaaccaaagatcatgtcaccagagaagtcacacagagtcatttctcca

SEQ ID NO: 37119 - DNA, 2300 bp, Homo sapien
ctgaggaatctctctctctctctttaaaatgagagccagtgagattcattacacagttttgttttcttgccattgcctccttcaaggttttgctcaaatctcgacttttcacgaggaccaccctgactcctacgatgctgcagcctggccaccctcaaacccccttttatgttgcttaacttttttattttgtctgttgcactcaactccttctaatataccacaaaattgtagttcagtgtcaaataatttaagctccatgagggcagggatctcacctattttgtccaatgatgtatcccaatgaaatgaaagagtagcagttagcatcggtgcctggtatttatctttctgatgaacgaatctatattcagatgccattgttgagcacatggaaagctacatgctatggagggttgagcataatcagagtttcttgaaagaacaatttctgttttcactggacatttgcatggtgacacttaacctcaaacacttgtggattgtgcatatgagtgtttttgcccacaactctccttgtgtctaatgcaatgagcagagcgaggtcactcttgcagataaatttgttttccaaaggggaactttgcccgctaatttaaggcagccacataatctgacttacaggctcagtcgtttctcatttgccatctggcaatttaattactttaaaataaagctatatataaaatgaaataacacaaattggaaatctgtgataatatgtatgataagatggtaacgtttctatgtgttcttttgttttgttgttgttgaaaaaataaagggcataaaaagacctgagaaggaatcatttcaaagctttcccctatgtgttcttttgttttgttgttgttgaaaaaataaagggcataaaaagacctgagaaggaatcatttcaaagctttccctagacagagccccttatataaattttattctttgactaagagcctttgttataaactaaatgttttgaattagtggattattacatttttccattgagttataagtctggcccaaagctatgaaataagaggttgtctaaattgtttcaaaagtgtttggccatgaagtggaactgggctgagatgtgaggaagattcttttcctttttccgttgtcatagtatttccggatctatattctcctcttttttcctatccctttacccctggaatatgttttttcagtgccttcttatactctgtttctgatttctctgtctctacttgtgcttccctagttctctgtggttaattgccaatgggcaaaagaaccagcactctggatggtagattcaagttaaagagtaactcagataatgtttgtttgagacaacattgagggaagggcgattatggaattctgaaaaccaggagcctaagtgacaattacatataaaataaagattaaaatgattagggtactttatctaatttatcatttggagtggggaagttgtattttttttggtggatttttttttttcttgattgttgtggcagctagatgcaaataagatcatgctttggaacacacaatgctgattctcaatcactggcaaagaagggtgagaagacagagcatcctaatttgcacaaaaatgcaaccaagtcatcatttgcagctccttggagattctattctaaagttttactgcttgtacaagttcctttggtatcggaggcagagcctggggcgtggttgggaaacaatagtttggtttttttcccccctaaatcagttcaaatcccatataccctgaattaactggaattgctgtcagacttggcagctcctgtaaaagatctgggtgttcataggggcctaatgaaatggggaacacatttgtttcatcttgacttccgtagaggaaagtctgcactatttttgtgggctcagagaggaggaacttctgatctgttggagagaaaactgaatgaatgggcactgaggcagaaagcctgatgtggctgtcatgcaaataagaaccgtgattggctttctctttctttcagcgcacgatgtcactggctgctctcagccttaaagattaggtttcagtaggagtttttcaggttcaaggactgttaatggtttgtaactgcctgacaataaactcaacctcagttacatcagcctgggcagatgtctaaggatatgagaccgggggaagaaaaagttagaatctgtagcagaaggacgaagcttgccacctgcctactgggctgagcttttaatgtgatttacatttctaagctctatgtaggtgccct

SEQ ID NO: 37120 - DNA, 2300 bp, Homo sapien
tttgccgtacttactagcatattctagggagctgaaacagtttcctctgttggatttcctgaagtcattggctgcacttctgggcctcctccaaggctcctcctcttctttctgaccaagagtcttcctcttttctcttcctgccctctttcccttgatgttctctttaagtggctttaagtatctttttataggctaattttaaagtttttaaaatctcccgccctgacctctgttatgatgcagaccccatgcccatatgaggtgttccactttgcccatctaattatcttctagccactgtttcctccgggttctcctccccaataaatagcaccaccagcctgcacttaggcaccttcagcaaaaaactctaatcctctttgattcctctttcttctgtcccacatctaatcctttccagtgccaacctaaaatgtgtgacagagaccaactcttccaaagcaaagaatttatttgggaatagcaggggattgcaatccagaatactcatgctatgtcaaaccataggcatattccaggggggtgaggcagggggtagctgttttgttttgtttgaggcagggtctcactttgctgcccaggctggagggcagtggcgtgatcatggctcactgcagcctcaaccttctgggctcaaggggtcttcccgcttcaacctcttaagtagctgagaccacaggtgtgcacaatcagtcccagtgaatttttttatttttatttttgtagagatgggggtctcactatgttgcccaggctggtcttgaacttctgggattacagatgtgagccaccacgcctggcctgggggaggcttttaaagacaaaaaggaaaagtccacctaagctgttttgaaacgaatactattggttacagggacttgttgtagatgttggcattagctaattggtggagacaatcacacctgataggtgtgcacttgtgcagaaagtttatctggaatactgtggttttgaggaatcccttgcatagctcccattataggcatacctgtatgagggccccaccttcatggtctctcggcttcagttttttgggtttgacattagtggctccattttgatactgataactttcacactgatctacctccaaattatatccaatccacccatttgtctcatttctaacaggggttcaagccaccatatttctttcctagttgatcacagtagcttcctacttttacttgtccatgcacaatctgttctccacacagtggccaaagagatctggttgaagcccatgtgtttgtcacaaaaagtagaaatcagttgttctttcaggctctgtcataggcagtatctgtggtaaaatatttggaaaatatttctgagaaatattctcatttttaccagcagagggagattaacttggtcaaggttatatacaagtgtaaaaagaattaaactgctgggcgcagtggctcacgtctgtaatctcagcactttgggaggccgaggagggcagattgcctgaggtcaggagtttaagaccagcctggccaacatggtgaaaccccatctctactaaaaatacaaaaattagctgggtgtggtggcacatgcctgtagtcccagctacttggaaggtggagggcaggagaattgcttgaacccgggaggcagaggttgcagtgagccaagatcgcaccactgcactccagcctggtgacagagcgggactccatctcaaaaaaaaaaaaaaaaaaaaaaaaaaagaattaaactaggcagcgtattccagcactcagtgttgggagaactgtgtccaattttgaaattttattggttagttattgatatttattttggtatgattttatatgccaagactgtgtagatttatattttattcttttaaaacaatctgttttgccttattatgttattattgttattattctttgtcactaaccttaaagaacacataacaattggatttgggcaataatgaattgtatactgaatgccaacggttatgggaaaaaccctgtattccccttgtttcagaaaggattgaaggcagctgggaaagtataaaacgtgaaaaaggttgagagggagtaggaaaatttttgatcaactagtcttcatctttatcaactttttaagggatggctctcaaatatgtatttttaaaacaaagagtatttcagtaatataaatatggaacaaacagttgccaatcaactctatctgaatactgaaatggagggaatgggaaatactgcccatgtaagtgttctagatctttc

SEQ ID NO: 37121 - DNA, 2300 bp, Homo sapien
attctcacatcctttcttatggtagaaagctattattggtcactgaaatatgctgtccccaactgctagaggcttttggtaaactgctggattctgttaattgctcctggggagactcattaaatggtttatctgacaagaagggtggaattaacggtcacagttatccttaggactgtttaaggaacatatctaaactttgctccccatttccacaccttttttttttttgagacagtctcgctaatttttgtatttttggtagagacggggtttcgccatgttggccaggctgatcttgaactcctagcctcaaatgatccgcccaccttggtctcccaaagtgctgggattacaggcatgagccactgtgcctggctccacactcttctaaagggaaggaacacaggcagtgggacgacaggcgagacaatcagaaggtttgggcttcaggcccggatgtgtcattacccacagcctaacctggggtgaattaactgcaatgctgttggactggatttcctctctgggtaagaattcacgaaatggatggcctttacggtcaattccaagtctaaaagtctagccatccatactaatggagtatgatattctgaagacctgcctaaaatggcagaacaacttcaaactgtagtttttacacagaaacaaggtttgaggcattgttttaaaagaatcctaacagatggtaatgcataggcatttcactgcttttaagcacataaaaaagcaaagtgtgtgaaggtgaaagaaaccacaaaaattaatgtcttgatagtcagctttcttctctacatgtacatttatactcaggcataattatattcaataaaaagccttcttgcatgattattaaaaaaaaaaaaatggggccacgtgtggtagctcacacctgtaatcccagcactttgggaggtcgaggcaggtggatcgcctgaggttgggagttaaagaccagcctgacaaacatggcgaaaccctgtctctactaaaaatacaaaaattagccgggcgtggtggcgggcgcctgtaatcccaggtactctagaggctgaggcaggaggattgcttgaacccaggaggcggagggtgcagtgagctgagattgcaccacagcactccagcctggaagacaggtatgaaatcacaaccacttaagattcaaacaaacttgtgaaaagttttgaaaagagttatttcagttactgtaattagaacaaccttagttaatatggagaatttgggggatttctggctatggacagtagcctattggggcatatgtactaaagaacagagaaaagtgatacatttaaatgtaaaaccaaactagtaaaggaaggagttcttgaccttcagggagtttcctcttgttttttaattcccacaatagatcagttcacctatcaatcagatctccctcatcacattctttgtcaagggtaaaattctggttctcccacgtacctacaccctagacagaaaacgcatagaagcaactcgtgattgccgcatagaccatgacatcctactaggacagtgtatcctaccatatgcatgaagtcatcactcacattaagtagatatattctgattatgtcaacaaccttatgagatcactttgattcctccccactgatttttttttcttggagggggacgctctcccaggttgggaactgtccacaattcatatgaatgtgttgacggcacaatcaaagagatgaacgcaaaaatgtaaaactgccacgaattaattatacaacttggagaaagatgtattatagcaagcaatctcactgaaattaaataattgaaaattttgaactcttaggctgtaaggtagttaaaatatagctaagtttttctagctagctggaaaacgagctattcgagattgcatatgaagtgattctaggagaaaaaactatttcatccagagctgctgaaatctaggcgtgtgttacatcaacatctcccctcccacccagcaatccatcaaccatctccaatttattctttacacttaggattatgaccaagttcacgtacttaaaagggagaaaccacagagacatcacactgaaagtttctctgctttgggccagcaggaaattccagttgcttcattcaccggagccagttaagctgctgaaatgaaatggatcaccggagagatcactatatcaggacatagacttgactttcagggttggaggaagccggacaaagatgaatgggattcagagcctgaactcaaggtcaacgtcttctgaatc

SEQ ID NO: 37122 - DNA, 2300 bp, Homo sapien
gctttcttctctacatgtacatttatactcaggcataattatattcaataaaaagccttcttgcatgattattaaaaaaaaaaaaatggggccacgtgtggtagctcacacctgtaatcccagcactttgggaggtcgaggcaggtggatcgcctgaggttgggagttaaagaccagcctgacaaacatggcgaaaccctgtctctactaaaaatacaaaaattagccgggcgtggtggcgggcgcctgtaatcccaggtactctagaggctgaggcaggaggattgcttgaacccaggaggcggagggtgcagtgagctgagattgcaccacagcactccagcctggaagacaggtatgaaatcacaaccacttaagattcaaacaaacttgtgaaaagttttgaaaagagttatttcagttactgtaattagaacaaccttagttaatatggagaatttgggggatttctggctatggacagtagcctattggggcatatgtactaaagaacagagaaaagtgatacatttaaatgtaaaaccaaactagtaaaggaaggagttcttgaccttcagggagtttcctcttgttttttaattcccacaatagatcagttcacctatcaatcagatctccctcatcacattctttgtcaagggtaaaattctggttctcccacgtacctacaccctagacagaaaacgcatagaagcaactcgtgattgccgcatagaccatgacatcctactaggacagtgtatcctaccatatgcatgaagtcatcactcacattaagtagatatattctgattatgtcaacaaccttatgagatcactttgattcctccccactgatttttttttcttggagggggacgctctcccaggttgggaactgtccacaattcatatgaatgtgttgacggcacaatcaaagagatgaacgcaaaaatgtaaaactgccacgaattaattatacaacttggagaaagatgtattatagcaagcaatctcactgaaattaaataattgaaaattttgaactcttaggctgtaaggtagttaaaatatagctaagtttttctagctagctggaaaacgagctattcgagattgcatatgaagtgattctaggagaaaaaactatttcatccagagctgctgaaatctaggcgtgtgttacatcaacatctcccctcccacccagcaatccatcaaccatctccaatttattctttacacttaggattatgaccaagttcacgtacttaaaagggagaaaccacagagacatcacactgaaagtttctctgctttgggccagcaggaaattccagttgcttcattcaccggagccagttaagctgctgaaatgaaatggatcaccggagagatcactatatcaggacatagacttgactttcagggttggaggaagccggacaaagatgaatgggattcagagcctgaactcaaggtcaacgtcttctgaatcacaaagagctggtgggtcagtctgggagaagaaagaaaattctgcgccaaatgggaaaacccttaaagtctgcatagttttgcttgtcggtaagaacacaggtaggcggcgggaagagaggtggcaagcagccccaacgctcgccgagatccccagggttttacaaacggatcgtcctgaagtctccaaaactgtaactactatatgcccaaatttatattctcccctggcttttccaacaggctacctgcctgtgacagttttcccacgaacttggctctcctctgtctacagcgccccggggtctcccaaacagacagacacagacagacagaaggagcagacaaggggactgtccaattcccaccctccgcgcccactctctcgaggtagccaagaccctccaggagtccgaaagtcacagagcgctctgcgcccctgccacctgcccagcctcccgctggggtccggcagtccccactggagaccccgacatcgcggggctccgcggcccccgcgccgacccagggccgccagggggcgggcgggagcagctctccgggtgcctcccccgccggttcccctcccccggcccgccggccactcacggattttcactcggcggtggtccaggcgcgcagcggcggcttgcagggcgtcgaggcggcggtgcagcgcggcggtgcggtggcccagcgcggccgcctggccctcgagctcgccgaagatgtccccggcgcagcgcgacaggtcggccagctgcgccagcaggcagcccagggcatgcgagctgacctgctcc

SEQ ID NO: 37123 - DNA, 2300 bp, Homo sapien
ctcaagcagctgggactacaggcctgcatcaccatgcccagctaatttttgtatttcttgtaaagacagggttttgctatgttgcctaggctggtctccagctcttaggttcaagctatttgtctgcctcagcctcccaaagtgctggattacaggcaaaagccaccgtgcctggcactcaaggactcattttcctcagatcattccatggctggctcatgcactttattcatatctctacctcaaagctgcattttcgggaaggccttccctgatacttctccttcagtacaaactacttttgaccttaagctgttatttcaggactctcatctgactaaatgaaactattttatttgcatactaatttattgtcagtctcttatatcgggaatataagatctctgactataaagctcttgtaccttttgttgatagatgcatcctgacctcctatcacagggtgtggctaaaatagggacttaaaataggtattcaaaacctgaatacctatttctgaatacctgaaacatgtccatttagaagggtactttcctgtgtccctacatcatgttggaggttgtaaacacaaatgctacagggctcagatgggtactaaagacaaagaaaaactagatattacttgaactgaggtaaaggaggcagatgctttccagcttgaaccattgttgccaggctacaatgcacatctaacgtagtcagatcttcccgttaattcatgggatgccacattgtttttattctttcaattttagctgttagcaaccaatttgaaaaaaaaaaaagtagcatgtgaatcaccagttgcaagctctgttcatacaaataagacaattcgacattaattaaaaggagaaactgggaaaagatattgagcagactgtacagtagtgtttgtaatggtgaaaaatgggaaacaacctaaacatccatcactatgggaattcccaaataatttgtgacaaatctatttgataaagtctagctatatttatcaatgtggatagctctcaaaaacacagaatttggtgaaaaaatcaagttgcagatcaatacacaaaatataatagcattcatgtaaaacttcaaatgccccaaaccattctacatattgtttataatacatagtaatagtttaaatatagaaacctagattggcaagatacatatcaaattcatgatcctggttgcctctctgagggtggtagtagaatgggactgagaatagggaacaccttctttatctgtaatgctccatttctttcattcataaatctgttcgttctggatagtgggtgcgttgtttattctgtgctttttttttttaacatttcaatagttttgttttttttttttaaatggcgggtggcggaagaacatcctatcctagaagccaagagactggggttgtctttgctctgccttttctggcatggatacaatctctagatatggtttccccattagctaatgcggggggtgctatgtggtgttcctccagagtcccttcaatctaaggacctgtgaatctaaaaccttcccacctcccactccaacaccgggaaggctacccagaccaggcaatgaaacgtgcatttcttccctcatttaagatagatctctttctctcagcctgcaattccttctccagaggctttaagtatagtggaagtagaactatctttgacgacagagagacacctgcatcaattagcctttctgagcctcaaattccccatttgtaaaacagagagtataacacctacccataaaattgtagagaggtttagatacaccgttatgtgtagggcccgaacagagtagctattaatagtggtaacagactctcaattaggggctcaacatcatggtcgctgaacagaatcacggtcgctgaacagaatcacactcttcacgccgccttggagccaaaattagtttagccgcgagaagtccgggcaaccaatcggaaacaaccaaggaacagttgcatggcgacactctggttccgccttcgggcatgctcgaacagcattctgggaattgtagttcggggggggaatctaacactcaccgaggggcggagtagcttccggaaagggtactgcatttcccgtttctacctccactgcacccgcttattgcgtcttgctcctgggtcacagagcctaaaacgacacacccaacacgcccgccggagttacagctaaaggaaggacaggggaagcaatgaaatgccgagggcggagccaagagcgacactgggggagcaggaaaag

SEQ ID NO: 37124 - DNA, 2300 bp, Homo sapien
agaagcctacattttacaaggggaacaacatataaacaataaacaaatgatccacataatattcccagcctgattcaagcttcaggtggcctttaggtctttcttccaaaatgtatgcttaagaagaaccaagtagattcaaacagatgtataattgtcatagggattttactagcattttaaaaatcaactagaagccttacttcaactactaaacagaaactcagtttctagctagggctaataatgattctagcttggtgataagtgaagttctagaaaatcaaacttgttcgttgcctattttgaatatactttctctaaccatttccaaacaaacgtgaattttatgatatatatttagttttgcccatatcaaaaaagttaacaatgtgaagttacagatggcccttccatgcggaatacgtgtaaggcctcctagttatccctacacaatccccttactttatctattaatccgctctattttctaacatccatctatttaaaaaatacccttccggccgggctcacgcctgtaatcccagcactttggaaggccaaggcgggcggatcacgaggtcaggagatcgagaccatcctggctaacacggtgaaaccccgtctctactaaaaatacaaaaaattagccgggagtggtggcgggcgcctgtagtcccagctactcaggaggctgaggcaggacaatggcatgaacccgggaggcggagcttgccctgagccgagatggtgccactgcgacagagcgagactccgtctcaaaaacaaaacaaaacaaaacaaaacaaaacaaaaaaaccccttccatactttatttgtgcatagtgttaaatttttcttaacttcattatttcatatatcataagatgaatttatatggctatctctacctcatcaggttgtaaattgccttctagaaacattaggccgtttttggcatgctgtgtttaatttaggcatgccatgaccattcaaaaagattcaaacccattgctgtcgcttaaaataattatttgatgaattcaataaatttttctttttccttttgcctggacttagtgccactggcactggaatttaaaccactgagcttaaattggctgacgctagacaattacaactggagctacaatactgccaaagaagaggctttctgggaaaggctccaatgcccagtctctaatcccagataccactgggtgtcaatccacttaaaccttggctaacaatttttcttttaagaagcattttttgtaacagaacaataattctggtgttgtttcaacatgcaacacaaattaaatgagagtttgaaagatgactgaatagagacgattagttctctgaagaggcaaggatctgtaaaaatgtatgatacgcataaacacgctggcctgaaatttaacgatgctaatacacacttggtggtacaagaaaaaaaaatctaggaagtaaagcaatgcaaataaaccagtggtggtctaaaccacaatattctgcggagccagcactcgcgatttcctcgtttttggaaaattacatctgtcacaagagcactgaaacccttcctgtatatcaaacagcaaagaatgttttagagaaggcataataagtaaactgctcatagttacttattcacacagtggttttaagtgccaggtcttgcctccaagcagtaccactgggcatccctcttgacatcacctcattccccttccccaatctaccgaagcgatgacccttcaccgcccagtacccagcagtgaccagagtggtgggaagggcctaaaggggcaggttgcggaggttcctttgcttccactacatacctgaagaagaagggtattggggcccccttccgcaacccgcaaagacccgacagcctcagaagccaccgccgcagccacaagcagagccccggtcacatcccgggacccgctcctccgcagctccgtttgtttacggaagtgacgtaagaggtacagcctccatgccccaagcggaagccccgccttttcctgctcccccagtgtcgctcttggctccgccctcggcatttcattgcttcccctgtccttcctttagctgtaactccggcgggcgtgttgggtgtgtcgttttaggctctgtgacccaggagcaagacgcaataagcgggtgcagtggaggtagaaacgggaaatgcagtaccctttccggaagctactccgcccctcggtgagtgttagattccccccccgaactacaattcccagaatgctgttcgagcatgcccgaag

SEQ ID NO: 37125 - DNA, 2300 bp, Homo sapien
taatctgtcaaaaaaaaaaaaaaacctagtagtaccacttaatagggttgttgtgaataatgtggttattagtgtaaagctttagaacaatgcctgaaacttagtaattattcaataattagccgttaaaaatgtaacagctatatatgtaatgtcagatagtgaaaagtgttataaagaaaaagaattcaggttgggtgcagtggctcatgcctgtaatcccagcgctttgggaggctgaggtgggtgagcccaagagtttgagaccagcctgggtaacatggcaaaactctgtctctacaaaagccacatacacaaaatttaggtgggcatggtggcctgggcctgtggtcccagctacctgggaggctgaggtgggagaatcacctgagcctgggaggtcgaagctacagtgagccaagattatgccactgcactccagcctgggtgacagtgggagactctgtctcaaaagagaaaaaaaaggaattcagataaggggatagtgcatggtgggattattttacagcagctgttgcaggaaggctgctctgaggaggtgacatatgagcagggacctgaaaccatatgagagaatacgccatgccatggtttgtggaaggactattttagatggcaggaacaaaggccctggggccgacaagagctgcaaggcctaggagaggtggcagagaaaaagatgcaaagacaattgtgagccaatccctaccccattgtgctctttctgtttacacctttggaaggcagctgtctggggggggtctgatcacttgctgcaggtgccctgaaaggacacatgaggggctgctgtagcaaactgaaagtcttagagatgggaaataagcttaatggatagtatatacttacctttatcaaatactactagtcaagtcagaagacattgacaggtctaaaatcccttatctttcttaaaaaatagaaagataatagaatgcctgtgactgtgtacatattaacattctacaaagacctggagtgaaatgagtaaatattgacactaagtgggatccataaaggctagaaatagcttcatgcaagcttagtttagattttgcctccaaatgaggcagggcaggttttacttccaaagggttacaaaaaaaagtctttgggttttcagtgcgctttgaattttgcaattacagataaatgactgggaacctgtaataatttcctcatatgtgtcatttataggatccgcactctgggaaacaacttgtagaagacaaaataaaaaccagaactctgggtaattctgccttagctcccgtctttgaagtattttatatttgctaagtataaattcttaagatattctacttgaaatagctgaagaatcccctctctgggacaggtgcagattaaaagagcgccactccatgattttcataaaggagaaaatacggaaggcagcccctgtgggcagccccgggcctacatgagttgatagagttgaaggtataaatgtagagtattaagttcccagtgaccggaatgacctggtgaacaaagaggacaactttgccagttttcccctctattcagcacattttgtttctcaggtaaacatggcttgaagcacgagtgagatgaagcctcaatgttggtgtctacgtggaggcttcccggatagccaggatgttcatagcccggatgttcatagcccttcagaacagatggaaatactgcatttatcttcatctgtaccgaaaaggtacagatagaatgataataacctgaacaaggctcccctttcaatccaattattcagacgcttaggaccagaaactgcgaaacataaaaactgcaacccggatcttagttatctcggtcttaatgagctgccggctgtttcccactgcacccccctttccgggggtcttgctgctgagatctccgcgcagagggcggctcggtcatcccgccgccgggcgccggccaccagggggcgctgcggcctcctccctctcccgggagcggccaagccagcccggtgggtgtttctctctccctctcgcgctctctcctcccggcctcacatccgggtctggagcgcggccgccgctgtcactgttggtgcgggcgcgtcggggccgggccggggcactgtaaatggcggcggagggaggcggagcggcggccacgctcagcccagatcccccgaaactttaggttcgaagccccacaactttccgggaagcgctgccgctccggaggcgtggacggaaggggaagccgaggcgggaagtctgggggaa

SEQ ID NO: 37126 - DNA, 2300 bp, Homo sapien
aatattagttaagattttttaatatttcttttatcaaaacagctttcttttttcttttcttttcttttctttccttttttttttttttttttttttttgagatgcagcctcactctgttgcccaggctggagtgcagtggcacgctcttgggtcactgcaaccttcgcctcctgggttctagtgattcttctgcctcagcctccagagtagctgggattacaagcatgtgccaccacgcctggctaatttttgtatttttagtagagacggggttttgccatgttgggcaggctggtctcgaactcctgacctcaggtgatccgtccaccttggcctcccaaagtgttaggattacaggcatgagccactgcgcccagccgacaaaacaattttcttaaattgtaattccttatagattaacataaagcttgtgttatacttagtttagcacatgtgtaaacaaagtatcttttgggtgagtttatttttatattaacaaggatgtttacttctttaggtaaagtaacctatttctttttctttggttggcaattagggcaatactaattacctaatcataacagaagcggtgctctccagactcattattcctatcattggatattatctgactgatgaattgtgatccctgtcacaggccaaaatagcgaggtcctgcttcgataattgctaaatatatttttcttgaattatatattttttgccttatgtcgactgtgaaagatataaactataacttctcacctttcttttggtgagaaaaaaataggcctcaatcattttggtaacaatataaaacaagtaaaagaaaaaaataggtctgaaaagatcttggagtcaccttaaactttatctgccatgagacacttagaagaatcagacctttgttgaagattacagaacagagactccttcagtcacacccaggagacaggtattcaccgtaaagactagaatgaagcgtgggaagtggatggatccagtgcagccccagggaactgaacactcacatgcccctgggaagcaggtctttgttgctctccttccatcacttggtctcagcttgtctttgactggcttctaccacttgtgcctccacccaacctgctgctacattctcctggtttctgcttactcaaatgttttgcatccgaagcccattttggccccttctgccttaccctctcttagctccaacctttctcttacatcagacagctccgtctctgcattctccactttccatttccaagggagtgtctgattggcttactaactatcagagtccgtgtttgatgagaactgtttgctccaggtcacctcacaggatgatgactacatcacggattgtgcgctcttgggtcacgcgatcactcttaatttaaattagctgggctgggggtggggagggggtaaggaacgttttttgtagttatttgtgcaacccctgctctagaaatagtttgggtaactgtttcctttccaaaaggactctctgggtacggtaagcatctctctctcacacacgcatatattaaaataacagtgactaaaacaaagggagcatgaataaattgaattatgaagttaaatgtatgaaataatgaatgaacaagggaagaaaccgatactgacccagggtcaacaactatctatgtccaagtaaaatttctttgcagtctgacaaattggctttcaagattgcattttgttttgcgaattaagccatttttaagtcatgagtcgtagttttctggaggcccccggcatccggaacccatgaatgccacgttctttctagcagccttcagcaatttgagggcgctttgtttcttacgttgggagagaaatccatcaggaaatcgacgcccaggatcagatgcagatcctgggatccttggctctgagtagcacggtggaaaagtgaggtaatccaggctctgggcccgttttcctaggagcccagggcgcttcacctgtctgcagtcagcccctttcttggacgtctcctcccctgagtttcctcctcataggcttgtccctgggagtgtgggcggcccctttcttgagcgcagaaacacttacttttccccctaccctgctcctcctcctccacagccgtctttctctttgcctcagccacttccttccttggcctcaccctccccagtgcactgaagaaggtaaccgggtccagacccacgcggcgccagttctccggcgggaaggaaaaccgcgcagagaggtgcgtgagcgcccgggcagatgtggcttaggt

SEQ ID NO: 37127 - DNA, 2300 bp, Homo sapien
cgcaatcagaatctcctctccattacctgaatgtgggggagagtattgtttcttgtactttcctgtctatctgtatagttcacaatgaggcagagaacagagtctggaggcagggaacctaagggcgtttcaccccacttcctaaactaaattgaaaggaaaaccctaactttccacacctgagtaacaaaaggaccagaagctgctccctttgcaaaccctcaccttttctgcgtggcagatgggaaactggctgtcagcaaccaatgagactgattgcgggtggagtctttgcatagaagtgcaactttgtaacttcaccttagcctctgattggttgctttttaaacagaagtgtgcaaaaagtgtgattgcacagaagtgtgacctttgttaactccacttcagcctctgattggttgacgaaagcaaccaatcagactaattgtgcgtcaccacttcatttacatgagaaacctccagggggtatttggacctcagaagattctgcatccggaaccttgagccaccgctggggccgcttccatactgtggagtgtactttcattctcaataaatccctgctttcttctttccttgctttgctgggcgtttggtccaattgtttgttcaaaatgccaagaacttggacgacttgcagtcaagaccctctaatggtaacaacaacaccgtgacagagcttttactaaagggctgaattaaagattacactataaaaggggaacactgtaaagctgtcagctaaactagtctttcctccacagttcgtgaggaaggaacctaatttatacattcaacaaatttatgccagctgttctctgatgtgcccaaggcagataaaatctatccatggaggtttcatttcagtgagagggagatatacaagaaataagtaaacacctacattgccaacataattagagatggaggaggaaaataacagggtggaacttctgacagctctcctgggaaggtctctgtggaagtgatgtatttgagctgagacctgaaggaagggaaggagttggccgaaaaggtagaatagaattgcagaaagagatcaaggggagctcttcccaggggtcccctgccctcatattgcctgtcttcactggtgtcacctaatctcctactgctcataacctggctacctatctttcactatctttcaggacaactcagccctatgcatagggatgggttccccccaagcagggactgcttcagagtccaggcaacatctagttacatccctggatgatgggtcttgtttgagtgaattgttttcaccaccagactgtgaaggcttcccattcaggaccctggtgttcatccccattgtctgggaactctaccctgtttctttctttcttttctttttttttttttttttttgagacagagtctcgctctgttgctcaagctggagtgcagtggcgcgatctcggatcccaggttcaagtgattctcctgcctcagcttcccgagtttctgggactacaggcgcacgccaccacgcccagctaatttttttttgtatttttagtagagacagggtttcaccacgttggccaggatggtctcgatctcttgacctcgtgatacacccgcctcggcctcccaaagtgctgggattacaggcataagccaccgcgcccggtcccctgtttctttaattactgttactgaaaggcatagcctttgaatgagttattaatccaaaatcttttgttttccattcttgctctagtcacagcttatttttccagaccatactgttctaagcctcaattacattaaggccaggaggccaccgaagaactccacatgccactgcactggcgggtggagcaagtcaagcagggcagctcatgaacgcccgggagtccaggaggcccgggtggggacgcctggatgacgtcactcgaggtgggcaggccccgcgcggggcgtgacgtcacgcgggcggtcccgtcagccgtgaggtcacctggtgggcgcggccaggccgaatccccagtgtcgtcacgggagggggcgggcccagagcgtgtcagtgcagccgaatcaaaacaagccggagacccgccttttccctccggctcgggagcgtctcgcttgcgccccgggcccgcggcgcccgcgcggctgcgagcctcgggtggccgcgtgccggctccaggaagccggagagggcgcggcggccaggatggcgcggcacgggccgtgcggctagacgggagccgagggaaccgccggctcgcgccctccgttctttc

SEQ ID NO: 37128 - DNA, 2300 bp, Homo sapien
gagtcgcatttattgattttgtaggctttaaaatgtatacattttaaaatttatgtaactactgtaagcataaggaatttatcctattttcattttagtacatgtaggttcaaataataatataatccttcaaataatttccacattatttaaattattctgttaagtgagtctatacattatttaaatttgaaaagcactgacttgtttatatttactaagagatgtgatcgggtcagtttgctacaatccaggatggaatgccacccaatttgtggcactcaccaagtattcattaatttagaagaaagtgcttttctctttcatcaattttaattcactaacttaattatcaaataatatagtgaacagcttcattgtcttcaacactggaatttctttatcctgacttctgcttgttgggtgcactcatctatatataacttatgcctcccctaaactcagagaataagtaggacaaaactgggggtgggatgttttcatttccttttgttgccataacatcttatcacaaatttagcagcttaaaaataacataagtttgctattttatatttctggaggtcggaaatccaaaacgaatttctttgatctaagatcaatgtcgcaggattgcatccctctggaggctctagagtataatctgtttccttgcctttcccagcttctagaagcttcctgacctatgctgaggtcatcaaatctccttttctgcctccaatcctactgccttcctccctcatttataaagacccttatgaggctgagtgcaatggctcacgcttataatcccagcactttgggaggccgaggtgggcggatcatgaggtcaggagttcgagaccagcctagccaacacagcgaaaccccgtctctactaaaaatacaaaaattagctggatgtggtggcaggcgcctgtaatcccagctacttgggaggctgagggaggagaatcgcttgaacccgggaggttgcagtgagctgagattgcaccactgcactccagcctgagtgacagagcgagactctgtctcaataaataaataaataaatacccttatgattacattgaacccacccagtagttcaagataacctccctacctcaggatccttcctcacatctgcaaagtctcttttgtcatgtaaagaaacatattcacaggttccagggagtaggacgtggagatcttttgggtggcattattctgcctcccacaagggatgccactatgcctagcctgtccccagagcagaaaccgatggaggaatctgctttggaagtatgggaacacaagctccagaaagaaaaataaaaggcaaatggatgtaaattaatagacaggcattttatggtgaatcagaaggaatttctttttctgaggaggatcaaggagcatgttgaggatttacaaaatgtgggaaagccaccaactaaggaagaaaaagcagactgcttccctgagggtttgtttgagatgggaagagttacctgggaaagactgtgctccaaggtcacaccaattaccacgtgcatgaagattatactcagttcagctccaaaatcaccatctacatgtttatttcaaactttgcaaacaaaccaaacaatgacatcagaattaaaatggttccaccacctccctgttcttatgccattgtttttctttttccatgattcctgtaagaaacctgacactaattaagctagtgcaagaagaagaagaaaaagaagatgaatcttccaccacactggagataacccaagaagtaagaaaaactgatctctacccaaaaaggacaacaatggtgaaagactgcatttgcaacgggggtaatatactcagagtttaaatttccgaaaggacaaacaaaacatggagagtctaatgagatcttccagctgcttctctctgctaaggtatttcccctggcaacagctagggaagcttgggtgtattttccccttgctgtgtcatatgatgttcctttccctacccccacctcctccagactgctgcctccatcagtgcctgtggcgtgtgtgtgtgtgtgtgtgtgtgcgcgcgcgtgcgtgcacgtgtgtatgtgtgtgtgtgtgtattgggtttctctctcccttgtaagaacacagccagcccgccctctcctgctgttgctgcagctctgacttgctttttcctgcctccttcctctcctctctcttcttgcttagcttcttgccttctggtaagtatgacaaacactcccccaagccctgtgagaaggtatagggtgc

SEQ ID NO: 37129 - DNA, 2300 bp, Homo sapien
cacctttccttagtggttgcaagaggaatttagattagacattcaaaagctgtttcttgtgtcgaaagacacttgcagtacaaagaagggaaagtaaacaatcccgcgatttttcaggttgggttttaccaatattttagaatctgtttttttataggaagtggccccttcaggtatccaagcctctgatacggtaaactgcatgtcctgacctacaggtaaaggtggtgggaggttaggagaatagggaattgttgcaactaacaatgcaatgtgtcatgtgcccgtatctctaaaaagtaaatatttttgaggtttaaaaattatttgcctgcacggtttgccggagagcctggaagaggaaagaagacaagacacaaagtaacaacatttacaaaaatatgcctgactaggaaaagacagaggggtcatagacgaaaataatcaggattgggtctcttttgcaaattcctgaacggggaaatgtatcagaatttccagtcctcaagaaacagggcctttaaaagtcttgtgtgcaagaagggggaaaaagacgaggggggggcggggaggcggactcgctcttcgcagcaggaagtcttcaatggctatcgagttatgaagaaacaactgcccagaagtccttattcggagcgctaaactcgattttaccacataaagagcaatgtaaaagctcagaacagccccatcatggtgttggggaaacaactcggcttccccatgtgagaaagccagagagctccgacttggtagtagcccagacctgtgttaggggttttatttgcaagtcaatgaaccaaacgggcgaccaggctcgttgtgccgcgttgtggaagcaaggttattattatcgcccattgccccactgaacaatttcactgaaaaggaagagtcccagccgtgtgtgtgcgcgtggtgccatacgggacgtgcagctacgtgcccacctccagaacgactttatttacaaagcgattaccacgttatctatttgttttccttttccagcaagagcagccttactcagccctcaaatttcttaattacaaacccgtttgcttctaaatcaaccccaaaccgtcaggcagagcccggagggaggctctgcaagtttgtacacacccccacctcccggatccagggcaacagcagaagcaagtaactgtgtatgtgcaaaaaggtggatctggggacgaggatcgctgagtttgtttacagagcagagacgcctcagctcggatgccaaagctaccaagagctgcaaacgcaaacttagcagaagcacacgtaccccgggagcggcaggcgggcccgaaagcgcggactggaattccagggcgcgggagcgggggtggccgggccctcgagcgcgctccgtccacctgcagcggctgcccctccccgcccccagctcctgtccttgaaaggagtggaggaaaaaaatgcatctacaagcggtgatctagagtaggtctacccactgcccgtatgaaaacacaaaggcacagcctaggaaggcgcgctcaggaaagggcgcattatttgtccgggtctttaaaacccaactcgaggaagcacagccattcttcgctgcctgtggaagcttttgcaaaaccggggaggcacaagggcactctggagggcggggggcgctgggcgagtccccttttcccgtagagagcggggcagatcgctaggtgaaccgagtgagaaagctgggggtggggtagatccagcctgaggggggcggtgagctctcctcgtggctatcccggcaggctctaccttcgggcggggcggcaggggaggattttccccctgcctcgggggtggctgagccaacctcgcgtttctgggccgggaagaaaccagagtcggggggcgacggggcgactgggcggcccccgggccccgcagcctctgcagcacgtgccgcgggcggcggggacgcggctccgggacccggtccagggtgttcgcggtgttccggaatccgcgtcttggcgccgcccgccctggaggctctcgctccgcctttccgaaatgcctatattaactgtggccaaagccctaagaaacacagctcattgttggcagctgccgggcggtcctgccgagctgtgagggcaacggaggggaaataaaagggaacggctccgaatctgccccagcggccgctgcgagacctcggcgccgacatcgcgacagcgaagcgctttgcacgccaggaaggtcccctctatgtgctgctgagccggtcctggacgcgacgagcccgc

SEQ ID NO: 37130 - DNA, 2300 bp, Homo sapien
aaaactatataataataacgaatatgtaaacatgaatccagcctggattatatgatcttacaccaatacagtcataaaatatgattatcaatatttttatggaggaagaggcccacaaaggcaaaagcaaagcaagtggaccacttaccaccagacaagccacaaaagtcataatgcagcgctgacaattgtgtgagctggaatccagtgagcaagaaaataacattaggaagaagtacagaaaattcctgaacgctagcgccctatgtttgggaaagaaatccctctcttttgggtgaggacaaagaagttcccatatcctacccaccctcctgcccccaccccagcaacaatgcaactcatagaacattctgtgccctatcacattcattacacctatgggacgcattcactcatcaaagatcacccggctactgaggcatcctcatttctatcgttcagtggtcaagctcttcttcccgttcagcgtacgtagtacctagtctgttgagggtgctttaaaatgtttaaagaatgataatgatcaatttctcctattttttttttagcttttgaatcaaacatttggaaacattgaattttcatgctgcattctatgtattaattatgaaataactctcatgattggaatattctaaatgaagaaaacagaaaaggagttacgtctttctgttatttttcaccaaacacagtacactggggcttataaatacactttatcaaatccctctgtgcaagtagtcccgagtgctccccctaccaaccctgcaccatgagagaatgaataaatgaatatctaacagggcccacacaatacccacgagataatcggcattctgaaagtgtctgaagatatcatgtatgatagacaccaaagagtgaccctgtgcatttcactcctgaattactggttggcagaaatggctgagcaacacaaacagatctgagaaggacaaaacagataaattcagaaaacaggtcagcatgattagtagatgtcagaaatgatacttttctgtcccccacccccttctgatttatgcaggacactgtttctaatttcctttgtttttcaaccccaatatattccagctccagttattcactacaaatggccacactgtttactgaaggctggcgtgtcagttgttgaaggaagaagggaccgaagtagtgcctgtctccagaagcccaatttctaacccctctggggttccagcctcctagcgagtagacgaagactgccaaaggttgatctccaaattgagtttctccaaggccagcttgcagaggcctggcaatcagaagaggatactaaaggagcatcctaacgacagacacactgaaaataattatcctgattcacaaacaccctcaaagctatgagaatggtcttataagcaaggtctgctttaatggaaacataagtattatgcattgcagtctatcgtaaattggttgtaattttctcctgacactttctgaattaaactagttagtatacgaaaaataataataataataataaaataataataataaatgccacaaagcaaaagcaaactgggtgtctgaaggttaatgattgctcatgaaagccacagaaataaattatctgcctagggacactgtcacatgatcagcacaaaagctgcaacagccaaaaatgtttatgtagaggaaaaaaacacatcagcgtcacagaacccttccccccacagctaaattcaagtcctgagccagccagctgctcctgactgcttacattaaactaatttgtgctgctacattgcagctgcttaatttttagtctgaactttatcaccaataagtgttacaataacaagcgatatgatggtatctctgaagaaatatccatcaacccccaaacaatgacaacctcacaagagtacactgcagaaaaacaaatttaaaaaacaacaacaaaaaaaaacaaaaaaaaaacacaaaaaaagaaaggaagaaagaaaattacccccacactgcctctttaaagggggggaggggcaaacttttagtgggaaaggctttaaaatgctgctttgttccaaaggccattctgcaatgatgaagggggatgattgaaaaggttagtagcaggggaagagttaacaagtaagatgtgcttttgctaagagggggtgatttgcaaggtgagagctttagaagggggaaggcaatttccttacaacaatgcaatcggtactttctgtcttgctcacagtcctccaagacgttatgcaaacccaaactgcagc

SEQ ID NO: 37131 - DNA, 2300 bp, Homo sapien
acatctaatcccccatttttaactggaaatccctctattatcttttattattttcttcttgtttctttggtttacttggttagtgttttattggtgctttgagtaatcaatcacttaacttatttatgtaaatctcagtttctgataaatgtctctaaaactaaaaatttcattagtactaatttacttccaaaatttgacctttaagctttcattgttattaaactgtaaatatttcacagtttttcttatgtctttctctttaaccaaaaaaaaccctcatttttttaataatatgttttattgtttccagcaacatggatcatggaattactaaagcaatcccttagttttgatttctgattttattgtgttgtgatcagagctaaaagtctatatgatactgattttagggggagtattgaagctttttttgtggcttattgcatgatagattatttttttacattccatgtgcttgaataaaaaagtgtactgtgtacataggcaggggcaaggacttcatgtctgaaataccaaaagcaatggcaacaaaagccaaaattgacaaatgggatctaattaaatgaaagagcttctgcacagcaaaagaaactaccatcagagtgaataggcaacctacagaatgggagaaaatttttgcaatgtgctcatctgacaaagggctaatatccaaaacctacaaagaactcaaacaaatttacaagaaaaaaacaaacaaccccatcaaaaagtgggcaaaggatatgaacagacacttctcaaaagaagacatttatgcagccaacagacacatgaaaaaatgctcatcatcactggccatcagagaaatgcaaatcaaaaccacaatgagataccatctcacaccagttagaatggcaatcattaaaaagtcaggaaacaacaggtgctgaagaggatgtggagaaacaggaacacttttacactgttggtgggactgtaaactagttcaaccattgtggaagacagtgtggcaattcctcaaggatctagaactagaaataccattttacccagccatcccattgctgggtgtatacccaaaggattataaatcatgccgctataaagacacatgcacacatatgtttattgcggcactattcacaatagcaaagacttggaaccaacccaaatgtccatcaatgatagactggattaagaaaatgtggcacatatacaccatggaatactatgcagcaataaaaaggatgagttcatgtcctttgtagggacatggttgaagctggaaaccatcattctcagcaaagtatcacaaggacaaaaaaccaaacacctcatgttctcactcataggtgggaattgaacaatgagaacacttggacacaggcagggaacatcacacactggggcctgtcgtgggttgggtggaggggggagggatggcattaggagatatacctaatgtaaatgatgagttaatgggtgcaacacaccaacatggcacatgtatacatatgtaacaaacctgcacgttgcgcacgtgtaccgtagaacttaaagtataattaaaaaaaaaaaaaagtgtcctgtgtgttttttgtgaaaaagcattcctaggcctggtgccgtggctcacgcctgtaatcccagcacttcgggaggcagaggtggacggatcacttgatgtcaggagttcaaaaccagcctggccaacacagcaaaaccccgtctctagtaaaaatacaaaaattagccgggcgtggtggcgcatgcctgtaatcccagctacctgggaggctgaggcaggagaattgcttgaacccgggaggtagagactgcagtgagctgagatcatgccactacactccagcctgggtgacagggtgaaactctgtctccagaaaaaataaaataaaataaaataaaataaaagagagattcctaggcagtataaattaagcttattcattctcaatttttattttattttattttttatttttggtgtcctttgcaactacttggtccttcttcgtggttcctctttcctctctaaactctctaacagtttttcgttcttgttgtcatccgtaggatttgcagaaagagccaacaactcctacagatgatgacagttctcattctgtgagtttatctgatccttatttcattttattaatacaacaatggcaattttggctgcttatacttttccatttggctgcttgctatagagctagagggacttcaaagagactcacatgaaatatttttgttttataagtagaaaagct

SEQ ID NO: 37132 - DNA, 2300 bp, Homo sapien
tgcgggcataggttttctgaaagtgattgttctttttacaagaaaaagttagataagtcattgaaccttaaattctcactaagagtctgaacatttttaatttttgtcatctgaggttttttttttttggtgcttttattggaatttcagattaatagttgggcttattctcagaagcaaccagtactaactgaaaataaatgcaaacctggttgcttctgactcttgagggtgaaattagtataacaagaaaaagggaggtgcttgttatctgagtatatttctttattgttcatcaatcacagtttttagtgttttcatttgtaacctgcaagtttaaaaacaaacagaaaagaaccttgaatcttaagattctttttctgtttctctcccttatatctatttatctatttatcaattaatctacctacctgcctatctacctatctctctctacatacacatatacacatatgtactatatttagactacatatgtatagtacatatgtatatgtatatttagtacgtatgtatatgtatatgtgtatttatgtgtatatttggactgtacatatacagtctaaatatagtacatatatgtatgtatttatactatatatgcatatttatacacatatacagtctctttatatatgtagtcctgaagaaaggattggaatatatttcatcaaataaaatactaacatattttggacataaaagggcataaagtctgagacatggaatgtcttgtaatgtccagctgaatcctaaatatcctcagtgataggatttcaggcatttctcttggaaagtgattccattatctaatagttttcattgggaggaaatttttcccaacaggcttaatgttcctcttctcaactggttccattaaacctaattaccccttcctaaagctgagcaattcctctcctattggtatttaccaagttttaatagtggaaagcaacaattagctcttcagctgtcataaaatcagtgtattttaaacttttttggtgtttctttttaaatggtatacatacatgcatatgtatatgtgtatcacacatacaactagtcaccaaatttgctttagtgtttacttaatgctgaaatcatatcagtatttcagatgtgcttacatggtaagacattattgacttttctcttataaattctttatgtccacaggtggccactaacaatatagtagccttcattcacattttataaaaatgggttataggtgacaagccacagcttaacaatctctagcctctgtgaaagttggcttatgtctatagtttgggctggtgaagattccaagaaaaaaatgccactgaccccattcagttccatcaagaaagggaattttgttctatgggggagatggatgttattacttattctctagagagggacgtttaaaatcacttcagattgttggaatctatagcctgcgctatcatggcaggaagctcagtgatttttaaattatttacaggtaaaatccccacctcctgtagtttttatttttagagtgtccatttcaggattttaatgctgagaaagtgaaactatgctcgctcttgtcatcttcttccctctctcttcctttgaccttcccccttcgcctccccttccctcctagtgctctgctccttcccatttcctttcctacctcaaatcccattacccaccgccataccttttttccttctttctctgactctgatttttcccagttctctcttaatgaggtttatttgtgagcctcaagcctcatattattgttcagtctttgggtatcctccatgctgggggctccttcctgggcccatgaaagatgagtttagggtctgaaagaaggatctttcttcttgccctcaagtcacttctgtagcctgttgtggtttgcatgctagatgcatctggactacatggaaaagatttcctagaagtgtctatggactgactgtgttactcccaaattcatatgttgaagtcctaatccccatcttgatggtatttggaggtggggcctttgggaggtagttaggcttagatgagatcatgaggttggggactacgtgatgggattaatgtctttcaaaggaaatgaagaaacacaggagctttctctctctccatgctcaggtactgaggaaagatcatatgagcacacagcaaaaaggtaactatctatcaggtaggaagaatgccctcaccaagaaccatatcggccagtaccttgatcttagacttcccagcctccagaactgtgagaaaat

SEQ ID NO: 37133 - DNA, 2300 bp, Homo sapien
atccatgtgagtggctaaagtaaataggctgataacattaaatatggataaggatattgagtaactgaaatccatacattactgatgggaatgtaaaatgcagcagccacttggagaaagtattggcactttcttataaaactcaaaatatacttaccatgagacccagcgtttttttctttctttttttttttttttttgagttggagtctggctctgtcacccaggctggagtgcagtggtgcaatctcggctcactgcaagctccgcctcccaggttcacgccattctcccgccttagcctcctgagtagctgagtagttgggactgcaggcgcccgccaccacgcccggctaattttttgtatttttagtagagacggggtttcatggtgttagctaggatggtctcgaactcctgacctcatgatccgccggcctcggcctcccaaagtgctaggattacaggcttgagccaccgcgcccggccgagacctagcattttttatcgttgttatttatcccaaagaaatgaaaaccaaaaggcttttataattacgatcattctgctcttttctgaattgctttaaactgtaaaaaaaaaccttggcgtacatgaataggagaatgaatatgtggtatattaatacatgaaaatatttttcaacaataaaaagcagcaatgtggtgatacagcaacaagaatgaatctcaaaaacattatgcttagcataagaagctaaccataaaagcacgtactgtatggtttcgtgtatatgaagtcctgcgataggcaaacctaagtatagcgagaaaaatcaaaccaagagaacaggagttgtctctgggagtattcaagagattgattgggaaggggcataagggaacattctggggtaaaaataatatcctatgtctcgaaaggagtttgggttatccagctatatccatttattgaaactcaaatctctcctacactttatttatttcatactatataaatgcaaaaactataagattagattaaaaaaaaaaccctcaaggagaatactcatgtaagccttgaatcaaggtgaaaagaatggcacaactggagaaagaaagtatatgcaagcctgggggccagagagactcctgggcacagctccgcagggatttgtctcatataacactcttagtctgtggattataagccaccaatatggaatgaagaatatgagtttcatgagaccgggaaaaactttccagctggatcttttatgctgattagtcacattgccaagctagtaaacatttaaccagttacaccaggtgtaagcgatcaataaacaagttggtcttgggtgtaaagtataaaatgggaaaattaaacagcacagtattaatcgttagttaacccacttgttttatcttggtcccagacttttctaggcatctccagttgttaagcacagagctgtcccagtgtagctgtcacataatggtatggtcagataatggtatgcagtaaattttaaataaaagaaaataagctgtaaaaaaattgcactcttctttataatctgcattcagaagtacttaagcagaagaatatagattctgtgatttactttaaaacgaatagagcttgatgacggggagatgagtaaatacagggttaaaaataaataaaatactagtggtaaatttaggaagtgaatgtactggtgtttattttaaattctttcaactttgctgcatatttgaagatttttataagattttggaaaaaatctgtaaatgcaaagatttattaaatgttctataactaaaaattttgacctaggaaaagggattgctccaataaaaatatgagtgaaacaaagtatgttgtcttctctttcctaccattctttgtttcttgctctttgtgatggttaatcctttggattgaaggatgcaaagtattgttgctgggtgtctctgggtgttgccagaggagattaacatttgagtcagtggactgggggaggaagacccacccacaatgtgggtgggcaccatccaatcagctgtcaccttggctttaagacagaagaaggcggaagaagctgacttgctgagttttccagcgtttatctttctcccgcgctggatgcttcctgcctttgaacatcagactccaagttctttggcttctggactcttggacttacaccagtggtttgtcggggctctcaggtcttctgccacagactgaaggctatactgtcagcttccctacttttgaggttttgggactcggactgagccactgctggc

SEQ ID NO: 37134 - DNA, 2300 bp, Homo sapien
ttaggaacacacagacacaaggaggagaatataaaaattcatacagtaatttcgatttcaatatatttttatataaaatatgttaaaatggcatagttgcagtttgaattttagacacttcataattagaagattgctttagtaatttattctgtatagtaatattggatgttaaaaagaaaacaaataactttggagataaaattcctagagacatttctcaacttacatgtaatattaatttccttgctctcttttcctctttctcttgctccctctccctctatatatgtgtataatttttataaatataaatagaatatttatatattcaaatatatttatacataaatattctatttaactaatcttaattttataatgaattattttaagtagtgaaattccagaagagtacaataaggacttttgagttagaaaacataaaacttaaaattgattacaatgcaaatgtttaccttgtctaattcaattatgatgtgacagtgctcttggtgggcaatatctggaaaagttgcttaatttataagtgacattgcatatatacacatcttatcagtttatggctagatcatcataggtagtccttggctagttacattgttattattcaattgttcaattttatcctttaataacaaagaactagtcaaatgttttccctaatgaagagtgttatttagctaactccagaactgagccaccatttctgatcagtttacattagactcagatggtggtgatttgggaaactgttttgtgcttagggacaacctatttaaaacagcatatcagatgtttattgaatatatatctacgagtggcattactcaatcataagcatacatatactctgccttaatagatagaattaacaaataaaattgtcgagccaggttccaaaagaaaaaataagttagtaatttattttaaaaaattgtcagtttccagtaaagctgaacatactcaagtactatgacctggcaaatccacacctgggatttattcaaatgtgcacctgaacacatgtaaaagaatgttcatagaaacgttactcaggttgactaaaattgtaaggaacccaaatgttaatcaatatagaatggataaacaaactgtggtatatttataaaatgatgtagtatacagtaatgaaaaatgccacctgagaaaaaacatgagtggatctcacagatatggtgtcgagtgaaagaacctagacacaagagtgtatgctgaatgattccatttatacgatgctcaataggaggcacacttattcaataacaagccaaatggtggttattttgggagatggtggctagattgtgggctctgaatgatggttagattaagcagaacgattaagaaatgtgtacgttatacacgttataattcaataaaatataaatttaaaaataatatgccaacaataggaaataattttcacatttaaggtaagaacagtagatgatcagaagaagagtagcgagaggatttcatttatgagcttcattctttggcactcatttttttcccctaaattctgtgtttcagcattagggacttgccaactcagccctttaatcctcagagattccaaagttcttgcctggagctcctcctgcttggaggcgggtaaggatggatgtatataggggcacacacacatgcatggaggactgacctcccctccagttccacacaatacaacaggaacttcacaaacaagagcaaagctgtgggaaaagcaggttgcaggtggccccgcctagttcccgggatttcagctgcggcccgctggacagcgccaggatgacttctgcttctctgggcgaagagtccggcaggtgcttctactgatccccaagggacagctccttgttcctgaaaggctgttttccgctagataaccgcgagaacaaaccactgaatacggaacaaagacgcaaccgctttgctttttttttttttttaatttaaattcagagttagccggagccatttcccccctctagaagcggagcgcccgagtgtgtggacagacccctccccaggtcctgaactcttagggacgtggtgctgtgaggcttgccccgcggacagtaaacttgcaggggcgagagggagggacatcgattaaacctaaatcgtgggcgttcagtcctcagggcaccggagcgcgtgaaaactccagcggactctgctggaaaggagatcatgccctctaagtctctttccaacctctcggtgaccaccggcgcgaatgagagcggttc

SEQ ID NO: 37135 - DNA, 2300 bp, Homo sapien
gagagtaaaatccaactccaaccatttcactttcttatttttccctcagtcctgctcatgagggtatgcaaataagagtacacatgaatgtatgcaaatgagaaagagtggcaaaattcacttctgaagggggagatcaggagagtaacaggagggtgcagccttctaccaggaagaggaacatttgtttctcagacataagatgatggaatagagaaaagataaaacataagatctagaaagacatcatagtcaagtagtaatggctaggtgcacaggctctgaaaccaaaatacctagattttaatgtggaatactcatccttcctggctgtgacctagtgcaagttatctagattctatgtgtcttatttttctcatctgtaaaataataatgatatgttcctcatagggttgtggtgcaaattaaataaattaatataaagaccctagaaacatgcatgatacatagttgatgctcagcaaatgctgctagctagttattattactttaagttgtggtagaggcaaggcaaaataattcatatctggtggtggccttaatctcaatagcaggaaatgctgttgtagaccaaggaaattggggctgagtgcctagcttgaatagagcgagagaagtttgaaacaccatctgtggactacagcactggtccttaaccctagacgtaacattaaaattacatgaggaccttttaaagatactgacatttaggatcccacctagaacaattaagtgagaatgcctggagtgggctttaaagttgatctttaagggcagctgcggttgagaatcaagaagtaataggaaacaaataaatgaaaagttgtgagtatagaaagaaaacagttatggttatccaactctgcttttcttcattgatttctctaccaatctagcaacttttgactggaaagtccaaatagtgggagtaagagaaagagaaagaaaccatacattctccagtggtaggaaatatgccgctgagattggggaagaagacagaactgagtttcaggctgagtaaaaaagcccgacccagaataagatgatggactttgcaaataggtctaggcaacgtatgtggagtgggataatatgaggacatggagcggtttcttctgggggtgagagagtgatcagaaaatagtaggcagaggggaatttccgagctggagattttggctcttggggatagtgtgatttcagtgaaaactagttttaagatgaattgtcaaaactgaggactgagataaaataaagaaggttattggaggaagtaaataaagtgtacagtcctgaaagatataagtaagggatggagaggagaggaagagaattgaagtcattgagggtagaaggaaaagtgatgcctactgtacaatggttaagagttaccagcgttgaaaacgtcccaaacaccctatcttacattaagacaagataataaatatgaaaatactttacaaattgttaatcactctccagaaaaaaaaaaggtgatctacagattattcattcactaaaatacgtactagccagctgagaacaaaagttcaatcttctttaagcttcatatgtttagcttaatttggcgcgaaatctgattattttatccagtatgtcaacatagaaaaatttaatttacaatttaaacacattatttctctctcatgcaagtattgaaattaaagtttctaaaatcaaaaaggcttctaaaggacactgctatatggaatattaatgtggcatattaactggaagtggtaattcctgaatgacgccaaaggcaattctcgcctttatactttctcccagtcaacatacattattttcttgtttttccttttctatccttccttttgccacaaacaacaaaccaaacaaaaaagcaaaacaaaacaaaaacccttcctcctaccagcagagagcgctagcgccatgcgcggcataagcgccaaaatgctcgggtcttctgtgggttctaaccgccgagagccaagcaccctgaggttgtcccagctggggatccgtagttgacttgacgtcgctgagcaacggaagagtgggcagcatttgctctgaacgctcgtgcgcgctaccgcccagacggaagcggaagtgccggtggagcgcgagtaggaagtggtgagttcggagtagagatggccgcgcttgcaccgctgcccccgctccccgcacagttcaagagcatacagcatcatctgaggacggctcaggagcatgacaagcgagaccctgtggtggcttattactgtgag

SEQ ID NO: 37136 - DNA, 2300 bp, Homo sapien
actaggcagttgatattagcaagagcaattcctcaaatgaactgacaacttaagtgaggaacaggctgacgcatgtgggctccctgccagtaaaagacacaggcatattcaaattccctgaccttttgtgttactggagaatatgaactatacagaaaagaaatataccctccccaccccacagagtgaactgagtggtgaagtagtgaagactaaatgtggatacttctgttggaaagctcatttgtgaagtggagcaaaatgtcatacctggaagaaaatcagaatcaatgtatagatttttaaattgaatatgtaagaggagtgtttgataaggaaatgtgatacaaatttagtaatttaggggttaatttttttttagttttctgtacagaagctgcctgtagtagtatctagagactcacattatagaatactcaactaagtatctggaccacctgctgcatttgtacttatcagtgacttcgtggatctttgcaaaaggatactttctttcttttttttttttttttttggccgggaggaggtccggagctgggctggtgcagtggcgcagtcttggctcactgcaacctctgcctcctgggttcacgtgattctcatgcctcagccttttgagtagctgggattacaggtgtgtgccaccatgcccggctaattttttgtgtttttcatagagacggggtttcaccatattggccaggctggtctccaactcctgagctctggcaatccaccctccttggcctcccaaagtgctaggattacaggcatgagccactgtgcctagccctctatttctttatttcttttttttttttttttttttttttttttgagacagagtctctctctgctgctcaggctggagtgcagtggcgtctgcctcctggcttcaagtgattctcctgcctcagcctcccgagtagctgcaactacaggcacgtgccaccacgcccagctaatttttgtattttcaatagaaacagggtttcactgtgttggccaggctggtcttgaacttctgacctcatgatctgcctgcctcagcctcccaaagtggtgggattacaggcatgagccaccgtgcctgttttcaaatagtaaaaccacgttcgctctggaacgctaatgtgcgtataaatcacctggtggtcttgtagtgcaggtgcaggctggcacttgtagatcaggttcagtagatctggggtgggcttgaagattctgcatttctaacaagttcccaagtgataacgatgccactataaaggtcagtggaaaatataaactaaaaatcactagcacatccaaaattctaagagatttttatatttttaatgcaaatttttatcttacatcctgtaacattagcatatcatgttacattagttttaagacatagaagaagaggcagctaacaggttcttcatgatcttttcagttaacccaatgaggtattatttttccctttttagaatcagggtaactgaggttcagagctgttaactagcatgtgactagttaaaaagtcaggtttacctgcctatcagtctagcatttgctttaaccaccacatcttaattttctttttatttttttcttgatttgtacagttctgtttttttgtctttagtgaaaataattcaatctattgttatttttatatttagtcttagatttctactttagcctatttctcccctgtgcagaagagttgcaaattttgctggaaggacactcctgtttttccgttgcatatcctttctgaaatgttatatgataaaagagaactgggcgtatgttttgaggacaatagcttttcatgaattctgtcaagccttaaatacttggtggattccagcaatagggtggggtattgccagtttcttttagagctgtaatctgcaaaaataggttttatctcagaaatatgatataggtcatcataaatgtttactttttacttctttaccatagtccaatgttgatataaaaatgctctcttttagaatgtgaaacacaggaagtatgccagatggaaggcaacatacatccataattgtttaaagaatggggagactcctcaagcaggccctgttggaattgaagaagataatggtatgtatttatttattctgagtaaaaggacttagtagaatcataattattcagtagattactcaaagtttttggagggaacaatacagttttgttttcatcaggcccagaatcaatgaaagttaagtataaaatcataaacttagggacagtgagaaata

SEQ ID NO: 37137 - DNA, 2300 bp, Homo sapien
tctcatattgctataaagaactacctgagactgggtaatgtatgaagaatagaggtttacgactcatggttacacaggcttaacagtaagcatgactgggaggcctcaggaaacttataatcatggcaaaaggtgaaggagaagcaggcatcttcctcacatggcagcaggagacagagagggaagggggaagtgccacacacttttaaaccatcagatctcgtgagacctcactatcacaagaataacaaggggcacatcagcccccatgatccagttacctctctccaggcccctccttcaattcaacatgaggtttgggcagggacacaagtccaaatcatatcattctgttcttggcccctcccaaatctcatgtccttctcatattccaaaatacaaatatctcttctcaatagtccaccagtcttaactcgtttcagcattaactcaagtttatagtccagactctcccctgagacaaggtaagtcctttccacctatgagcctgtaaaatcaaaaacaagttagttacttctgagatacagtgagggtgcaggcactggataaatgctcccattcttaatgggagaaattggccaaaacaaaggggctacaggccccatgcaagtctgaagcccaccaggaaagtcattcaattgtaaagctccaaaataatctcctttgactccatgtctcacttccaggtcatgccaatgcaaggggtgggctcccaaggccttgggcagctccacccctgtggctctgcagggtacagcccccttggctgctttcacaggctgatgttgagtgcctgtgacttttccaggtgcatgatgtaagctgtcagtaggtctaccattctgaggtctagaggatggtggccctcttctcacagctccactaggcagtgccccagtgggcatgctgcatgggggctccaaccccccatatcttctctgcactgctcttgtagaggtgttccatgagggctccaccagtgcagcacacttctgcctagacatctgggcatttccatacattctttgaaatctaggcagagattcccaaacctcacctcttgccttctgcgcacccataggcccaacaccacaccttggtgtggccatggcccaagccacaccttggtcccttttagctatggctggagctggagcagctggggtgccatgtcccaaggctacacagagcagctggccctgtatctggctcatggaaccattttttccttctagatctccaacctgtgatggcggggtctgctgtggtggtctgtgaaatgccctagagacactttcccccactgtcttggctgtgaacattcaactcctctttacttatgcacatttgggtgatagacttgaattttgccccagaaaacagggttttttttttgtaccacatgatcaggctgcaaattttccatacttttatgctctgctttttaaatataagttccattttcagataatctctttgttcatgcatatgagcctacacttttagaaacagtcaggtcaactcttgaatgctttgctgcttagaaatttcttttgtcagataccctaaatcatctctctcaatttcaaaattccacagatctctagggcaggggcaaaatgcctccagcctctttgctaaagcatagcaagagtgaccttactctagttcccaataagttcctcatctccatctgaaaccacctcaggctggacttcattgtccatatcattatcagcattttggtcaaaatcattcaacaagtcacgtggaaggtgaaggggaagcaggcaccttcttcacacggcaataggagagtgaagggggaagtgccacacacttttaaaccatcagatctcatgagaactcactgtcacaagaacagcaagggggacatccatccccatgatccactcacctcctaccaggcctctcctcctatttgacaggagatttggatggggacacaaatccaaaccatatcacactgtaacaatagatatatgtcattataaatttgtccaaactcatggaatgcacaacgtcaagagtaaaccctaacatagactctgggtaatactgatggatcaatgcaggttcatcgattgtgacaaatataccactcaagttggggagtttaataatggaggaagctatgcatggtgaggaaggggagataagggaaatctctgtaccttcctctcaactttgctgtgaacttaaaactgctctaaaatataaagtcttttttaaaaatagtgcatttataaccactgtca

SEQ ID NO: 37138 - DNA, 2300 bp, Homo sapien
ctattaaaaaatcagtggacaatgtacaaagaagattattctccattctgcaggtaggcctcatccaatcagttgaaggccttaacagaacaaagactgatctaccctaagcaagaaggaattctgccagactgcatttggagttggactataacttttccctgaatctccaggctgcctgactgtaaattttgcactagtacctccacaataccttaaaactaaaatatatatatctatgtgcatacacacatctagctggctccgtttttctggagaacactgaataatgaagttatttatatgtcttttctttttttgaggcagagtctagctcttttgcccaggctggagttcagtggtgcaacctcagctcactgcaagctccacctcccgggttcaagtgattctcctgcctcagaaaaggtagctgggattacaggtgtgtaccaccaggactaattttttttttttttttcagtagagatgaggtctcaccatgttggccaaactggtctcgaactcctgaccccaactgactcgcctcagcttcccaaagtgctgggattacaggcatgagccaccgtgcctggcagttatttatatttatttgctcttatgtttccaggtttcttctaactttaaaattctatgactggaacaaatacatatgtgaacttggaagtagatctttcccctgtccagccttcagatcagaccacagccttagtcaccactccaattgtggcctcctgagagacactgagctaagggcatccaggttcttgacccacaaactgtgaaatacatgttgcttttaaaaaattccaagagtggcccttaaatttctttgggactataccgtgtaatagcgactgactcaaaagggtagtctggaaacctaatcttagcccctggtcacctctagctagtgtgcacagacctcagatcttgtcagtctcatttccctacctgttaacgtgagacagttgggcagaagaactttagcttcccttaaatgctacaactcagcgtctctattaatcataccgtttattcatcaaaatgaatactgataaaaatgacaagtagaacacaccctagatgttcaggcctctggaattggtggcagcgttccagcttcctttctgcctgtaactgtgagtaagtcctgctttacctccttcccaccccccgcacccaccaacagctctctatcataagctaatcagcttgaaataattgttagggcacttctgtgtatggcctgtgcatgtgccagtgtgtacaccgtgcaagctgagctgttgaggttctggatgtgcatacagccctggcaccggaaggtttgcctctagcattttgtggactaactctggcagtacacaatgggaagaaaacctctttccaagtgtgagcccttctctcttctcattcccaaggaggtgtgtccagatccctttgccagacagctactttacaggagcattggagagcaggcagctaactttccccaacaagcagctggatttacgttggcaaatcaatccctctcaataaaatgttatgtgaccatcttcccagccccccgttaaaatcccttcattttttcgagcaagcgaactagtcagagaagacagaaaagttaagtaaagaaagtggcagaaaagtgaagcaaagcaacagcccgggagcgtggcggggggacccgcgcggggactcgggtaggctgcaaacgctggggagatgccacaggagcgcctgccttcccagcttctcctttctctcgccgagggtctctggggttcagcgctcccggcgtttcggcgacctccgggtccgccctgtcccctcccagctggggagctgagcccggctctgcgcccatcgccgaccccggccactctcccttcgctgctcgctccaaaagcgcctgtcccgccccgcggggcgacttctccctttcggccctggggttgaagatcctgtgtggggcagctgcgccttcgggacagccccagccgcggagcgcccagaccagggcagccggagtcgggtcatacgccgcacgccgccggggccgccgcacctgagcccagctccagtcacgccggaagcgcgggcggagcgcacgggtccggggagagtcgcctgcgcccgcgagggggacccaagtacctagggtggtggccgagtcccgcctcccgccagcgggggcgaggacctgcgacgcgcacccctgcctggcccggtctcctcagcaccagccccacgcacaccctacttcctcagcttctcgc

SEQ ID NO: 37139 - DNA, 2300 bp, Homo sapien
ggcagacacttgatgatcatcatttattttccattgtctgtcttcggtcttgtacaagatgtcagagacttagggaggaagagcaggaggagggcaagttaaaaagaatggatggagacagagttggcaaagtgaaacattgagtaatacaaggtggccaaagagaagagaaaaacctcacttgagctgtataaaacatcgaattagtccttgaataaatcaccatatcatagaagaatagtagtatttgtagtaactaccatttttcaagaaatgttattgtatatgcattctagtcaactcagtaaaagagggagggatataataaatttagttattttcattaatattttttaagtattttattgtttgaaagtttatgtgtccatttaatggcaatttatccagtattttgaataaatgagattactgccttcatttatataaatatgtaaaagcaatgtgaatattagttgcaaaagcatctctggacaggaagatagtagaccttggtttctgattccaactggtggataaataataattgagaagaacctaactgttctcattagtgaaaatgggataatagcatttcccctgtctacctcagaagggtttttctttacataattcattcaattaacatttattgtgaaccttatactgagaacaaatagtgatgagcaaaggagacatgatcttagatctcataggacttacattccatgggaaaaaccaatgttcatttacaatgggtcttaatttttccattcctgtgatctgcggtgctatactctagcatgctcatggcatgctccttcacatcattcagttggatctctcctcaaatgtcacctctttggagaaccagcatcgctaacattgatttcagtctctctttatcctttgctttacttttcttccccacctttatctgtcattatacttgtggttacctttaggtccaacactgaagtataagaattctttatccagccaggcgtggtggtgcacacctgtaatcctagctactcgggaggctgaggcactagaattgcttgaacctgggaggcagaggttgcagtgagccagaattatgccacttccctccagcctgggcaacagagcgagactgtctcaaaaaaaaaaaaaaaagattcctttatagagagattttgtctttgctgctcattgatattgatatatattatttagaatagtgcttggcacataatagactcacaataaatatttactaaatgaatgagtaaatgagatgagcccacaagcatataattaccaactgtgacaaacaaatgggataagtgaatgtattttcgaaactataaataatccatgtttgcaaggtgatgctatttatttgaatttcagaaaaaaaatacagtctgccagaagatagctcattatttttttgtattgatagctttctattaaattatttattttctaagagtttctcttcctttatatctatgatttgtaacattgagcactatctttatggttctataacccccgccaccccagttcagttaccctctagagtagagattcttaacctgggtcagtgaacctttgtgaaattcgctgttgcctcctgaggcctcattgtactccttgaaattgtgtgtaacgtgtgtggcccctgctcattttactggagagagtttgtataacagattctcagactgtataacctcccaaatttaagaatcattgcattaaaattttttgtttctcttttactttttgttgctctattgataattctttttctcctcaagagggtttcattttccatttattttttatgattgtatgttggtatttttaaatatttactgcttgattgtcgccagtgtgtggtattctcggtttattgcatgcatctgaacccagcccttctctctgtctctcttttgtctggccagcagtgtggggatgtgccaactgccgagtggttttgtccaacccttctgggacctttacttctccatgctaccctaacgactacccaaacagccaggcttgcatgtggacgctccgagcccccaccggttatatcattcagataacatttaacgactttgacattgaagaagctcccaattgcatttatgactcattatcccttgataatggagagagccagactaaattttgtggagcaactgccaaaggcctatcatttaactcaagtgcgaatgagatgcatgtgtccttttcaagtgactttagcatccagaagaaaggtttcaatgccagctacatcagaggta

SEQ ID NO: 37140 - DNA, 2300 bp, Homo sapien
tctctgtgtatgcctgtatcattcactcctggggaataaagataacataagtggatgactcagaaaggcagtgttttcctcccagccacatgctaatcaagccctttcacagaaaaactgaagagtttagaagccagtgggtagcaccagagcaaagtaccttgtatgtggatgaacctagcctacccttggaacatgcgtctggaattccgaaactttttaactattttgactgattattgctggaatggggagaggaggcaaagaggaaatgaagacaagatccagattgggatagtctgctgatggaaactgtcagggtgtagattttctctaaatgtttaacagaaacctcagagactagataattgcagggattcatggaatagcaagtcaaatccatttctctacccacctcactcccaattagagttttcctgggggaaattcagaaatggaaactgcctaagcataaatactttgcatactataaatattgctgggtttgacactttgtagggagcaaagaaggggactgtagagatgtatggacttgagtttgaaatgtggctccatctcttcctggctgtgagaacttggaaaattcgttgatttaccaaattccatttaatcttctataagatgtgaattataatctgctttgcagagttatgtgaactcaaaatcagattttacctgtaaagttcttaaagcagtacttggccaatgtatcctaggttaggatactgctggtattttgtttccaagatgcatgctactgatttttttcccataagaatttttagcatgaaatttatttcagtgcattacagttttattttcaaaggaaacttaacctagaaatcaaggcaaatcccaaaagttattaactaatcttttcagttctaatatcatttataggaaaacaggaaaagaaaacttgtagaaggaaatagtgcaaatggagaaacaaactggggtgagagaggagagaataaggaagggtgagaagaatgaggtggagaaatggagagaatttgggaacattgtatagatagggtgataaacagaaataggctagagagatagaacgtagacatataaacaggtacagagataaacagagaattaaaatggaaagagtgagaagctcagtatcttaaagggaagcttgtccattgatcatattgtaataaatgtatatatcatgtaaaaatccctttaagcagtacaaaataataccagttatatcaaatatttaaaatatctattttgtttcatagtttttacaatgctaccaacccattggtaacctactggggacctgttgatatctccaactgtttaagtaagtgagcagttttcctttatttctcaaggacaaaatgacatgacttcatgcttcatgattttcattgtcttcgagaatattcttctgctctgtgatactgttttcatattaaaaggcaaatgattgtttcacttaagacagaaaatactttttactctcattttaactttctgttctgtaggggattaaaaatagtaaggaaaatctagagaagacaaaactaatatataaattgatatttgtatcaatgttttgtagtttgcattaattttaaatagcaaatatacactaattcagggattctgggaatgtttctcttagaactttgtgtgttcattcatccctccaagttatttgtatcttactaaagagagaagttagtctctgcatagaaagaaatattattgccttgtgaatatggggatgaggtatacacaggaaaatctcactttcttgcttcaactgtaaagtgaaatattacactctactttggattcctggaaatgctctaaatattcaggtaaaacttagtgttgttttcttctgcctttgttttagaagaagcaaatgaagttgctaaccagattttaaatttaactgctgatgggcagaacttaacctcagccaatattaccaacattgtggaacaggtcaaaagaattgtgaataaagaagaaaacattgatataacacttggctcaactctaatgaatatattttctaatatcttaagcagttcagacagtgacttgcttgagtcatcttctgagtaagtattttttttttcctggagagtaaattttattggataatgatgttacatgatttctcacctatctgaatactttgtgcccagatttcagaattcaaatctctgcaagatgtattgatagtcgttaatagtgaagcaaggtcattcacaacatgaacttaaaagttctgtgtgttt

SEQ ID NO: 37141 - DNA, 2300 bp, Homo sapien
tgataaaatatattatgtaacatgaattttccagctatagaattttaatttataattgctgtatttctatttataaaatgcattcaaatctgttagaaatgattaacatttaagtaagtaaaaattatataaggtgctttctgtattgtaaaacatgaaaatgtttgttttataatcttataaaattagtcctgaaacaatttttttaagatccttttaactcattaaaaatcaaaaaggttcaaataatttagggaaattattttttaagaaaaatgtcattcttacaactctagaatttttcctgggttaaaaaaaaattcagttgaagcccaactgggaattgtataaacaattggaaataattttgaagtaaactaatatttttaaagtctttataacttgccaaatactcataaatatccttagcccctccttttagcagaaccacatcagaaaggtggtgctacttatctcattgcagggttgtataagatacgaatttatacaggcctgtgcttaaaagattgatatacagtattagttctctcatagattccttttttcattttttaggaaattgcgaagggattatccctccaaaatcttgatgaacctgagcacagccctgctgttcctgaatctcctcttcctcctagatggctggatcacctccttcaatgtggatggactttgcattgctgttgcagtcctgttgcatttcttccttctggcaacctttacctggatggggctagaagcaattcacatgtacattgctctagttaaagtatttaacacttacattcgccgatacattctaaaattctgcatcattggctggggtaagcctcttaaaatttttttggttttgtttttccctcatgaaaattgccagattctcataggaaaaaatcttatttaaaaaaaaatagtaccattaagaggaacctcaaaattgtgaatggcatggattagatatacatagcctaaggaagggacatcttcacaactttattttttaaaactcatcaacagcactcactatatacacgagtaaaggaaaagccctcactccctgagtcaccacaaacttatttcctgagcccagagccagcccacccaagtctgaagaagcagctggcaggcagtgatgtcttttccatgatgctttaaaatacaaaggccagctcagacggctagttacactcatccccagacacatgcctatgtcttggaaaccagagaaagaatgttattcttgcgtgtgcaaccagaatacttataggattattgccttgaactttttgtaataacatgagtcctcagtcagacataggtggttgtattaacctgtttgagatcttctattgtgctcccttatttttgcaggcttcatattgagccaggcattttagagctttctcacagatctgtttcagatggaaatataagtgagagatattttcaagaccttcaaaaccacctcaggaggcaataagcacactcttcagagacctgggatgcctgccatagcatttccccactgaaatatacatggaaatactttattcaatctctggggagagaaggctacaaagactttatagcccccttgcttttcctccactttttctaaagagttttctttatatagaaggaggcaaaataggctgtaatgaccttgtctgcctaaactctgccagtctaacaaggcttaattaatgaaaccacattcactagtgctagatttgatacaaatcaggtttagttttccagtgagtcccactaagcaaacagaattttatttaaatatctgtcatttaagagtaggtttggattgttgccagttagagttggacattgaaccccaaggaggggattttgttgttaaccaagttgccatttctaagaagtttgaatctgggatatggaatgttggcttgcttgcatttctcttcttttcatttcttttctttacatttcattagcagtcttatgaagcagtttcagatgcttcaaaagagtttgtgtcatggtgtttttgtaacaggtttgcctgccttagtggtgtcagttgttctagcgagcagaaacaacaatgaagtctatggaaaagaaagttatgggaaagaaaaaggtgatgaattgtaagtaataaaaactttttgtgatgagtagatatcctttgtttcctgaagtttagcattaatttccatgccaataacaaggctttcattttaaaaggttgatgtttattcacatgactgccaaaatctctgctacaccacagattaatt

SEQ ID NO: 37142 - DNA, 2300 bp, Homo sapien
tcctggtggggggtaggggagagaaaggggcagaaccaaatataaaaatcagtatgtggtgcttatattttagaagtgttggtacccaaagtggcaatgtaaccatagaagagatggaaacccgggaccaagtcatggacatgtaaacctttttagagtaaagcagaagaatctactaaagagaccaagaaggaatccccagcaaattaggaagaaaactgggagaaaatgaccttgagaatgaagggctgtttgattgtgttgagtgctgccgagacgtctagtaaagtggtcatgggaaacttagcaatattggagttgccatcattcttacaagagtggtcatagtagggtcatggatgtggatagcaatctgcttggactgggtggagaagataaggtgtgagaaaaaggggaggcagcaaaagttaaccatttcaagaagttttattgggaaaaggaataaagagattgaagctggaagaaaattggaggttaagggaggaattttttgtttgttcttaaaaaaagtgttttaacagtatgcttgtaagttaatggacataaccaagtatagaggaatcaagagaaagatcgatgatgcctcaaggagaggtttaaaatgcggaagcaaatgccctgaaaagttaaaagggattggcttctaagatacaaatgacacagattttgataagcacaaggagtgactataaatatgaagactgtttctcattatggaaatatttctgtgttaaaatcttgaaaagctaaagtaggccaggtggagccgcatgattttgctgatttggtgccacgtttcacctgcaaaaagaccacttttctatggcccaagctaatatactatgaatataactataatatacatatgtaaaatagctcagaatacacaaattgaaacagatgatgagcttatgtgtgttttccattttctcttttgttaaaatatgtatggaaagttttaacataattttaggacaaatatatgggaaatactaaatacttctagaattgaatgttgcttatttcagcttggcttttaggttaagtcataatgaatgctgaacagaacaggcaaagacagaatcagatccctgtggttattctagttttatcagagcctttgtgttctcttctaaaggattaaagtgtctgctacatactgcaagattcatttccttaagatctttgtttcttagtgcctttgatgtaaaaaatttaaaattaaaatgaatccatgtattttataagatttctctttaaagatgtgtcagttggcttaaatatttatattttcttttgtcacaggcttatttatattcatcttccactgtgctatgaaggagaatgttcagaaacagtggcggcagcatctctgctgtggtagatttcggttagcagataactcaggtaaagagttgttgattaaattttacatctacaagtagatgggaaagtttgtcattcagtctttcattgtcagagcaacccagtcccagtggtagcaagctattgaagtggagcatgtgaagatgcgtagttggaatcatagaatatcagggctggaagagatcagagaactttgagcccaacccttctattctgcagaggagaagcatgaattccatacaagttaaatgagttgcctgaggtttgatgtctaatttaataacccgtatacccagaggttccactataccagactcacctttccacattttctagatccgcaattacattattaagcaaagagatttttctcagtattaaaaaaaaaaaaaaaactgaaaaaacctactttgtcttttttcttttctttatctttctttgtttttctttttactgtcagtggttacttctcatctttgggatattgaaagtgagattttaaatagtacgtatacaaggtcaaagtaagaaattatcaatatcctcttattgtttacatgtcagtctcttctctgagccattgccagcatatcagaaaatcagatgctccagataaataatgcagtgatgattttttcagagcagttcatattcccggtaaagcagattgatagggtgatgtcattttttttttcagattggagtaagacagctaccaatatcatcaagaaaagttctgataatctaggaaaatctttgtcttcaagctccattggttccaactcaacctatcttacatccaaatctaaatccagctctaccacctatttcaaaaggaatagccacacaggtgagtctaaagatgtcctcaagtttagttctcatcacatttt

SEQ ID NO: 37143 - DNA, 2300 bp, Homo sapien
atcattaacccattccataattgaaaaacttaggttaaatcactggctcaaagtcaagtggtgagttaatatttaaacctaggcaatctggtctagcatcaagttagctggttacttttttctataatatattgtctctctctaaaactttaaattcttagcttgaagtccttagggcaaaagtggtcttggtgctctgttcgtctctttgggtttctgtgttggtttattaatgctatcttgctagcttttcagtgcttttagaaatatcttaaaatatgctttcaggaaattttagatgctttcaatgacaggcttggtctgattacttatctttccatatgacatgttaatataagatcccattctgtattaatattgaacccatggtaatgtaataaatgttaaaagatgtgcttggggtttgagggctttgatgatattcagtatttttctgggctttataaacagtgcctcaactggccaatatctttagggtcttcacttatgtattcattatctattgctaaaataactttaagcatcacgtcttcacaatacccttcgtaactttccaaaaccattatctgggctataaattatagctcagtgtccgtaagtttatatctataattgcagtactttgtgcttactcacaaagaaatttatctgcaatttttctccgttcattagaccaagttaaatctcctgtactcctcattaatgtggtgttttcactactccaaagagtttaattccatctttaaacttctacattcccctcctgactcctccatgacatttacttattacatgaaactagttagaatactgatcttccatggtgtaaaatccttcatctatttcagtgcccatttatccttacacaaggcatttctctgttactgataaatcaatctttttctctagtcaccacagactgtaaggatagtcacattggaaggcaatttccatgatagatatttgaataagcccttttgaaggacttttggatgttgagattatacttactgagttccccctttacctatgaatttattccctctcttccttcctttttgttccttccttccttccttccttccttccttactttttcttcctctcttcctccctctctccctccctccctcttcttccttccttccttcctctctttctctttctttctttctttcttcctttctttctttctttctttctttctttctttctttctttctttctttctttctttctttctttctttctttcctctgtctctttctttctttcctttttttggaagaaaaaaaaaagaaaagaactcttttgcccaggctgaagtgcagtggcataatcatggctcactgcagcctcaacctctcaggctcaagtgattcctctgcctcagcctctgaatagagggcatcactgctgatgccccaccgagtcagaggctgggaataaggcatgtgcaaccaagcctggctattttattttattttttgtagagacagggtcttgctatgcccaggttggtcttgaactcctgggctcaagtgatcctcctgcctcagcctcccaaagtgttgggattacaggtatgagccactgcatctggctgaattgattttctttcacaaaactctgatgtatttgttggaaacttggttctttcctttccgtagataaggtttttgtaaatatccagtgatttttattatctgttatagataccactaaaatgggaaatagcttagcgctcgcactgcagaatgggctcctaaatacatactgagaaagtgtcttagacacaggcacattccctgaagaatcagtgtgttgtcacaatgatctcaccgtcgtgagatactatggctctttattgctgttttcttttgtctacatctagatattatcgagaagtgaccttgttatctgtacagtcactactatcttacctttttttgaagggagctagattgatcaaaatgttttgttttttgtttctacacgcattgagcagaaacaggcagacgtcaaaaatcatagctatctagtgaccctttaaatgaggcttgcatcaaatcattcttttacatgatgtaagtgctgctgaagccctgctgagtcagagtccacaaatcaaacagcccctagaaacctgcccttctctggcagggttagggctgagactgggccctcagaccatttggaatgaccagtgatttcagctctcactcccttctcatcagcacgtgtctacagttgcaagtaagtgaatattttttcttttt

SEQ ID NO: 37144 - DNA, 2300 bp, Homo sapien
ccatcatctagaggactccttcactttgctatgatgtaaatttcctaaaagggaaatttattcttttaaacataaacattcaaacctatcagaaaaaaaaacccactattttcatccaggcgaggtggctcacacctataatcctaacgctttgggaggccaagatgggcagattgcttgagcccaggagtttgagaccagcctgggcaatatggcaagagctcatctctacaacaaaatacaaaaattagatggatgtagtggtgcatgcctttagtcccagttacttgggagcctgaggtgggaggatcgcctgagctcagggaggtcgaggctgcagtgagcagtgattgcaccactgtactccagcctgggcaccagagtgagactctatctcaaaaaaaacaaaacaaaaaacgcctgtatctcaacttttaatatctagggaattagaactaggctgattacatttaagtaactaagatgtttcatatataataatcttatgtcttagaaaatattactatgatgtttttataatattttctctgagttatttttgagtcacagtgtcagtgtaaggtttactcttctggtgtaatgctttctgaagcagtttcttgctttcgttttagggtacatagcattgtgaaccctttatataatgaactggaaattggaatttgtatttgtatatatcgatggtaaggtttaatggaacaattttccctaactgcatttattttgtatccaggaagcgtcaggacaatcatgcccataagaactctaaactgttcaggtaatcatttcgtttttaaactgtcctagaaatatgctttgttttctatattaagaagactttataattgttttgtttagatgcacccttttatcttttccaaagttctgtgacatctaattcttatagccttgatgtcattttattaatcactgattttaagctgtaaaatatagttatactttatagtaatatataatactttatgaattatgtattttataaaacatgtatcatatatgtatgcttatatgtatactatgttatatttatattttatattaatatgtaactatatatatggtttttttttgagatggagtctcgctctgtcgccaggctgcagtgcagtgacatgatgtcagctcactgcaacctctgcctcccgggttcaagcaattcccctcccttagcctcccgagtagctgggactacaggtgcatgccaccacacccagctaatttttgtatttttagtagagacggggtttcaccattttggccaggatggtttcagtctcttgacctcgtgatccacctgcctcagcctccccaaatgctgggtttacaggcgtgagccaccatgcctggccacatattgtttgtattaagctataaaacatatctctatatagagatatgtaatacactttggcatacaagtcataaaacttggttaggaatagctctatttttttttaatggggctttctaaaaccttatacttttgtagataatatccatcaaggattttccttcaaatggttttctaaagttaaaaagtatttaaaagagtgaccaaaattcaaacatggaagagacttatgttcatgacttaatgctgagtttgaaattaatatattttaattgtggaattaatgtaatctcaataaaaataattccttggagtaaaaaacatttcaaatttatctaatttctggttggttagttaggttttttttttttttggtttcttatttgaaactgttatgacaatctctttgtattttctttttcttcagatcattttatcttagtgaaactggcaattgaactttgctctagttgatgggcaaaatttctcctagactattcatcatcccaatttcatcctagttgaaaattttcaaatgccataagaaatctttatagatttgcacttagcttttggatggacgtttctacaatggagagaactgtgttatagccctggtccaaggacattactagctaatgcccatcgactgtggtgtgcgtgtggaaggttccaaagagaaggagcaatcagcaagtttgcagacaccctggaacatggaagcaaccaagctttaagaagcacagctttggagacactccatgagtctgcactgctttcaggggaactagcacttaagaccttgtgtaacaaaatggacactggggacacagctctaggacaaaaagctacctcaaggtctggagaaactgataaagcatcaggtagatggagacaggaacaatca

SEQ ID NO: 37145 - DNA, 2300 bp, Homo sapien
tcgcccggccggggaggaagcccagagcttcggctcccactcgcctgggattcccccgcctcccggccccgctctcccagggttggttgtgatttcaactccggtcccttccgtggagagggaagcgcacaggctgaaggtggcagctcgccccgaggttccagcgcggcccaccaggaaaccggcagctgctcttcgcgccgctgcccacacctatttgaatcccctggcgagggcgggccgcggtccccgaactgggggtgccgggggcaccctggtgagtgacctcagggaaggtaatccgggcgtttcgagcacgtgaatagttcgcgcgcccgcaggggcacggaaagtgctagtaaaaccctacaaagctccagaaacccagccgggagccacagtctgattttgcttttcttgaccgataacataattgtgagtagaggcagggggcgaggagaggccagggatccggagtactggttccaaatctaagggcactactaattatacaattccgttcgtcaggaaggcagacaacgattctctgggaaatggggaaggggtggggacggaggacgtttccacatccttaaaggaaattctcaggctcctagagatgcccaagtttttttgcatgacaagtagagaccagctctccggggagttccccgctccgaccgagcgagtgcgcggccgcgatctccccgcccgcagcggcagccgtggggcccggccctgccctcccgaccgcctccctcccccgtcgccccgcgcgccgcacatccctctctcgctcactggctccagactggtttttctggttcagcctccctccctgggacgcgctgggggatccgatgacgtcgttggctgagtctctccctcttcctccctccctccctccgcctctccccccgtccgccctcgccgcgcactcctcctagtaacttctgttcggggaggcgctgccaggaataacccggtgcgtccacagcccgggaggggaggcggccgctgcggctcccgcacgcagacagctgcggcccgggcctcgcggctcccgcctgagcccggcggcccctgccccgggcccatctccgtacagtgtcagaaaaataaataaaggcaagaggagcctgggctggcggtcgggatcttttccctccctccgcgcccgccctccctctgtccttaaggaaatgctaccagacaccccccaccagacacgctcagccttggcgaggagcggccgccgcggcagcgagaacaagggcaccaggggggtttcctccccctcctcctctccctcctcctccccgtcctccttctcctcctcctcagcggtgactttccaggtgagcggccgccgcggctgcgaggatccccctcgcccgctggggctcgggccgccgcgtcgcgccctcctcccgcccctgtcacccggcggcggccgggagctgacagccgcccgaggggctcgcggcccggaggcgggcggccggcgggaggcgggctggaggtgagggggtggagaggaggagagcggggcgccgccgagcgccgtcgttccccgcaggagggtctccgcacaaacatcttcggtgactgtggcacaagtctttgccaagttgtgtcttggaccttgacgctccacggagcccagagcaacttggagggtctcccggctcgttcacagcgttcctccacgtctcgcgtctggggtgctgggtgcagcctcggggtgcgcggagggcggaccggccaccgcgagagcggagcggcgggaatctaggtccctcctcggctcggtaagtggcctggacgctgggtttttcctgcctccttcggcgctgggagcttgtttcactttatattggaatcgccgccgccgaactccgtcccccgctccccggcgtgtgcccccagccccttcccggtggcccgagggtgagggtcggagggggcggggatgggggagaccgcgggaggggtgtcgggcgcgtggggaaatgcggggaataccctggccgcggatctatgcagatgaggggaggctgctttgcgtaatgtcctggggggagggggccgcgcgggagcgctggaggcaggaatgtgcctgcttactaatgagcgacgtgcaccggcgcgcacggcccggccaccgctgcggctgcggcggccggcggcggcccgttgtcaggtagcgggggagggggccgcggcgcgcggcgcaggcggccgggcgggctggcggcgcgaggcccgggccgccggcctgcggccgagcgagcgcagcg

SEQ ID NO: 37146 - DNA, 2300 bp, Homo sapien
aggctattctacctgcccaacagaagaaaaagggaacactttcggtggaaggcaatatcatctggaccctttatggttttattatacataatgtctaacattttttaaattactagatgtggaagatcaagttcatttgcccaataatcaagagaaaaaaacacacacaatagaaacacaattatagatgatcaagatattgtaatcagcaaatgagaatttacaaataatttttatgaatatgtttaagaaaataaagtgcaaaattgatgaggaaatggacaattttcagtaaaactaacctataaaaaagatttctttaggcattctaaatttgaaaaaatatactatcgtcagttaagaaatcaatatatggagaaaactgcagtggaaaggatcagtagagatagcagtgtgtccaacagccaagaaagtagggtggcgggcatacagatagtgatgtgcataggggcaaaagaagtcataatgggaaagccatgtggaggcagcagagtgcctggtgtccaaggaagcatgtatagggggtacatatggtggcagttgtatgctcagcagaagaagcaccagggaggtgaaggtaagagtaagttggggtgcacagttaacaatgtgtctaacagccagaaggtggagacaggggcatggaggcagtggcatatcaaacagaccagggtttggtggggagaagagttcaaaagtgacaacttgcctggagatgaaatcaggagtgatgagttggccatggcagtacctagcatttttaggaaattaattatgtaaaggaggattgatcaagaaagtatctatattgaagctaatggaagctggatttctctctgtgggaaaacaaatttacaaatatgaaaaggggaagcgaaaaaaataactcattgctattgttatggtaagaaggaagaaggaaggaaggaaagagcaaaaggaaggaaagaaggaaagagtgaaagggaagggaggaaagaaacaaaaaaaattatcaatgcaagtgaatatgtctgtgtacatatccatgaatacatacatatatttcaaaattctgaccatggagaggacctaggtgcaatgacaccccagtagcaattaataacaagtatgtaggttccaatttccataacaaacaacaaggactccttgtaaaagtggatgattcaaggatggaggtagagaaatttcaagataagcctggaacgttggataataatgaactgtggtttgaatgctggtatttatcgctgtccattttctgatttgaaaggcttggcaattactctgtaggagagtgtctttgggagaagtagtaataggaatatttacagatgataggacataaaggtttcaacttgcttaacttgctctcaaaatattcaaaaaaggtatcatatccttgaaaatacacatctatctatctatctatctatctatctatctatctatctatctatcatctttacaaaaagagatggagaaaatatgaaactattaactgaggaatctggatgaagagaatgtgggagttcattctactgttcttgcaacttttctgataaaaatatttcaaagtaaattatttcaaaattaaatttaaaaactcaatatatgagtttaacaataggttggacactattgaatacaagacttgtgaactggaaacatatcaatgaaaaatatacaaagtgaagcatggaagaaaaaaagaaagagaaaaaataagaaacaaatgtaagagacatacaggacaagtatgaaaggtctaccatgtaaaactgaagtttcagagggcaaggagaaagaaatagagcagaagcaatattcaaagggataatggttgggaattttctaaagcagataaaatacatttaacccactggttaagaagctcagcaaaccctcaagcaggataagtatagagaaaaccacaattatgcaactcacaataaaactgctgaaccaaagacagagaagatggaaaaaccagccagaagaaaaaagacacattatctacaaaagagcaacaatgagactggcagctgtctctaatagcaacaatagaagccagaagataatggaatgctatctctagagtactgaaagaaactaaaggccaacgtgtgaaaaacaatcttcagaaatgaacgttaaatgatgacattttcaaacaaacaagcaacaaaaagaagcaaaaagtaaacaaaaaacaaaaattcacataatttattgctaggagttttacactgaaatgctgaagggatttctactagcaa

SEQ ID NO: 37147 - DNA, 2300 bp, Homo sapien
ttacataaagttggcttcttggaatacaatttaagggtgacataggagtcccagtcatttcccaaattaacaggtattatcatcagtatgtcagacagacatcctccctgatacggtttggctgtgtccccacccaaatttcatcttgaattgtagctcccttaatctccacgcattgtagggggggaactggtgggaggtaattgaatcatgggggcaggttttcctgtgctgttcttgtgatagtgaataagtctcaggagatctgatggttttataaagggcagtttcctgcacacactcttttgcctgccaccacgtaagatgtgactttgctcttcctttatcttctgccatgagggtgaagcctccccagccatgtggaactgtgagtccattaagactctttttctctatgaattatccaatcacaggtatttcttcatagcagtatgaaaatggactaatacaccccccctccaaaagaaaaaaaaggaatgaacagtctgtctcaattattagaagtacttaagaaagggtatcttcagccccatatatagtctaagaaatattacaacaatcaaagaatatagcttgaagctaaaacgggttcttgaaatcttcccttggtgtttcttatgtttactgctattgatgaaattcaactggatgaggcttttctcctccagtctcactaactgtgtagtagaatgaaaaagataaaaaaaaagacatgcaaatatttcttctatacatagaaaacagtattatctaaatcaaatatggaatcatcataagaatacttagaagtgaataatgtattatagttcataaaaagtaataacttacctaatgaagttttaaaagcaattgtttacgctgtaaaaacacaatgtgtgtagattaatattttccacaaaagttatctgtaaaacatgactaagattgttagatatggtctgaaaagcacagaaagcaagcctggacatgttaatagttatcaagaagttccaaaaattgtgaactgacattctcataaaatagtatttgagtcaagttttatacaaacgcttcatttttttaaagcacaaaactatctgatcatggttggcaaatcatgaaaaaacaaaagcaaacccagcagaataggttctaaatacttaattaagagttatagttatttatttaaaagaaactggtcgggcgcagtgactcacacctgtaatcccagcactttgggaggccgaggcaggtggatcatttgaagtcaggagttcaagaccaacctggccaacatggtgaaaccccatctctactaaagatacaaaaaaaattagccaggtgtggtggcatgcgcctgtagtcccagctacttgggaggctgaggcaggagaatagttgaacccaggaggcagaggttgcagtgagctgagatcatgccactgcacttccgcctgggtgacagagctagactctgtctcacaaaaaaacaaaaagaaaaacaaaacaaaaaacctgaccattaaaaatggctttatgaaaatattatttcattttgtaacaatggggttggggagtcttaataattgtctaacatgtaaagtaggaagggtatatcaaactttgcaaatatcacattaactcataaaactttattaaggctctattgagaggtgaggccagctggacctcctgagacaagtggggacttggggaacttgcctgtcttacaagaggagtgtaaaatgcaccaatcagcgctctgtaaaaagcaccaatcagcactctgtaaaacacactaatcagcactctgtaaaacgcaccaatcagcaagattttaaaagtagccaatcgcagggaggactgaaaaaagggcactctcataggacagaaacagaacactggagaggacaataagggaataaaagctggccaccccagccagcagcagcaacccgctccagtcccctttcatgctgtggaagctttgtcctttcactcttcacaataaaccttgctatcgctcactctgggtctgtgccatctttaagagctgtaacacttaccaccaaggtctgccgcttcattcttgaagtcactgagaccactaatctaccggcaggaaccaattccagacacattattaaggtaggtagatcttcaatagatctactcttttttatttttatttttttggcagtttataaccatgtaccaaggatgcacaattaaaaaaataaagccaacttttacattaagatttaaccaaaaatcatcaataatacatcgttttaatgcta

SEQ ID NO: 37148 - DNA, 2300 bp, Homo sapien
gaccattaaaaatggctttatgaaaatattatttcattttgtaacaatggggttggggagtcttaataattgtctaacatgtaaagtaggaagggtatatcaaactttgcaaatatcacattaactcataaaactttattaaggctctattgagaggtgaggccagctggacctcctgagacaagtggggacttggggaacttgcctgtcttacaagaggagtgtaaaatgcaccaatcagcgctctgtaaaaagcaccaatcagcactctgtaaaacacactaatcagcactctgtaaaacgcaccaatcagcaagattttaaaagtagccaatcgcagggaggactgaaaaaagggcactctcataggacagaaacagaacactggagaggacaataagggaataaaagctggccaccccagccagcagcagcaacccgctccagtcccctttcatgctgtggaagctttgtcctttcactcttcacaataaaccttgctatcgctcactctgggtctgtgccatctttaagagctgtaacacttaccaccaaggtctgccgcttcattcttgaagtcactgagaccactaatctaccggcaggaaccaattccagacacattattaaggtaggtagatcttcaatagatctactcttttttatttttatttttttggcagtttataaccatgtaccaaggatgcacaattaaaaaaataaagccaacttttacattaagatttaaccaaaaatcatcaataatacatcgttttaatgctagtagaatcttcttctgacatcagttctattagcataattataatgccaattaaaaaaatctagtgggtctcttcattttagtttagagcttgattggaaacattcaggaaaacatccatggcttgcttgctactttctctttacctctagcactatgcttctccccaccagccctccctccacatcctctgactcagagactatttgaagaggacacctgttttaaatggatccacaggaaatacctatgttgccttttcataatccgaacctgcaactggttggctgaaatgaaaatgttgcccacagactgatgcaacttcagtgtgacaacatttactggaaggcaggagggactccagtttatatttattttccttccattaagccctggtagtgtagtgtaagaaaaaagtaagggcaaaaccagtttaacaaccagatgattagtattaaattacacgcaggggttttacatccaaaattggaattttttaaagctgaatgcaatcttgtggcagaaagttatttgaaaatcctttctttatagctttttatctataaacctcttgtccaaagttcatattctagctgatgttatatactgatatgacattattcaatctgtcatggaaaagtgctgcgtagcctacccattgaaagcagaattgagagagtttcctagtgattgacagtcgtttgtcaacactgaaaaccttattgccccaaaatactgaaagtcactcgcggctgcctgtgctcgggtttacaccccacgttcacacccccaccggatccctccgcacggggcaccagctctcggccaactgcaactaccccaggaagcgtcaccgcgattccggggcgggaacatttgtggacactggggtccactccttcagtctaggttccccgccccctcgcccggcccggcgcccactagccacagggcccgcttccccctggagatcagcgcgcacttcccgagccctcgtagcactcagaggtcgcatccacacctgggatgcctagggggcgcctcctggccgggtgtcccgggaccctgcgaacgcaggagcagaatgacgaaggtgacgaaagagatgacgacacgccgcctgccaggccgcggccggcagtggagagcgtccgcaaaccgcgcccggccagtacaggtcacccgggcgctcgcggccgcgccagtccccgggggcgcgcgccccgcccccgcccccgcccccgccccgccccgccccgcgcccgcgcccgcgcccgggttcccacggcgcccgcccccgcgcgcccggcgcctccctcacgcccgccctccttgccgcccagccggtccaggcctctggcgaacatggcgcttgtcccctgccaggtgctgcggatggcaatcctgctgtcttactgctctatcctgtgtaactacaaggccatcgaaatgccctcacaccagacctacggagggagctggaaattcctgacgttcattgatctggtaaggccgtccc

SEQ ID NO: 37149 - DNA, 2300 bp, Homo sapien
acatggtggcgtgggtgctatctccaggtgaacaagacagaacttgcaggcaacatggaatctcatctcccatcccactcacgtcctttccactcggccctgcattctcttctgcaggtttgagatggcccacatagccaatgtagagctcttcaggagatatttttacagaaaatcctgatcacatggcctccatttgtttattctcttgccgtttttgtttttttttttaactttttttttttttaagacagagtttcactttgtcgcccaggctggaatgcaatggcacaatctgggctcactgcaacctccgcctcctgggttcaagcgattctcatgcctcagcctcccaagtagctaggattacaggcacccatcaccatgcccagctaatttttgtatttttagtagagatggggtttcacaatattggccaggctggtctcaaactcctgacctaagatgatccacctgccttggcctcctaaagtgctgggattacaggcatgggccactgtgctcagcctattttttactttttttagagatggggtcttgctgtgttacccaggctggagtgtagtggcatgatcatagctcactacagccttgaactcctcttgccattttttttatccttaaaatttccatgtctcactctcttgccaactgttctctctcatttggtcccttgattcactctaaactcaaaccctgataaagcagctgatcggtgaagtgtctgttgttactaaagtagaagttagaggcagaacagtggcagagagccctggaatctggcccttggtaggtgctccacaaatgtttgttgaacaaatgaataagtggagccaggttgtctatgccctagtcccagctctctcacatgcgctagtgagagatatatacatgtataaaaaaaaatctccctgtgcctcagtttcctcatctgtaaaatggggaagatcattataggcttgtaaatgaaatgaattaatacttataaaatgcttaaattagtcctggatcaaagtaagctttcaataaattgtaagctcttatgttcaagctctcagaaccagaatactcgagatgcagacaaaacattacctctcttaagaggtttgttggggaaagtatagctggagttaaaaatttaacctcttagataagtcactgttcaagctactggttttcatctccaccattccacctaaattgccaccaccttgctgaattagacacacttgaccacccttccttcttggcctagtgtttttctgggattgtccgtaacaccaaatatttctctaaactcactaaacatctctttttaattcccattgcaaaatcctttttgtttacctgtacttattttttaactttcattttgaaataattataagttcacaagaaattacaataataatatactgggaggacccaagtgtctagtgtccttcagtggtaacatcttgcatagctatagttcagtatcaaaaccaggaaaaatgcattgggaaaactgcagagcttattaagatgtcatcagttttatttgtacgtgtgtgtgtgtgtgtgtgtgtgtgtgtgtgtgtatgcgtgcctatgcaattttgtcatgtttagctttgtataaccaccactggaactgtttcactaccacatggctcccttgtgctacctctttatagctgcagcttctaatctgttctctgtctataattttataattcaaaaatgctatgtacatgaatctgtaaccatttggcttggctttctccattcagcatgattcccatgagatccatccaagttgttgagattatcgatagttcattccttgttattgctgcattgtgtcccatggtacaggtgtaccatagtttgtttagcagttcacccactgaagggcatttgagttgtttccagtttttggctattacaaataaagctgttatgaatatttgtgcacacagacatacattgtgtgagcataggttttcatttctctgggataaatgcccaagagtggaattgttgggtcataagttaaatgcatgtttagctttttaagaaactgccaaactattttccagtgtggctgtaccattttatattccgaccagcagtatatgagtaatatcacttctccacagccttgccagcatttgatgttgtttttacgtttcactttagtcatgctgatgggtgtgtagtgatacctcattgtggttttagttgacatttctctaccggctaatgatgtgaaaacatcttttcgtgtacttatttgc

SEQ ID NO: 37150 - DNA, 2300 bp, Homo sapien
aaagaaattatattcaaggacaaaatagagaccagtgtttgggctgggaagaacagagattttattctttaattttgaaggttgatcatttgttactttatgaaaaaccttgtagccatttttaaatagtatctgatcttggtctttccccctaaaaaaggcaagaaaggttaaattcaaagctacctgcacaaatttcagacccattttgcctgagcttttttgcatttgtgaagaagtgatcagacttgacagtagagttgttgggagagtttgaaagtatgatatgggtatggggtgaaattgatttccagcttaattaaatctattgtgaacttgttagtgaagcaaatctacatgttaattgttgtaaaggagttcccctcaactcacttccatggggctttgtgttattctcaccgccccctcccctgcctaccattccagttgcttacccactcatcctcagcatggcaggctcggccattcctcaacaatgacgttatttgtccttttaaaatattccgatcgctcatatttgctctctgtttcggacagcagtggaaggcatttcaggaaaaaaaactgtgttactcaaaataaacatgaagataatattgagaggagtgaaatgaaataaatttgctagacggaaaaagagaaaaatccaaaggaaggaatggaaggcacaaacccagtaacatggtggcgtgggtgctatctccaggtgaacaagacagaacttgcaggcaacatggaatctcatctcccatcccactcacgtcctttccactcggccctgcattctcttctgcaggtttgagatggcccacatagccaatgtagagctcttcaggagatatttttacagaaaatcctgatcacatggcctccatttgtttattctcttgccgtttttgtttttttttttaactttttttttttttaagacagagtttcactttgtcgcccaggctggaatgcaatggcacaatctgggctcactgcaacctccgcctcctgggttcaagcgattctcatgcctcagcctcccaagtagctaggattacaggcacccatcaccatgcccagctaatttttgtatttttagtagagatggggtttcacaatattggccaggctggtctcaaactcctgacctaagatgatccacctgccttggcctcctaaagtgctgggattacaggcatgggccactgtgctcagcctattttttactttttttagagatggggtcttgctgtgttacccaggctggagtgtagtggcatgatcatagctcactacagccttgaactcctcttgccattttttttatccttaaaatttccatgtctcactctcttgccaactgttctctctcatttggtcccttgattcactctaaactcaaaccctgataaagcagctgatcggtgaagtgtctgttgttactaaagtagaagttagaggcagaacagtggcagagagccctggaatctggcccttggtaggtgctccacaaatgtttgttgaacaaatgaataagtggagccaggttgtctatgccctagtcccagctctctcacatgcgctagtgagagatatatacatgtataaaaaaaaatctccctgtgcctcagtttcctcatctgtaaaatggggaagatcattataggcttgtaaatgaaatgaattaatacttataaaatgcttaaattagtcctggatcaaagtaagctttcaataaattgtaagctcttatgttcaagctctcagaaccagaatactcgagatgcagacaaaacattacctctcttaagaggtttgttggggaaagtatagctggagttaaaaatttaacctcttagataagtcactgttcaagctactggttttcatctccaccattccacctaaattgccaccaccttgctgaattagacacacttgaccacccttccttcttggcctagtgtttttctgggattgtccgtaacaccaaatatttctctaaactcactaaacatctctttttaattcccattgcaaaatcctttttgtttacctgtacttattttttaactttcattttgaaataattataagttcacaagaaattacaataataatatactgggaggacccaagtgtctagtgtccttcagtggtaacatcttgcatagctatagttcagtatcaaaaccaggaaaaatgcattgggaaaactgcagagcttattaagatgtcatcagttttatttgtacgtgtgtgtgtgtgtgtgtgtgtgtgtgtgtgtg

SEQ ID NO: 37151 - DNA, 2300 bp, Homo sapien
tcaggtgaggtgtggtaactcacacctgtaatcccagcactttgggaggctgaggtgggacaactgcccgggcccaggagttcaagaccagctcgggcaacacagagagaccctgtctaaaccaaaaaaaaatcttctaaaaataaaaagaaattttaaaaagaaatatattcatagcctttgacctttttcagtattagggtatacatctttccttttacgtcggaaagtacttagattttatataaattatatgctacggttattaaacctgtccttttatatatgtcgcaaatattttccttctttgtatttcctttactttgtatctttttcttttttgagacagggtctggctctgtctcccaggttggagtacagtggcacagacacggctcactgcgacctcaatctcccaaggctcaagcaatccaccttcctcagcctcctgagtagttgggactacaggcacatgccaccatgccctactaatttttaaatttttatttagtagtgacggggtctggctaagttgcccaggctgttcttcaacttttgagatcaagagatcctcttgcttctgccttccaaagttttgggattacaggcatgagccactgcatctggccatgctactttgtatctttttaaacatgtagatgttttcaaagaatttctagacctctctggctttgacattttttgtctcttaattgtattataaacacctagggatgtgattccatagtttacgtcctcctacacaggattaaggaggcagctgcttcttgggttttagcatatacaagtttcttcaaggtcttaaaggaaaaaaagtacttgttaggagggctacatgtcactgggcaacaggaacttttcagcttcattataatcctatagcaccaccgctgtatatgtggtcctataagattataatggagctgaaaagtgctagcgagcttcttaactgggataaaagtttgtttgtaaacgtatgtaaatgtatttacatgtgctagcccagggtcaacctaaaaggtagcgaaagtgtttagcccagaagtctacatagaaactagggttgtctacctccataccaccctgaatgtcccccgatctcggaagctaagcagggtcaggcctggttagtacttggatgggacaatagggctaaggtgagtagatttaatgctccaggataacgacctttaccgacaggtcattgtgtggcacgtggctgtatgtagttattaaaatgtaaatacatatatttacaaacaaactttttttcccagttaagaagctcgctagcacacagcattctgttgaaagccccctttatttcgcagtcctgaagggagtgagggaaggaagtaaaagggcagaggaaataatgaatgaatgcgagacgccgattgtacagggacttgtttccatactgctctctaccagaaacgttctcagtttccttccttctgctggacatgttccaagggccaaaacctcaaataatgtgactttgtagattggagagtgtgtgaccacagaaaggaaagggaggcagcacgtgccagccggcgacagaatgttaagtctgcagcatactccaccgcaatgaaacaaataatttgtgtatttcctccccttccttcgcccagagccactgtgagaatgggctacagaaagtttcgaggcagtaaagccagttgttcacccagaacatctgactgccataaaaattatggtgacgagaaagaacgtttgctcaaatgccggggtcgggttgagggctggagaaaggtcccaccccgcagcatctacctcccgggctcctcaccatgtgcatcgcctcctccatccacttttcggtctcctctgccgacaccgagcacgcgccgcttgcagctggcttgggtgccgccttcgcctccatacccagccaccactcagctacagagcccgcggcagaggaggagcgcgggcagcggaacgcggcgggcccgggaccccgtttccgggggtagtctaatgaaaaggcactcgggagctatttctgaacggacctgggcttgtcggaccagtgagcggcggcggctgcgcggcggcagcggcagaaagcgtagctgctttgctgtagtccacgcccccttgccgctccggtgacagtctctgcggaaagtcacgtttgtgatttcgggagagcacagaacgggacgacggcgctcttgctgggtcatctgggccaggtgacgaagaaacagtttcctggtgaagcagtccctcacccctagtcagcc

SEQ ID NO: 37152 - DNA, 2300 bp, Homo sapien
cctgaagcagaaagaacatgagactcaaacaaatgccaaccacggtcatctactcttcctttcttttcagactgactccttttttgatataaaacactaggattattttctctttctggccgtctgaacttttctattttttgcattcctcttattctgtaactataaagctcttgttagttttttaaaaaaattataagtttaagtatactcttttgcttcccctgtgattatttctaatctactacaaagttgttccataagctgaaggagtattccttctgagatcgctaaagagataattttccttccttcagtaaacgcaaaaatactttatttgtatttcttcaatcacacatatatttttagcttttataaataaaatggactctgtagtcttaggataatttaaatatacattagatactagcgactgaagatatcagaaaataccttttatatataaaggatttctcgaaggtgttcaaaatttacatatgcttattattgatgtgtgatagacctcagagacatgcaaaacaccatccttggctcagcaacaagaactctgtttcaaactttcaagcatcaccaaaatctgaactattgatgctaaaggtattaattgcaaattgtttggggagaacagaatacaatctaatacgtactgttaatttcaaattgtttggggagaacagaatacaatctaatactaagagaaaagccaaccaaattctttgggaaactctgttcttgattttaagtacttttgtaaacatagcatgtaataagtgatgagactatttctcaaaaactcaagttctaacaaatttcctcttttatagttcctagatgtccttttcatataattcacaaaacttttattccctccttcaaatccctgaatattatcacatgagcattgtatgagggaaaagcgtctcaagatttttatcttatctgtttctaaatctcctctgggcctgtgcaactcagttatgtcagctagattacaatgatcccaaccttgaagatcctgaggaagattgcacaacatccctcaagcatttttcttactgccatagtttgtattctaaaatggcagaaacagagctaaaatattgatttgtttttctttatctaatccatatctttcagtcctttaggacaactgcgctgttttcaaaaattcaaatcgactttaaccaccacccgaagtgcagcctataggtaacttccctagattattattaaactcctgagaagggtgagagccaaagtatcaagagtgccaaggagaaatgcagaatctcacaggaaagcagaattttttttaaaaagttcctgtaagagaatggtgccttgaaacagaaacttaaactgtgatgagttctccaaaggtccgtgagaaaaaaggataggtgagaaacagagttaagagtcggtgacagggcaaagggcacagaggcatttctcaactgcagagatgggagaaccctggaggttggccacctcccttttcatcccatggttgatcgaactccctctacatatcccagactaggatcgcccggcctgtccttattttagaagaagtcacctctcccacccccttctcccaatgccccctttcaagcacgttgtcacccacctccaaggaccgtgcccaggaagatgcatttctttttgtggcgtttcagaaaattccatacagacctcagcatctttaggccctaggggtgtgggctgactaggggtgagggactgcttcaccaggaaactgtttcttcgtcacctggcccagatgacccagcaagagcgccgtcgtcccgttctgtgctctcccgaaatcacaaacgtgactttccgcagagactgtcaccggagcggcaagggggcgtggactacagcaaagcagctacgctttctgccgctgccgccgcgcagccgccgccgctcactggtccgacaagcccaggtccgttcagaaatagctcccgagtgccttttcattagactacccccggaaacggggtcccgggcccgccgcgttccgctgcccgcgctcctcctctgccgcgggctctgtagctgagtggtggctgggtatggaggcgaaggcggcacccaagccagctgcaagcggcgcgtgctcggtgtcggcagaggagaccgaaaagtggatggaggaggcgatgcacatggtgaggagcccgggaggtagatgctgcggggtgggacctttctccagccctcaacccgaccccggcatttgagcaaacgttctttctcgtcaccat

SEQ ID NO: 37153 - DNA, 2300 bp, Homo sapien
cccgggggtggaggtggcagtgagtcaacactgtgccactgcactccagcctgggcaacagaaccagactctgtctcaaataaaaaaaaattgtcatctttatcacaaactggagctattgcaattggattcgttgagccctttcctctagaacaccctcactgtaaaaaaacaaaacaaaattggggactcttacggtggagctgtggccccggggggccatctggcatgtcatggagaggaaaaatgcccctacacctgcagtgacagcgccctctgctgctcccatctctctgcagagatgggttgggataatgcaggcaacagccacttagtgtcaagttcttcactcaataattagaaccccagttcactggagagcttcaacaaacattttgagtgctgcttttctgctgtaattgtaggcactacagaaaagaaggtcattatgaatgccctcaaaaagctcacagtctgatgggaaatcagacctgtaccacctagctactagaggatgcgtgaaatcctatgtgtgcttggaaggaggtgttatgaagcagatcagggaaagtacaacattctgggagggaagggtggtggcagaaagcttcacaaaagaagcagcatttgaattggctcattgaagggtaatgatttcatgggggcagaagcagttgaggattctggctttactttgaaaacacttacgaggtggaggagaggctgggcttggtggctcatgcctgtaattctagcactttgggaggccaaggcgggcagatcacctgaggtcaagagtttgagaccagcttgtccaacatggtgaaaccctgtctctactaaaaaagaaaagaaaaatacaaaaattagtctggcacagtggcatgtgcctgtagtcccagctactctggaggctgaggcaggagaatccttgaacccgggaggcagaggctgcagtgagcctagatcatgttactgcactcaagcctgggcgagagagcgagactctgtctcaaaaacaaacaaacaaacaaacaaacaaacaaacaaacaaaccaaacaagaggtggaggtgataagcttcccaaatatccttttgattaatctttccaagttgctggccttttttcccaagcttgcaggtttcttaaacattcattccactggtttcacctgtctcagatcatctccttgttcaatgcagtggttctcaggaaagtttggaccaccaatcagaaacatcacaattttgttttctttctttttttttttttttttgagatggagtctcactctgtagcccaggctggagtgcagtggcaccgtctctgctcactgtaactgcctcccgggttcaagcgattctcctgcctcagcctcccgagtaactgggactacaggcgtccgccaccacgtcccgctaattttttgtatttttagtagggacggggtttcaccgtgttagtcaggatggtctcgatcttctgaccttgtgatccgcccgcctcggcctcccaaagtgttgggattacaggagtgagccaccgcgcccggcccaacatcagaacatcctagaagtaggaactgggtagaaacgcaaattcttgggccccaacctaactgctgaatctgaagctcttggaatttcatctgatacaaattcaaggttgacaaccacggttctaacatgcaggatcttgggagctgatacagaggccgagaaggatctaggttgctttccatgttccatcatggcgagacccggctgaagttcctgccttgaccttctcgtgcacgcttcggacgtgtggagcagccaccagggtgggctgggggcattgtcttcttgggcagtttcttggtcagggtcgtgtctgcttgagggcagaggcgctggccacaaggccctgactcagactcatattttcccctcaagaggacagagccttagcaaagccgtcccagctggctttggggtaatgctggccttagttatgctgagcgatgcagccctcctgaggtcattcggaacgcccgggagagtggccactcccgccccagagggggaagggtggccggtttccaagtccgacttggtcaggtgaccgcggcgcggcatactcagcggcagagacggaagaacagcgctcccgaggccgcgggagcctgcagagaggacagccggcctgcgccgggacatgcggccccaggagctccccaggctcgcgttcccgttgctgctgttgctgttgctgctgctgccgccgccgccgtgccctgcccacagcgccacgcgcttc

SEQ ID NO: 37154 - DNA, 2300 bp, Homo sapien
aagacagactaaaaacttaaaaaagtaaacagtttaacaattttctaaagcatttcaataacccaagtttgacttctctcagcttatgtgaagtaaaaaattccatagacagaagtataattaactttcaattatttatttatttgagacaggatctcactctgtcacccagactagagtgcagtgacacgatctcagctcaatgcagcctcgacctcaagggttccagcaatcctcccacctcaacctcccaaatagctgggaccacaggtgtgcgccaccacaccctgctaattttttgtatttttttttttttgtagagacagggtttcaccatgttgcccaggctggtcttgaactctcaagctcaagtgatccacctgccttgtcctcccaaagtgctgggattacaggcatgagccaccgtgcgcagccagaataaatatattttaatgttaggaaaaagcacttgctgctgatgattttgcagaaaaataagagaatatgatgcttatgttgatggaatcttactgattccctaaacactatgtcaagagaaagaacacagggtttcttcttttttttttttttttttttgagacggagtttgtgtcgcccaggctggagtgcagtggcgcgatcttggctcactgcaatctccacctcccgggttcaaataattctcctgcctcagcctcctgagtacctggaactacaggtgtgtgccaccatgcctggcttaatttttcgtagagatgcggtttcaccatgttcgcaaggatggtctcgatctgctgacctcgtgatccacccacctcggcctctcaaagtgctgggagtacaggcttgagcccccgggtttcttctcttgataaaaagcctatagtgccctgtctcacacgtaactggtttacatacttttgaactactctctgcatttgggtcattggaacactttactgctaattttttcagttgtttcttcccttcttgttgctttttttaaaaaaagaattgtggtaaaaaatacttaaaataaaatttactacatcaaccatttttatgtgtgcaatttagtggcattacgtacattcaccactgtttccagaacttttcatcaacccaaacagaaactccaaacctgttaaacaataactccttttctcccctttcctccagcccctagaagcttatactctattttctatctctaggaatttgcctattctaggtaaatcctctacgtggaatcatacaatatttatccatctgtgtctggcttatttcattgagcagaatgttttcaagccatgttgcagcatatgttcctctttatggctggataatactcatgtacataaataccatattttgttaattcaactactcattaccttttaggaataactgtggatgatctatttccaatgccttagatatgttctttaatgtgcttttttctttcacaatgagagtctgtggcatgaattgtatatacataaattttaagacaggattattacccttgaaactcagagtcacactggagaggcagtcaagtgatatagtttggatatttgtccccacccaaatcttatgttaaattgtaatccccagtgctggaggtggggcctggtgggaggtgtttgcgtcatgggagcagattcctcatggcttggtgctgtctttgcaatagtgagtgagttctcgtgagacctggtcacttaaaagtaagtggcacctccaacccagtctctggctgtcttgctcctgctctggccatgtgacgggcctgcttcccctttgctttccagcctcattgtaaacttcctgaggcctggggaggccaagcagatgccagcaccgtgcttcctgtacagcctgcagaactgtgagctaattaaacctcttttctttctaaattacccagtctcaggtatttattcatagcagtgcaagaatggcctaatacatcaagtaaacagattattccaacacaacagagagcactgtgacaaggctacgaggtcacaaagggaagaacaaggaactctggctggcggtgagagttttcagtgaagtaacaatatctgactagggttttgaagaatgagcagaagctctgcgtcagatgaagaagagacaggaggccctccaagcaaaggaaccactcatgtcaagacatggggcaaaaagagaggatgtatttggagaacagagagtaaccgaaggctatcattcaatcagtgatagtcttcatggaggttaatatcaaaggcaacctgaatttcctcagactt

SEQ ID NO: 37155 - DNA, 2300 bp, Homo sapien
gctggagggtctctaaaaaaagaaataaagtagatagtaatggattataggataaaggaaatatccatgagaccacactaatacaaataaataactgaatgaataaatagctcagaagaggtagctcttcattgtagtagaattccaattgataaatgcagaaggatgataactagaaagtcaccatctgacaaacaccgcaatgataattgttactaacaatgataattgttagtgggataattggctaaatttgaatgacagctgcagattagttagaagtactgtactgtactgctctttacctacattcccttcttgatttccatcgttgtactacagttttgtaagatattaccatttggggagtccaggtgaagagtatacgagaactccatgtaccagttttgcagcagctaaaagttaaatgatcttaaattagaaagttttttaaatttcatgaaaaataggaatataatttgcgtcttcgagtctcaggggcatttgataaacatcgatcaccacttgcagagccatcccttaggttagggaatcagggcaattgtcttcagcctgaattttggaagaagaggaggagtccggggagggatttgcaataaagcggcatctccaccgtcaaaagtgtgctcaataagatagaggccccctaccagaacgagtcgatgaacctgctacttctccacttgcacatgcacctcacgctggccatggctgctgtgcaaaggactgatcttcataaaaaggtgtggggattagggaaggagagcaagcggggagagggagagccccaggagagtggggaggggcctgccacacctggggtgagttgccagtcacctcatcaggaccagctctgggagctgaactgaaaaggcacaaaactgccaatcgatagaaagctattgatagaacattttcatggctgtatttgaaatgcagtcgatgtcaccccccaaaaacaataatatttacttccatgtcactggcaagtgtgttactcctcatctcacattttaatctccagcacagtgagagaagccgaagtacaaaccctgcataagatgactgtgagtacaaagacatttgtgattagggccagcgggtggctgaatggaaaaacaaatggggcttcacctgtgactcagaccaacagcaacctcgttttttaatatcagcaaagcaaatcattatttctaaaaatgtcatgcacacattttaaattcttaaatgttatgatgccacgaatgctgatctttggttaaatctgatttgagcctaacacacttaagggaaacagaatctcttaagagcagagaataaggagaaaaacaatgaaattgacctcaaaggattggactgggacttttattatttaggttcctagatttaaacattttttatagtaatgtttactcattcaaaaacatctactgaatcgaattctgtgaactggttgtcaaaaatgaaaatctcctggtctggtggagatttctttaagacattccaccatataacttatcacacgcagcacttcccaaatcttcagtcatttgaatagcatttctcagacttttgccatatctgcacatcaattatacttttatctgctggatatttctccttaagtcacttcattttctccaatgttattgtaaaagaagcatttatgcaaccactaagaatgggaaagacacatcacttgccataagtggaaaagaattatacatgtaaatatttaaaaaacaggtatgtctatctatattccacataaaaatatcctacataccaccagtggtatgtaggccacagtttggaaaatatggcaatataatctaaataatataaatacatcaaaattttcaggatgtactccccacatacaagaaaggtttaaaatcagagaacagactgaggccattttagagatggaatgtgtagtcagaataaacacaattgtgccactgtcacaaataatccccagatatcattggcttgacatcacaaaaatggatttctcaattacataaagtccattgtgggccacatgattctccaaggagactgttgccatggtgactcagagttgaggccaatggcggctccaccatcctgtggctatgattcctgaacttgtggtctcctcagttgatgaggtgaagaaagaaagcctggagaattatgcacgagcttctcactgtctcagcccacaagtaacacacctctttccctcacagcccacactggctggaaccaatcacatagccctgcctaactgcaag

SEQ ID NO: 37156 - DNA, 2300 bp, Homo sapien
catgattatttgctctaagtggaataagtaaagatttttaatagcgtcacgtcacttcaagttatgacactaaatgcattttggagcgaaacttacaaaaaacaatatttttaaaactttctggattttagacttgtgagtaaagattagattttatataaatcgcattgtgagttagggagtgcttaatggactggccttggaagccagtcagtatttatggaaaaaaaagtgtgtttcgaacgaccaataaaatgaacttttggaacataatccatttgtcatttaaggactaacagtattaataaaaatgactgagagtcagattttgaactgtggacaaagctaatataaatatattcatattaggcaataggcactgccaatagatgagacttcttagctactccttacccacatctcagctttgatgatgtatcttctctctctgttacctttatttccctgttatctcctcttttttttcttaaaaatagttagtttgtcctagatttggagcttataacactcactctggatagttggcaggtcttaatcagggcaagtagacgaggtatagaaacccagtgatttcagtcttacgggatccaagcaaattttttaaaaatatataaagatgattttttaaattcatagagtgatatacctttaaaattgtgtgacagaattgaaatgacagggttaaaaatctcaggttaaaaatcactgagaaattcagcttttatttgaggaaaacatttctgaactatcactgacgtaaacaaagtgttttgtttaaacaataaaagaacctcatatctataggaaatcctgaagttacattaaaaacaaaaatacttaaacctagaagctgttacaatgggaaactagactataaataatttgtgaccggtgtgtcactaggaattccaatggcataaagaaatgcttaataaacaaattgcctttcaaatttggcaactctggggatataacactatgaactgtttttttaaaattctgtctgtataaaagacctggagagcctaactatactgtggattcatttcatcgtaggtcctatgaggtcattgcaaatctttgtactatatttgagaaaacagttgcgctgtccccagcatctaatgtcatgacagccacgaggcctggcacctgatttctccagcactgtgttcacccttgtgtcctgacagcgtaagcagtttttggtgtctttgagagtcatctttacacagccaaattaaacgaaagaagtgaagtagggccttcctgtgttagtcagtctttcctgatcttcacatttctttagccacagatgataacggactgtagaatcccctaacctcttttgacagttctttcttgaattattagtgacattcggtgaaaatatttgaatttctctgttaggataggtgagcagaaatgctgatcagaaatagaagaactagtcatgatgaacataactaaaatggaatggcaatactcaacttcctaatatttatttggaacagagatattaaagatagtctttatttttcaatgttttatctgctactccctgcctcctcccccaacaacaaccaaaacactttaaaattttaaattgaaaagttgcccagtcattcagtgaggtcaatgataaaggctgaaccatatttagacaaaccccaaggaaaggataatgtattgtatttttaaatattcctttttaccttttcatgatcagtgcctcttcctgctcctgtttgccctggcatcttttggaaagctctgtgttttgcatagcatgtgcactttttttcctgaaatgtgcaacacattcaacattgcagtgatttttttccccctccttagcttagagcagaggtggaaaccccaggggattcaagtacccacttgataggctcagtctctcttaatcagcctgtaatggagctaatggctgtttgtcatccttggagatataaatttcctggcggtgtctcctgcagacagtgcatgaagtatgctcagtgtgccagcaagggctgataatcagcagaaggacagggtgcttcgttagtcagaagagccagggcttcccggctgccaggctacagaactcgcctcgccactcctgagacatggacaacgccggtgggtaaatcaagcatgaattcttcatagctgctggcttcctttgcagcccgcatcctttactgcggaaggtttgcctatttgttgctctcgttttgcacttaaatgttcaagactgagacgcgtgtaatatgtgaacc

SEQ ID NO: 37157 - DNA, 2300 bp, Homo sapien
aacctagaaatgaaatttagagatttctgtagacgttttctatgttcattagtataacttgttagctgtgataaaaaggccacttaaatgccaagttccatcagaagctctagaaaccaagaacaagaactgtcccactcttagaaagaaaacttagtgcacacttcctgcagttttggttgacatgcttcaaggataatgtaatggaactggaagagtttcagagaaaattgcataacctggttagggtattataggaatcccagatgaggctgaagattatattaactagcaaatcatgaaaggtcttgaataaggtaaatatagctgtattaagcaattcctgaaaaactggaactatagtgcacctccttgatctttgaaataagaatttatagaagtaatagaaatatgctattgtttctcaaggaaaagaagaaatgatagcaaccttaaagtttaacttttatcagtatttaaaaattattacagttacatattttgaatgtgcaaaaggtactgtatatttcctctgatcagtgacctccctttatcagaaagactgtcaaaaggaagagtgaaacattctccctcttaacttacctttaaccacttttgtttgtttgtttttttcttacggcaactcaaagcaaagagctggaggagccagccattataattgcttactctcatcgcttagcgccccaggtgggatgtgtttccaaaacacatttttgtatttataaggaaatgtagttaggattaattttattgtcctaattagaactcacattttggttaaatcctcaatttcattaaaaaaaaaaaaatcagtgtttcttaagagtgaattaggcaaagggaagaagacaatggatcacacttttttagggaaaagatcttcctcacagtggtgggtgggctatttgggtgtgaaaaaacatagggcaacttaattaaccatgacaaaacagacaagtaagtgcctttcaaaaaaatcaaacaaggctctgcacgatcttaataataaaaattttagaaaaaaatgattttcatgttagttcagagttgattgtctaggataaattaaaaaatgaaagctgtggtaaatgacctaaatatattgcactttctgatattttttacattttaatgaaatatatgccttcagcaaagtgcacacatcattacagacatctcaatgaattttcataaaatgaacacatccagtaaccaccatccaatctaatgcaccatatacagatgttccatatactgtatatatatatacacacattatatatatatagcatgaagattacttatactaattaatcattaactgtaaatatgaagaatatttatttgtattcatatttttaagaagattgagatttaacaggatattatagaagggtttaattcacctttcaagtttgttatagtttttttccccttttgtgtattttaatcactttatttcacagtaattcttttgaaataaaggagaggtcagcactccagagttttaggtgggagacagcaaaaagtatattttgttgatctcacacgtagacctaccatttagatttgttgtcaagcctgattgaggccattagtgccgtttttaaaaaattatatttgttaaaaggaagataatttttaaaacgagaaaaaaatgggcacaagacatgagagtgccacaatactgcaaatagaatgtaaggaaggaaataacttttaagaaacaaattttgttaaattaagtaccgtgactaaatactttaattccttttcttgtagcccgtaaggatcatttgactttgaaccttttaagtcaaagaggagtagtctgaaagcctgaactccctaccaccctgagggggtgcgggtgcggcggggccggctgggggcttcccccaccccctgctcctgcgccctccccccgcttccccctcctcccctccctatcgccctcaccccccttcttcccccgtgacccctgaccccagctaatctgcatagaggaatgacaggcatccgctgggcaggatccgccgcgccggctgcggccggccgggctgggagacccgcgcggggtagaaggtgaggggacccggcgggccgctcggcacaggccgggacatgaacgcctggaagtctggctgggagcggacccatgatcgaaggaccaaaggagccgcttgatcgctggacctggccctgcgaccccagtcatgggccagacctcggtgtccacgctgtccccgcagcccggcagcggtgagtccggggcgcac

SEQ ID NO: 37158 - DNA, 2300 bp, Homo sapien
ggtttcagcctgcagagtggcctgacaggctgggaagcgtagcctccagcctgaagccaaaaacatacattctgagggagggacaaagtgagaggaagcagggtggcagaatatacatatttaataagctataggaggaatcatgaatatttatgaaaggagaaacatgtacatgtgcaattgagcttcattgccccttcatgggtcctaggtacaaacaatggggcatcagcatgatctgaagagttttcagcctctgatgtcaaaaggtgaagtagaggccaataaaacccttactgtgcctgctccgtagattggccagaaccattccatagtgggtagtctgttacgcacaaaacggagggcagcaacaggctgatatcagtggtggagtcttttgaaagggatggtttctatttatcccttagggaagaaagcctgatcctggttagtgagggaggggatataacaaggcaaagcaagaactcagttttcaaggttactctgggtccccttggccaaaagggagtccgttcagtcagctggggggcttagtacttagtttgtatttctcttgcctcatttttaggatttgtaagatgctgaagataattgcgtctctttcatagtgttgcagtgaggatgaaatgagatgattcagataaagtgccagaacattaattcatttaaataaatacttactgagcatatatgccccatgcatcaggcccctgatgatacagcagtaagtacaactgattgaaaggaaatgaaaactgcccccttggatcttttaattctatataatgaataataacaacgaatctctggcacataggagtgctatgtattatctctgttacaaagcaatatcctaagacaagttttatggtcctaacctaaattatttctatatatatatatttttgagacagagtttcgctcttgtcgcccaggctggagtgcaatggcatgatctcagctcactgcaacctctgcctcccgggttcaagctattctcctgcctcaacctcccaagtagttgggattacaggcacctgccatcacacctggctaagttttgtatttttagtagagacggggtttcaccacgttggctagtctggtcttgaactcctgacctcaggtgatccacccgcttcggcctcccaaagtgctgggatgacagacatgagccaccgcgcctggcctatttctataatttttactgtaataaaagaataatactccacaaatacttacagtgataatgcctacggcataaagacacaatccagggtaagccattcattgagaggtcaccagaaactgggaagttggggaaacaaatttgaaaaaaaggtctgctgatgaaagtgactgcatttaccacacactttcgtccaagaaaagctatgtgagtacgccaacgccggcctgaaatcttcctaagaatgcgtgcttatagcctatttgtttaaacagggggagaaagttaacattcaaacaccagagattctgaatatattttattagttcaaatgcctctacagttaacagagtctcgggggtttggttaacagggcagatgaaagcagttcatgaaacagtggaaaatataacctgatcaagtctgatgcagtctataaaggcaaggccccagcctccgttgctacggcaaccgactccgcccccacccggagagggaacctgaaacttggcgaccccagcaccccagcggggtggtcgcctcccttccgtgtccgcggctttgttttttatggttgggaataggtaagggacacaagtcaagggggatgctagattcgtcccctctggtctccgtagagggagctataaaaggttcgtccacaagcagaaacccctctgtggcgcctcaacgttaaggacccccacgattccctttgcccggcgggagactaaaggccggaaaagtacagcccgcccaggggtgggagccgagctagccccacctcccggtggcttctcgcgatcgtggagacgcagcgagcctatgtaacttccggtcgcgacccatcagctcctcggcgattggtccgtttccacggccggctgggtgacgttatcgccgggtcctggggctgcacgtgtggtgaggcctacagaagcggccttcagctggaccttggtctccccgccggacttcgagggtgtcatcgccgcccctgttgggggtgagcgccgcgcggctgcagcatggtgagcaagccttgcttgtttcggcggccgagcgctgtggttttgcagaggccaggctg

SEQ ID NO: 37159 - DNA, 2300 bp, Homo sapien
aatagcgaagtaagaatgtagaaagaggtgatggatcttattaaactttagctgtttgtgtcgtgattttatttactggttggtagatgctctgtgtggagctgtctactccagattatgttgtggcaggcttcttgtcattctagttcagtcggccaggggccttccctgagcagccagtgtaaagtagcttttaaggcattttcacgtcactgtcttatattttcttcaccggaaattatcttgattttcttgctaagaacagggactttatctgactttcccacttctgtattctcagttcccataacaaggtctggcacaaagtaggtgctcaaggaatgtttgttgaaggaaggttaagtatggattctgcagaacacagctgatgttgcctgccctagaagtgtagatttttaaaaagtatctttaacatgactactaaagatgcatgtgtggactatggaattattctccgtctttttgttctgttttaattaattgttgtgattttgttcctttgaagcctcacaggaagaaaaagccctttatagagaagaagaaagctgtgtcttttcacttggtccaccggagccaacgagatcctttagcagcagatgagagtgcaccccagagggttctattgcccacacaaaaagtaggtcctgttctttagccagtcagtttgtaggtagacaatagttttttttttctttttttttttttaaataaatagagtcttagcacgttgcccaggctggtctcgaactcctggacttaagcagtcctcccagcttggcctccaaaagtgctgggattacaggcatgagccaccacgccttgctatgttaatagtttttaataaattgttagccagctgttattctcagataactgatattctgggaaataatctataagttaattttcagtacaattggtgatttttacatcattcacattattttgattgggaagacaaagatctttatttgagatgtttaaacgagcaaatcttgtagaataatggtaaatatttaccaaagcaccagctacaatgcggcatgatgttatttagggcaccgatatatgctcaaactgtgctttctctaagatcctgccgtttcataaccgcaaactgcattttgcctcctgcttgctcatcttaggaaatgtaaaatatctgagctccttggttagctcagggaactttgcaagggagcctggtaaagattgacttaatgttagactctacttattaagactcttaatgttacacaacacttattaagtgtagatattatgaaacagagtgttgggaaacagagtactgggggacatgggccacgtttagcttttcagtaaagccagttttgttgtatgttgagaagggtttttttgcatataaatacaagaaattgtacttacctttcaaggcgcccaaatctctgtttcccaggctggcatgcaaagtggctccatctcagctcactgcaacttctacctcttgggctcaagcgatcctcccaccttagcctccagagtagccggtactacaggcacacgccacctggcctggctgatttttaaaattattttgtagaaacgaggtctcactattttgcccaggctggtcttgaactccaaggctcaagtgatcctcctacctcagcatcccaaagtgctgggattataggcatgagccactgcacctggccccccaggtcttttcttataaccctccaaatagatgataaaataaattgtatgtttgtttcttgactcaaaatgttgcacagaaatgtctagtggaaggagcaattgttatttatttttattgcccttttaaaagcatgaatgttttcattccattttaatgttacgtagcactctggttttgaagctgtacatttcctgtttgtcaagaattctttgtctttttcccatcagccaaaatgttcatgtgccatctgcctcctacttggaaagctgtactcattgtaatattcccatgccttatccttggaaggcttactgattccattttgtttatagatagtgaagaaagtactaattccatttcgtttatagatagacaatgaagaaaggcgagcagaacagaggaagtatggagtgttctttgatgacgactatgactacctgcagcacctgaaggaaccatctgggccttcagagcttattccctcaagtaccttcagtgcacacaacaggagagaggagaaagaagaaacgctagtaattccagtaaggcttttcagcaatttaattgtgggagtgag

SEQ ID NO: 37160 - DNA, 2300 bp, Homo sapien
gtcattgatgggcatttaagttggttccaagtctttgctattgtgaacagtgctacaataaacctacgtgtgcatgtgtctttatagtagaatgatttattatcctttgggtatgtacccagtaatgggattgctgggtcaaatggtatttctggttctagatccttgaggaatcgccacactgtcttccacaatggttgaactaatttacactcccaacaacaacataaaagcgttcctatttctccacatcctctccagaatctgttgtttcctgactttttaatgattgccattctaactggcgtgagatagtttctcattgtggttttaatttgcatttctataatgaccagtgatgatgagctttttttcatgtttgttggctgcataaatgtcttcatttgagaaatatctgttcctatcttttgcccacttttcaatggggttgtttgtttttttcttgtaaatttaagttctttgtagattctggatattagccctttgtcagatggattgattgcaaaaattttctcccattgtgtgggttgcctgttgactctgatgatagtttcttttgctctgcagaagctctttaatttaattagatcccatttgtcaattttggcttttgttgacattgcttttgatgttttagtcaagaagtctttgcccatgcctatatcctgaatggtattgcttaggttttcttctagagtttttatggttttaggtcttacgttgaagtctttaatccatcttgagttaatttttgtataaggtgtaaagaaggggtccaatttcagttttctgcatatggctagccagttttcccaatgccatttattaaatacggaatcctttccccattgcttgtttttgttaggattgtcaaagatcagatggctgtagatgtgtggtgttatttctgaggcctctgttttgttccattggtctatatatctgttttggtaccagtaccatgctgttttgattactgtagccatgtagtatagtttgaagtcaggtagtgtgatgcctccagctttgttctttctgcttaggattatcttgtaaattactttgggcagtatggccatttttatgatattgattcttcctatccatgagcatggaatgtttttccatttgtttgtgtcccctctgatttctttgagcagtggtttgtagttctccttgaagaggtccttcacatcccttgtaagttggattcctaggtattttattctctttgtagcaattgtgaatgggagttccctcacaatttggctctctgtttgtctattattggtatataggaatgcttgtgatttttgcacattgattttgtatcctgagactttgctgaagttgcttatcagcttaaggagattttgggctgagatgatggggttttctaaatagacagtgatgttaatctgcaaacagagacaatttgacttcctctcttcctattggaatacgctttatttctttctcttgcctgattgccctggccagaacttccaatactgtgttgaataggattggtgagagagggcatccttgtcttgtgccggttttcaaagggaatgcttccagcttttgcccattcagtatgatattggctgagggtttgtcataaatagctcttattattttgagatatgttccatcaatacctagtttattgagagtttttagcatgaaggggtgttgaattttatcaaaggccttttctgcatctattgagataatcatgtggtttttgtcattggttctgtttatgtaatggattacgttgaaccagccttgcatcccagggatgaagccaacttgattgtggtgaataagctttttgatgtgctgctggatttgttttgccagttttttattgacgattttcgcattgatgttcatcagggatattggcctgaaattttctttttttgttgtgtctctgccaggttttggtatcaggatgatgctggcctcataaaatgagttagagaggagtccctctttttctattgtttggaatagtttcagaaggagtggtatcagctcctctctgtacctctggtagaatttggctgtgaatctgtctggtcctgggcttctcttttggttggtaggctattgctgcctctatttcagaacatgttattggtctattcagggattccacttcctcctgatttagccttgggagggtgtatgtgtccaggaatttatccatttcttctagattttctagtttattttcatagaggtgtttatagtattctctgatggtaatt

SEQ ID NO: 37161 - DNA, 2300 bp, Homo sapien
caactattccttcattcatttatcatttatggaacactttaaacttctattacatgccaagacaccattttaggcttttggatgtatccgtgagcaaaatacaaagaactctctgcccttggggaattcacattctaatctgagacaaatctatatataacatacataataaagcacaacattagagatgatgttaggaggtgttatgtgctacagaacaaacaacaggataggtgggattaaaaacctgtataaacagtctataggttgggattataaaccctggagctaatctgttacaacagaaccaaatagagtatatgaaaatacaagctttcaaaagtgtcttatactctacttccattctattcctcagtgttagttatgtctgaaaacaccagatgagaaacggaaagaaatggaattttgatgtgctcaatcaggccaatacttcagaaatatagcatcttatggattactgttggagaaattcagaatcaggatgtcagaattcaagggggaaaataagaacgtttgatcagccaactccttttgacctacacacgttctttccagaatcaaaactagggtgactggcctcatagaatatgtaaagggaaaacgacaataactaaggtgcttttatgctctgttttaataaagagatacgctgttttcaacactcaaaagttttagctttgggtcccaatctctctttttaaaaaataaaaaaagaaaaataacaaaaaaaaacaaggcacacagcaaggcgcctaacatctacttagctcgcgggcggatcagctgacttggccagaggatgttccagtttccagatcaacctcaacccgctcggcttcgtcaaggtccttgagtggactgcttctatctttagagtcaccttgaaggaaactattccttcattcatttatcatttatggaacactttaaacttctactacatgccaagacaccattttaggctttcagatgtatcgtgagcaaaatataaaaaactctctgcccttgggggattcacattctaatctgagacaaatccatatatgacatacataataaagaagcacaacattagagatggtgagggtttaagggccacttctgggggttttaagggccaaatagaaactcaagtgagttgtcctaccacagttagtgagaataaaactattacagctacttttggttacccattcaggttgaatgaggcatcatttgagccacctcctggtgtaagcgtgtgatgtaaattggaaaagtcacatcctcctaaccaattactcttcttctgcacagttctatgctccctttgcagtctttgtgctcctgtactgcactgatacccttctgctttatgctggctacacgaacctatagctggatagttgtaaacttcctatgattgactttgtggttggtgagcacttcaacctgggctaaagctgacaggtattaaaaaaaaaaatttaacataagatagtactaaagcatcccttatgtggggaccttaccttctcaaacctctcatcatgtagggtcagctgttcatttctcctcatgactgaggaagtcatcgaatactccgtgaagcgactctttgtttcctcactccagaacaagtgatctgctatagctctgtgagtttttccgggcacagacatacagtcttcatctgacaataggcctgcagagtcatagtcatcattgctatctcccttctcatcatccacatcttcccactcgctgtcatcttcattctcagatttcctaaagtaaaggtcataaattacctaccaaaacaacttaaaaagtaacagaacaaaaccactttacacaagtaaaattggaaggtatttcaggaagggttcttgtctaggcaggaagagtgagggtgtttgatcaatctggtttggtaggaaaagcaatgaatctcacattttctgctctaaaatacagaagtctcagattaaatgctcttgaaggtctcttccaactgtaacgttctatggttaccatcccactgaagcagtaacacttaggtcatcatctctgctttgaaacaaaccacacatactgtatatccattccctcttcctctcctgttgccttattggcctgaagaataaagtcatcctcaagcagattatctggatcatcaaagtcaaaatcatcatcaagagctgcaacaatgtcaggatcaaaatccagtcgaggtcctagaaggaaaacaaaaattaagcagtaattcccaagatagcaacaattcattcacttaactc

SEQ ID NO: 37162 - DNA, 2300 bp, Homo sapien
gggaggccgaggcgggtgggtcacctgatgtcaggagttcaagaccagcctggccaacatggtgaaaccccgtgtctactaaaaaatacaaaaattagccaggtatggtggcaggcaactgtaatcccagctgctcgagaggctgaggcaggagaatagcttgaacctgggaggcagaggttgcaatgagccgagatcatgccattgcactccaacctgggcaacaagagcaaaactctgtctaaaaaaaaacatatatcaactttgaaaaaatacatatattttaataagagttaggcttttaggaaatttgtgaaaaattatttggaaagagtaatattccaatactgagttgtaagcaatttataaaacattgatcagagactccagtgttattttgcactatgaaaacacaaggtcagaaatatagtaggaattcagtaatgctttgtggaactgaaaacatgcttactgatacatgacttttatttgtttgtttaggtacatactcaaatttatataaccatccacagcttatcaagtatcaaccaaaggtaagtcctagtgtgctgagctatttgaaggatgcagtgcataaaaaatagagtgcacattttcgcacaataactttttatctttatggctagagtgatattagaaaaagcatcaacagtatgtcattaatgagctattttttaataggaatgagaagtaactctagtaccattttatctgtatttcagcccaaacaaattcgaatatcttctaaaacaggaatacctctcaatgtcttaccaaagaaaggactcacagcaaagcaaactgaaagaatacagatgattaatggcagtgatcttcctaaagtatcaactcagccacgttctaaaaatgaaagcaaagaagataaaagagcaagaaagcaagctataaaagaagagcgcaaggtaaaatatatttttcaaatgtgagatttacaaagagctggtggaggggaaattaggggaattttgtaaaagcagtctgtatcagtttaaagatgtgaataatacaagtatattcttgtacttataacaggaacgaagagtggagaagaaagctaacaaattagcatttaaactggagaaaagaaggcaagaaaaagagctgctgaacttgaagaagaatgttgagggtctaaagctatagacagtggagcatacagggcaaggcactttattaggggctcctcatctttggttattgactagaaacttcagaaagacaaaactgtttgccatttttactggcagataagaggaaaatacaatatttgtattatttttatactagtaagtgtcccctgccaaccatcttgtaaatattgtaatactttaatttttaatattataagcttacatttgctctgaagtaaatgacttcatgaatgtgaaatgtttgataaattaaaggaaaatatcttcataacgtgaatggaattggtgtattcatttatttgtatggttgtcatagttgttttttgcagatgttttcaaatatttctttgaatcctctccacgccttttcaggaattacatggtttaatttgctgtaaatagaaaagtggcctggttaaactcaattttgaaatgctgactttattctgtttagtgtaagatgagtttttctgagaaggttccactgttaggaagctaagttttcccttgctgtatacaaaggactgtttcaaaagtgtggcaaaactgaatattaaggttcttaagattcatatttcctgttatattactggatgacttgcttttgggatttaggaacagtgaaggcaggaaacagaatagtcaaggaaataagaaaacttatttggcttcagtgagtccctagttcaaaatcagaaatatttatttcagtttaaactggggagtttgtcttttcaacatcagttaatgcttggaaccattcatacttgattaaaatacatcgttgaaaactttccctgtttttgatgagttgatttttgttttaactgatttaaactttttcaaggtttaggcaatgacatcatcacaattgttgattatttggtaaactatgacttcttgcaacagattagtggtcctggtttatgttcttgactagtatgatgttatctggactgggctgtaaaaatctgtgaacactgttgctctgagttaggaacagaatggctggggcagaaccatttttggcaggtgagctgcacttgatatctaaattattagaaaatgccttcatctgtaatcattcatttatggcttttccaaagc

SEQ ID NO: 37163 - DNA, 2300 bp, Homo sapien
gggacaggtaattagttaaagtcacacataattgcagaggttgtgtgtgctgctagaatcacagccgtcacaaagaaggtgtggtgccaaggtgctggccgaggactcctgtgtgtcccctggtttggattagcgctgaccaaaagtgcccgagtcagctttcacgtttccaagtgggtgaggcaggatggtgaggggtatttgcttggtaccgcgaactctgtccagacactgaaaacatctacaacagaagatgaggaactctacaagtttcctggaatttttgctggttagaaaaggaatatgtgtttggttatgtccgtgtgctacataatgctatatttaaacatgtttaaactgttattacaataaagtttcatctagttagactcatactttctgatctgaaagtaaccaaaaaggtaagtaaaaattaacttttaacaataaagagcaactctagagacatggcaataaatgactgcaaggagcagggagggctttaaagactcactgcaattggtcagtttaccatgaagtgccctgcttactggcaaagttcagcaaatgctggcctgtggacaaaagctactcaagtgtacttcacctaagcatacagtactcttaatttttttaagtattggcacttgaaaggtgagcatttgcccacctgaaaatctctctctagaatagcacagggtggtagtgatccagggctttaccctggcaggtagtggcaggtagaggccgatttgaaacctgctgtcagagtccagggatgaaatgtggggggttggtccaggtcctgagagtgaagctaggaggagacatctccaagtgtaaatttttggaacacagtttctcagcttgggtggaaagccaccctagtaagtggagtattgttcatgatgcaggctcagacacttcaggttcctccaatgatggccaattggtagaaaaagaagaacctggtttttggtgactctggctgagtcagaaggatgataatgatttgggtttgagacaagttgggtttgaggaggcagtaggcccatctcctggaggtggcctaccagcaggtagctggatgggccctccagggtagggccagggaatgaagaaaggtccataaacaaaaaaggaagagattagtagaacttactagaggatggtgcctacaaatctgaacgtggcctgggctggttcctgagctatcagctttgtgccaccacatcagtgcaactagactagactagcttcatgcacattctgtttatatcagcccttctgcagagtaatcttacaaacaaattgacttaggtgtatacaaattatttcttatcctctggaagtttaaacaggtgtgataagcaactaatgttatgccaacaatgagtgatgaggaagagcccgtggtttgagtaagtgtgggtgatttttgtttatggaccagtaaaaacacttgaacacactgagggagggaggtttttgtttgttgttgttgttgttgttgttgttgtttttctctttggtcaatggagcttcacactgacctgaaatagataatactggatccgtggaaagaactctccttaccagagggaaagtgtgctccactggccatcagtgcttgactcctcaccctctgagaagccaaaagtgtagacttgtatgcagatggccctctcacatggagaactgtgttccatgagcaccatttaaaggaacgtgttgattgtgggtagttgattctgaagcggtcagggaggaaaagcattgttttcaaatggctaatgcaagaaaactgttcctcttctctccacagccaatccgggggacccaggacatgccccagctatagtgatgcagattacctttctgctcctgaatcgcacctgtgcctcagactttctcccctcagcttgagactgcatgtaaactgggatgtgtgaaagcaggaagcaaagctagtgacagctgagaggtccatgtctgggtagaaccaggcccacgatgctgcctctcccgtggtctggagttcagctgcagggactctgctgatgtgcccagcaccatcgttctgtttgtgcttaaatggcacagcatttggtcagcacatctgaaaaggaaggtgtgagaagcaaagcccatggccacgttcccctgccagttatgtggcaagacgttcctcaccctggagaagttcacgattcacaattattcccactccagggagcggccgtacaagtgtgtgcagcctgactgtggcaaagcctttgtttccagatataaattgatga

SEQ ID NO: 37164 - DNA, 2300 bp, Homo sapien
cattaacagcacattaaataggattacactgcttaagaatctaggaatttctcaaatatatgagaaaatgtgaaagcacagggataatagaaatttattttataaacacatgctaggagatggaattgtgtcatgatgatccacattaaagaaacatgattgaagtgaatccattatttatactctgactttccattatatatatatattactccaaaagaagttattcatgtttcctaattgtgagcttacccatcgtgtaaaattggccctaacacttattcacaggccacatctacttcgtacatgtactttgcctctgtatgtacacgtgtaacgcataaccgtatatcagctctgcaagatacatagatatccccattttatggtgacggagactgaggcttagagaagttatgcaacttacctaaagttacacaccttccaagcagcagagccagcattcgaacttagacccatctgactccaaagccagtgccctctacactagaccacactgtctttcttaggttggatctaaaaaaatactaccagctggttggttttttaactaactgtaggaacacaacctagtattaagtagagtatgcatgctgcatagtggactgaggtagagtaaaacccattattgtaccacttttaggtaagaaaatgtattatctaaggaatatcattaaaatttccttacttccctccatgaacaaacaaaaaattaaaatgaaagcagtgggggatgaagggaggcggggatcataacataggagtgttaaatattaaaattagaaaagaaaataatttctctatcaatgtttaaaatgctagaaattatgcatgcttatactataacaaagaatactttatttggggaataacttaattgatccatgatgtggcatttaccaaggtaatttttccctttttgttccagcagtaggaattagaggtggttcataaaacacacaatcaccatgtaaattgaaaccgcattaagatcatagtcatcttatgttgtttccctaaaatggttctcatttgccccacatattcaaatcagagtgcacaaagatgttgtgctgagtcagggaagatttagaatgctctgtgaacagttttatactgaacttcagagttcagttattgtacttattttttggtgtgtgtgtgtgcacagttgggttttttgtttgttttgctatttgaattactgtttggccattttaatgtatataactgataaatccaggaggataatctgtatgtctgctctctcagtttctttctataacacaagcctgaacatattgctctcctgattaacaactttcagtggttctgattagacaagacttttcgttgcagtcgacagaaacctaatgggaccattgaagaattccaaacaggcaagtgacaggaacatatttgcatgttagaagaatcagcctggcagcagcattgtgattagaatgaaggggaaccgtccaaaaacagactggggaaccaatatggatctgcctctagcatgcggaaatatctctctacactgacctaactgactcactaagcttgtggtttgtttaaaggaagccacatgaaaattgagtttgggccaatagagtgaactcgttctccattctctagcatccctccccatgcaaccaccctatccctgccaagtttctgggcaccacagattggaaagtagcctcctgtaggtatttgcccatgttaagtggtggggtctctttctgtcttcccttcttggtctcacctgtctggtgtgacaagggaagcatgtgccaaccaaggctagacccttgtgagaccagagcagccccactttcggtaaagcaagcaacctctgcttacttgcccaacacaccctagcttccgtgttccttgccttgtgagttatcttcttgggtacaatttaacacagcgttcccacctccttataactaaaatagctagagggggctttgtgcctcaaaccccaaggagaccatcttggcaatctctgcctctgcaacagggcacttgctccctgggcaactcctttcccaggtcatcttctcccttgacatgcccatcagatttaatagtgtgcctatttggcagaaaaatggggtcccttggttgctgattcttaggaatgtgaggttctcccagccagagctctcagcactaaaagttctagtctctgcgtaatggccggcatatctttggcgtatctaaaatcctcttcagtttccagcagggtctttataagcttcttctgaagg

SEQ ID NO: 37165 - DNA, 2300 bp, Homo sapien
tttgtcacagatcagatggttgtagatgtgtggtgttatttctgaggactctgttctgttccattggtccatatatctgttttggtaccagtaccatgcagttttggttactgtagccttgtagtgtagtttgaagtcaggtagtgtaatgcctccagctttgttctttttgcttaggattgtcttggctatacgggctcttttttggttccatatgaaatttaaagtagtttcttctaattctgtgaagaaagtcaatggtagcttgatggggatagcattgaatctataaattactttgggcagtatggcaattttcatgataattgattcttccaatccatgagcatggaatgtttttccatttgtttgtgtcctctctgatttccttaagcagtggtttgtagttctccttgaagaggtccttcacatctcttgtaagttgtattcctaggtattttattctctttgtcgccattgtgaatcagagttcactcatgtgttggctctcttatttgtctactattggggtataggaatgcttgtgatttttgcacattgattttgtatcctgagactttgctgaagttgcttatcaggtaacatctcatgccagttagaatgataatcattaaaaagtcaggaaacaacagatgctggagaggatgtggagaaataggaacgcttttacgctgttggtgggagtgtaaattggttcaaccatcgtggaagacagtgtggcaattcctcaaggatctagaaccagaaataccatttgacccagcaatctcattactgggtatatacccaaagaattataaatcattctactgtaaagacacatgcacacgtatgtttattgaagcactattcacaatagcaaagacttggaatcaacccaaatggccattggtgatagactggattaagaaaatgtggcacatatacaccatggaatactatgcagccataaaaaaggatgagttcatgtcctttgtagggacatggatgaagctggaaaccatcattctcagcaaactaacacaggaacagaaaactaaacaccgcatgttctcattcataagtgggagttgaacaatgagaacacatggactcagggaggggaacatcacacactggggcctgttggggagtggggggctagtggggtagggatagcattaggagaaatgcctaatgtagatgacgggttgatgagtgcagcaaaccaccatggcatgtgtatacctatgtaacaaacctgcccgttctgcacatgtatcccaaaacttaaagtataataaaaaaataaataaagcaattgccatcttgttctgttaggttttgaaggaaggtgtgaattgaaaatatttacccaactcactttttatttatgtatagagaaaaacaccagatcttctcaaacatggcagcactctataaaccctccttaggaatatgacttgaaaatgaaggaagtccatcaagaactaaataaaaataaaaattcagggatagataagttacagtgaatatcaaattcatttaaagatagaattaagacaacatctggaaaaataaagttgcagagcaattgcaaatgttctcattgctaggaagccgaaagtaacagaactaatggaaattgagaggcagggttaccccctaaaggtaggtggaggtgtatgatgctaattaacctcatctttcagagctatgagactttctaaacccgaacatgtagtgagctccttacacctctcttaatctttttacgtaatgcttataggccttttaaaaagcacgtcttttagggaagaaagcaatagagattcccttcagtttatttttcttaaattccagtaacatgaaaaatttgaaattatatgaagcagacgtagtgtgataccgtaattagaaaattacttctgtctaccctttctgcgtcttcgtttcttcagctgtgagacgggtatttctcccagtgttgctgtgaggattacacgtatttacctgcaaagtgcttaggacagtgcctggctcacggtcagtgctcacgtttgggcagctgcacttgggcgctgctggcacaggaggtaagttagtttggcctattgcagcgtcccagcatctgtcgcgtttctcatgtgtgattgggctctggcggcccatcctggcggagacttcggctagcaggccccgctgcagaccccaggccggctcgggtctacctgcgccagcgctgtacctgggcgaccttggctttgcccccaccggtgacccggcccgcaggacgtgtg

SEQ ID NO: 37166 - DNA, 2300 bp, Homo sapien
aaggttgaggaccactgccctggagaaacaccttcacatgtataagaatatttatttcggcattgtttctaataacaaaaatacgaaaataaatgcccatcattgagagagtggacatgttatgttatactaattaagtgacatactgtatagcagtaaacaatgaactaaagttacataacatgtaacatgaatactgacaagggcaaaaagcaacttttataacaatatagacggagtgttatttatatagagctttaaaacttgcataacaaaaacaactattgtgcatggatacacactttcagcaatcaaaaaaacaggctccatagaaaaatggcaaaatgttaaggtttgatacatctcccacaagtatgcctggcaaaattctttacattttaggagtgaaacatttgttataacgaagtttaaacagcagaataaaattattttcaagttatctccttcccagtaaagttttccttctcttcggttgtaataatttatccatttatcaaatttttgttttggactttttttttttaaaaaaaggatctttttttcaagtagcttctacccatgtaaggaagttattaaaccaaacagtaggacataaagcaataataaggaagagacgtataacttgcaaagaggaaagagagtttacatctgtctggagcagccagagaaaactctaaggagatgcatttgagctgcctttaaagggagatgcgttcaccaagggaacagacattccacgtagagggaatagcttgtacaaggaaatggggatggacacaacaggtaacatggagaaatacagttgtccctcagtattcgtgagtgatttgttccaggacccccatggataccaaaactagaggatgctcaagtccctgatataaaacggcttgtatttgcatatacgcacatcctcctgtatagtttgtctctagattatttaacatacctaatacaatgtaaatgctatgtaaatagttgttatactgtattgtttagggaataataaccttaaaaagtctgcatttcggtacagactgatattttcccccaatattttcaatcaggttggttgaatccacaaaacccactgaatggaagagccaagtagggtgaggtgaggccttggagggaggatatcaaaataagtggctagagaggaaggaggagcttgaggtggaagccggaatgtgtgggaactggtgctgtacttgctcaccaagcaccctggttagagctgaaataactcttttatgccacaaactcctaagagacatagttgggaccagaactggcgcctgctgacttctgggtaatccatccccggttgtgaagggacggccgtgccgccacgacggctccgaaatacaccaagagtttattttcggggctgctcgtagtccagtcattcttgggtttcccatttcctatcagccccaagccacccacggatgctccccacctccagacatcgccctccactaggtccccagatcacttttaaaacgcgaccaggggccgggcgcggtggctcacgcctgtaatcccagcactttgggagtccgaggcgggcggatcacgaggtcaggggttcgagaccagtgaaaccccgtctttactaaaaatacaaaaaaactagccgggcgtggtggtgtgcaactgtcatcccagctactcgggaggctgaagcaggagaatcgcgtgaacccaggaggcggaggttgcagtgagccgagatcgcgccattgcattgcagcccgggcaacagtgcaagactccgtcttaaacaaacaaacaaacaaacaacagaacgcgaccaggagtcccggaagcctgcgtgcacgaactcccaagaccacaagtcccagcatgcaacgctccttgttggaaaagggcctcccttagccactaagtggaccatcatgcaacattctctgatggggcggggatctccatggaggggggaggcacacttgttgcgtcgcctcagcaactccaattgcgtgacagaatgtgcttccgcttccgcctctgagccctatgagcgagagttacgctacttagtcgttgtgacgccattcttctgcgacggcgcggacctggagcttccgcgcggtggcttcactctcctgtaaaacgctagagcggcgagttgttacctgcgtcctctgacctgagagcgaaggggaaagcggcgagatgactgaccgctacaccatccatagccagctggagcacctgcagtccaagtacatcggcacgggccacgccgacaccac

SEQ ID NO: 37167 - DNA, 2300 bp, Homo sapien
tacctcatccctcttattttactttcttttaaaataaactgtattttttagaaccgttttagatttacagaacaactgcaaaggtagtacagaatttccataaattccatttcagatttccctatgattaccatcttacattacattcctcacaactaattaatcaaccttgattcttattactaatgaaagtccatgctttatttagatttccttagtttttccccaagtcctttttctgtcccaggatcccatccaggataccacattacatttagttttcacgtctcctgagtttcttctaggctgcggcagtttttcagactttccttattttattttattttttgtagagacagcatctggctatgtcggccagatcaggcctcgaactcctggcctcaagcaatcctctcgcttcagcctctcaaagtgtacggattacaggcgtgagccacgtctggactgtactttccttacttttgataacctgacaactttgaggaatattggtcaggtattttgtaggatgttccactactggaatttgtttgatatttttctcattatgagactgaggttatggttttccaggagggagaccacacatgtaatatgccacattcatcacatcatattgactacatgccatcaatgagtcacgattgttgacgttggcttagaacatctggctggggtagtgtctgtcggctttctccattgtaaacctactgtttttccctttccacattgtactattttggaggaagtcactgtgcacagcctagggtacatgatctacataaattatttggaattattctgtataggagatttgtctcctctccgccttttatttatttattcaattatttatttatatcagtgtagactcatggatttttttactttggcttgtaatccaatactaccttgtttagtttacttcgttgctcaaatggttccatctttggcaactgggagctttcaggtggttcctgtgtctaaacattctgccatcaaggcaggattcgttctttagttttattttttttcttctcattcaattgagacagcgtctcattctgtcgcccaggctggagtacagtggcgcgatctcggctcactgcatccttgacctctcagcctcaagtgatcctcccaccttagcctcccgagcagctgggatcacagcgtgcgccaccacgcccagttaatttttttattttttgtagagataggctttcaccacatcgctcaggctggtctcaaactcctgggctcaagagatcctcccccttcggcctcccaaagtgttaggaatacgcgcgtgagccaccgcgcccggcccgatttttccttttttgagtatcacttccttacttttcagcctcagccttgtttttcaaggtgctttaccaccacctggcacaatccacactttctatttatccctccccgttaaagtgccgggacctggagggtgggtcttggcagtatttttgagcgcggtgggcacacaaggggacgctcagttgatatccagagaatgatgagcccggcgggtgttgaggccgactggagagaggttggtcggcagggttctgggaaggcggtgctcggcctccgtgtgaccgcaggctcctcgcccgcgtcctcgagggtcccagggatgcaggacctgccgcagcttccgcagccacacccacgctcagagacggcttccagcgtcctcgccgcggcaacgcaccggactgcaaatgtcaccagcgcagcggggattcccgggggaagtccagcgcgctccctgccctggggaccagaggacgagcggaggaagtgtcttgggcggcaaacatcccactccccgcgccggtccgcgcagcccgcgggaacgcccctgggcttgcgggaggggctggagcgcgtccccggctccgggcggtcccgagcgcatggactctgggtggggcgggaacccgcgctctgtgagccggctgccgccgcgccccagcgctgtcatcccggggcggggcctggtccccagctgtggtcgcttcctaagcggcgggggctgagccggcggcgcccagatgcggccgcggcggcgcggagctcgggcggccgtggaggaactcagcctcggccgcaggaggcgccgggagcggagccgccgggagtcgcgcaacaggtttccttctccatcgctgcgcccacaggggacgcgcgccctgccgggagaggggcttctcggttcgcactctcgctcccagtccaggtttgtttttctcttcctgagc

SEQ ID NO: 37168 - DNA, 2300 bp, Homo sapien
accaccgcctcctggattcaagtgattctcctgcctcagcctcccaagtagctgggattacaggcacctgccaccacacccagctaatttttgtatttttttttaagtagagatggggtttcaccatgttggccaggctggtctcgaactcctgaactcaggtgatgcacctgccttggcttcccaaagtgctgggattacaggcgtgagccaccttgcccggcctagttttcccacttattttacaatacttactgcatttttctgtctgtctgtgtgtatgcatatatacatctacatacatatatcaacctaaatatacctatatcagtatagacagatatatgctattctgtttgaacttaagttgaagataccatcacacttcattgctaaatatttcaccacatgtctcttacaatcaaagacattctcctgcaacaataccataattaatgttaaagaaatttaacattgatacaataatattgtctaatacatagtccaaattcagatttttcaaatgatcctcaaatgttttattttaaaattctgaattcaatcaaagattacatttcattgtcatgtctatttagtctcctttaattcacaaagctccccctctcccaggtaattttggttttcaagacgctgacagttttgaagaaaccaggccatttcttttgaaaactagccacagtctagatttgtctgctcatgagaagattcacgttcaacatcttggcaaggatattgtgtagatgatgtggtgattttccattcaattgcatgatgccccatgattggttatgtgaattttgatcacttggttaagattaggaatttttccccaacatattactatgaaaaaattctcagacatacagaagagttgcaagaaattttcattcagcattcatatacccatgagctaggttccttaatttgcattttgctatattctgccatagtcttcactggttccccacatattactgtggtctacctacaagccacaatcgtctttttttttttttttttttttttttttttgagatggagtctcactctcgttgcccagggtggagtgcagtggcgtgatctcagctcactgcaacttccacctcccaggttcaagcaattctcctgcattagcctcctgagtagctgggattacaggtgcacaccaccatgcctggctaattttttttttttttttgtatttttagtagagacagggtttcactgtgctggccaggctggtctcgaactcctgacctcgtgatccacctgcctcggcctcccaaagtgctgggattacaggcatgagccaccgtgcccgtcccttgacgatcttttaaaaaggccaatttgaccatgttggttccctccttcgaaccatctactggctccccattgctcttcagataaagacacaaacccttgacctgttctccatggtcctatccctggtcctgcccagcttcttcacctggttcaacaggtacacttgtctcttggctgtcttctttccagaaacactggcttgtgctccattctttgactgctccatgattctttctgccacttcacataggaagctcttaccttttctctttctgtttccctttttggctaattaaattcttgtcatctttaaaggcttggctcaaatgtctcttcaagaaagccttctctaattgcccagggcaggtcagactcctctgctgtgtgctcttaatactctgtgcttctcctttgtatgatttgtagtctgtcagtattgtaatgaaataattcattatgtaattaattgcttagtgtgcataagcgccgtaatggcagaggctatgtctcttgttcatagtcataacaccattgcctggcttggtgctttacacgtggtaggcactcaataaatatttggtgaatgaatagttactacgaataactatataaaatatataaatacattttttcaagtcagtactttcccttttccttttaggtattgatgtcaagctgaaccatcgtaggaagttgaaagccttagaaagaggacttggtaaagtttttggattatcttgaaactctggcaagatggccaagtatggagaacatgaagccagtcctgacaatgggcagaacgaattcagtgatatcattaagtccagatctggtaggtaaaggaagctcaagaaagctatggatttttatgtatttagaaaacctatgtttcttggattgatttgcattgttcttgcaagaacttcttggaggtgaagttcttttaagaaact

SEQ ID NO: 37169 - DNA, 2300 bp, Homo sapien
gccaatcacccctgtaacatttagcaaaaaaagaccaggacttcaataatacttgacagctcccctattttttgtcgccacttctcatttaggaccaaccagagaaagccaaatatgcacccatatgacgtgctccatgatgagttagcctgctccaagcctgcagtctctgatcagggcacgtttgaacccccttttctctattccaagcttttccacccctttgtctgcctctgagtctctgccaaaacatgagcaacggtggctgactcctttgcttgtttccatttggttaatatttaatttccacatagtattgatttagttagtgaattctgtttatgcctgtatgtgttacttaattgttttggcacatgcccgtcagtgctgtatttttatggtatctgaatgggaaaccactatgtcatagggatttatatatttttaaaaattgacaaaaacacaagttatccttgattaatatttggggatatgtacattcagtagtccccttgtatttattacatgtgcccatttgtaagtgtataaattagagttgccagatttagcaaataaaaatacaggacactcagttaaattagaatttcagataaacaacacattaatttttggtgtacatatatctcatgaattatttgtcctattatgccacaatcaattcattgtgtatctaaaattcaaatttaacttggcattctgtcttttatctggctgccctggtatagatgctcctcccaaagcatgactgtgtctccagtagctgctgtggctgagagtgtgcccaacatctgcttctcatgcagcctcactctggccagcttttatgtagggcagacatctcaggaggaagagccaacagaaccagaagtgttcccagacatgttgcttcaccaccgtgcctctctttctttcagcaaacaggagaggtaggagaggaaggcagaacagagcactggtaagctttgcatttgctacagagaggtaggggtgctggaacacacagaatcccctggacacagccctatgggccccatggcatctgtgctctggtggtgcagtgctgttgtgcaggactcggagggattttctacagcctctctaatccttccaggcacccagaaatgcattcgatcttgatgaatgtggataggcttctatttctgccttgtctccttgatcccatctcagcacaactgcagagctcactcttttaaatttacatttaatgagattttactgtgccaggcattgctctagtttctaggaattttgctgagaataagatagataagatccctgacacgaaagagcttatattctagtctgagggaaagataataaatgagtaacaaataaatgattatataggtacctggtaataataaatagtatgaataaaacataagcagggtaagtggaaaatgaataaactcaaatgccaattcctcctccaaatcattaaaatgacctgctgataaagcaaaactgagtttatcactaatgcaggaagatgactactatcttgacaaagtcttaggagagtcttagagtggaagagaaaaagtagaatattactgagttcttgaaatctggtttaagacaggtcttttaaatgtcagggctgattgagaatggacacagagaggcttgggtttggaagagtaaactgtcaggcctctgagcccaagccaagctatcgcatcccctgtgacttgcacatatatgcccagatggcctgaagtaactgaagaatcacaaaagaagtgaaaaggccctgccccgccttaactgatgacattccaccattgtgatttgttcctgccccaccttaactgagtgattaaccctgtgaatttccttctcctggctcagaagcttccccactgagcaccttgtgacccccgcccctacccaccagagaacaaccccctttgactgtaattttccattaccttcccaaatcctataaaacggccccacccctatctcccttcactgactctcttttcagactcagcccacctgcacccaggtgaaataaacagctttattgctcacacaaagcctgtttcgtggtctcttcacactgacgtgcatgaaatttgttgccatgacttggatcgggggacctccctttggagatcaatcccccatcctcctgctctttgctccgtgagaaagatccacctatgacctcaggtcctcagactgaccagcccaagaaacatctcaccaatttcaaatccggtaagtggcctctttttactctcttctccaac

SEQ ID NO: 37170 - DNA, 2300 bp, Homo sapien
actgtccaaccagtcccagtgagatgaaccaggtacctcagttggaaatgcagaaatcacctatcttctgcgtcgatcacactgggagctgcagatcagagtgcttcctattcggccatcttggaatggattcctaaagatatttttcttaagtttatcatcccacactcctatttagttttgtatttctgctattatttatttttgaggaaaataagtttgagttttttaaaaatattattctgtttttatcatggttagattatttctagggagacagcaaacaattgtttttttttttaattttaaaaacaaatttctttccctgacattgtttttgtgtgttccaaattgttttaatgtatttttttctcttcggtttgtctcaatagctcacattagaggatttcctctggtacctggaaattcttagttttttgcttctctttaagtgtgggagacaaaagcacagattagaggctctgagtatatagatgggtgtgtgactacatgatctgactgccctatttagatgggaaacctctgatgtgagatctttaggtctttccttctatactacttttttttcctagacaaggctttgccaaactcctgcctggagggtgaaggtctgtactgggacctgagtgtaggaggctggctgaggggatctctgcttccaatgtacataatacacttaattcctctgtttttattgtgatgtttcttccttgtgccggggttcccccagtccagagacttctttaaccttttcaagagaataaacctcgtcttttgctaggactggggagggaaagtttcccagctgaggagagtgtaaaagtgaatctggcatctggctgcttcttaaacaggctttcaactagttcttatttctttttctcgtatctaaaagtatctggtggtacccatttctgagcctgttggagattccgtagtatcattgtagttagttctcaccattccctactgctggcattaggactttgttgtttgttgtagctctgttaaatttttcaacaattaaccaattgctttccaacttctataattttattgttaccgtcttttcatttctgtgaccttaggggcgtgtgttttaaagggatttggggaaggagtcaagaatttggtgaaagattctagatgtgtggaatcaatttgtgtgcaataaaataaactgaaataaaatataaaacttggtaaatagctcaataaatattaaatccacatttagcttgtactatgtttctttggcccaggtaagattctttcatgctagaatgagattttaaaaatcaatgtgcatttttatattcaggctacagttaggaccaaactacaccaccctcttcaatagaattatttttcatgcaaaagaatggatatttgcattaaaggacacatataactaacttaatgagatgttagtggttaaggactgtaatttctgttccttgaaaaggcttattgccaattaaatacacttcaagaggcataaattagattttatgaacatcacacttcacactctttcaaaaatgttacagtttagaaaatgtattgtaaaagcatgtttatacttttaccttctttggctcagaaagaaattctatacagtaaattttgaaactcaaaattattttacacactatagaacaataattttgcacatttaaaaatactattttatctggcattcttttaaatgaatgaagttaattactttggagacagactaaggagctagggttctagcctcagctctctcatttactcatgggtaaccttggaacaatcctgtaacagttctagaaattttaatttcctaatttgcaaagtgagctggttgaactagatgactattaaaagtatagttctggaaataatcaaggttaacacctgattaatgtcaatgttaatttcaaaagctaaggcttatatcacattttgccaacatgtaatattgactcacaatgactatagttcatatcagcttctctgctttcagatccagggaccaaaggcctgaattccagttgtgcctcaagatggtgctttccctcatttttgtagctcaagacgtacattcaactcaagagtccagctctacagcagctatatttggaaatacacatattttatggccagtatataaatgatttttaataagtatgtatacacttcttgtataatgataagatttttttttttttactttgctcgcatttataaatcaaacttcgacaagaatcttttttggagtaaacagagaatag

SEQ ID NO: 37171 - DNA, 2300 bp, Homo sapien
taattgcacaacgtggtttcccaataatcatagtaaaaaataataactagcccttatttaacatttaccatatgtcctcttgtaagttcttaatatatatcctattctacaaaatacagttcatttattaggcagcttggtcctttcattgtgagctgaggtgacacgcctcaaatcccacactggttggtgagcccaggcaatctggctccagaatccttgctcttaaacacttggctaccctgcttctcataaagctctctgttaatttacgatgtttagaatcagtctatttaccttaaacaagaaggcactgtaacaattagaaaatagaatataaattatataaaacttgataatgtaaaagtcataataaaccaaagtgagacaggaagaaattgtaatatttttcttatcctctcttataggagtaacttcctagaaagtcaacagtcaatttttaatacaaaactgaaaataattcctgcttggatagtaaagaaaaatatttatcaaaaaaactgaaaataatagtaaaaaaaaatcagcagggaagacagagagtgaacttgagctaaattcctcatatttcataacaagtgtgatggttaattttatgagcatccagtaggtgtcaatatctattgcctaattttaacttttaaaattatatataacttatatggtaactattagaaaaattaaaaacaaaagtttgtggtaccttaagaaatagcaacataagcaaactattaacggcatagggaggactatcagaaaagctaaataactagggaaagggaagatctttgtttcacaccatttccatttttattacaattatcagatattattttaaaaaataattctacaatactatgaaaaatagtaatactctgtaaagaaaggataaactgaagagggtatctttcaattctgtcatggtaaaataacagaccaataaatgctaccagaccataagcccagtgaggtagagaaggagaacaaggataatatataaacacattccactctaatcttctttactgattctttgtttctacatcattacaggctaaatggcccattttttttttcatataaacttctaaagagacattcatttcattgacttcaactattgagtcacacccactccagtctacaaccttgcacatttcctttaaagaaaggagctgtctcaattcagacactgttggcgggagccgacattagataatcacccttttagggcataatttagcagtctttaatgaagtgttaaaaaaaatgactgcattttgacctaataatttcacttctttgaatccactctgcagaaacactcccgaatgttcaaagatatctgtaaaaggaatttcaattaagccactactgtttacgacagaggaaaactgaaaagaacctaaatgcacattggtagatgcagaataatttgttgccatttaaaatatacatctacatgtaaaatacatatctacgtgtagtgacagtgaaagatgtccctaacatattgttaggcaagaaaagcaaaaattcagaattactatacaatttttgtaaaaaaaaaaagtatatgcatatatcacatacataaatgtgtacaagcagtgtgcttaagatgtgtggaggaaacactgtaagttttcactatgtacatttctttattattattttacaaccagcatgtattgttttagtattttaagaaatcaggtcatgtctcaattgtcatatatctgggattaaaaaagaaaaaaaaatccaaaaagggaaatattcaacgtttttccattagttcattctcaatatctatgaaaaaaatctaagtagcacattgctgtctaggattagcgaaaacgctagtttcgttggttggatcgttttgggttttttttagtgaattagagcaggaaaatgaggacacaaaacccaaccaaggcggagttgggctgttgaagccatcagcggcgcgcggccgggcagccaagggacccgcgaagggggggactcggaggtcgaggggcactcggagggcgaagggagccccgggcgggagacgaagggcactggcccgtgacgcaggcgcggttggaaagaagctgaggactggatgtgcggaaaccaggtcagaggggcaggcaacagagtgggcgggaaggcggccgggagcgctatacgggtctagggaatcagtaggaagccggaggcgcggctggcggcgacagcgtggccggcagagcagggtcagcccaggtcgcccggggagtgcgcaggga

SEQ ID NO: 37172 - DNA, 2300 bp, Homo sapien
aacctgcagccaaatcctctccaaatgctaagatatatgtgtctttacagagtcattgatccgtttagactgccactcatgattcatctgttctttaattcctaaggatgaagttagttacaagaaataatgataggaatttattttttttaaattaagagctgacagagaataacatttaaatatgctagaatttatatgcattctgaaacagattttccttatcagaatttatatctgtatctatatctataagctgaatgcaccccttttagcccctggctctgccccttccttgctgtgggctgttcattggacccttttgtgctgaagtatcctcacatctaaaaatgggggtaacaattgtagttaccttataggattggtgagagacttaaataagataatatgagtacgaaaaccatgtgcctggcccataatataggctcaatggatattatcatggttaatacttatacatccaaatgactgaccgtcaaaatatgatcaaggccttgatatatgtcccttaagccctattttggtcttgttctcctttccagttgcattttacttactacacagtgcagctatccaatttataccttatttaaatccttgccataaaataagctattacaaattttgtttaggggcttaagagggttacttcttccaatggttaaaattatttcaacctctttatgatgaaagaagagtaaaggaaacaatgtccgttgagcaaagatattgtttaatttttccgctactgtttcttctacagaatgggcagaactcactctggaagagctggtgggaataatgccatttgggaagcacacaacataggcagcacagtggagcacaagaaagtccggagctgttagctcccaggtcctgaaggaatgagaactttcaccggagtctggattccactgtagacaaaatcctctctgcatcgccaaatgactcttattttcctaaacttactctaagaatatcttttaacagcaatttgaataaaccgactcacatgccactgtgatttaatgtgtgatttgctgccgaatcagctgtgtttggccagcccttctgtcttcacatttttcatagtgtttatccttaagcttagcaaccaaccaaacttcgagtggaatatcaacattcaagagtaaaatgtattattagttttctaattgttccacaagagattgagtttgtgtagtttacatttttgcactttctgttttacttatatcctcaacgcatgaaattttggcctgttcccctttactattcacaaacttccaaacactggtaaaaatgcctttgtgtgtctttaattcacgtaacagatttgtgttatgttaaatgttagtgaatatataaacctaagaatacaaggataattttgttaaagaatcaaaaagtatcaggacattcgtttgtcttatggcagagacaaattgaagttccccaccaagatatacgtattttggatttgggccagacagctaaaaaacctgtttcaacttaaaacccaaaaaggttttaagttgaaaaaataatgctgacttttgctgaaagtaaattttaaacaaaggtttttttttttaatttactccattaaaaatgcatacatttggacagagcgagactctgtctcaaaaaaaaaaaaaaaagcatacatttgtagtcacagaattagtttttgttttgaccttgaaaaggacttgaaagtatttactccaaacttactttacacatactaaaaatatagtttttgaaaaaagaaagttgatgtggcttttcagacaagggaatggtaggtaatgttttgcatcagctccgggtcttgggtgatctccaccaatcagagatccttcagagctcgtagggtctagaaagatcattattttacaccctcattttacagacaaagaacctgagacctgctagagtaagtgacttggttaagatagggagcgctccagagaccaggtccaagatcttcccccgtttcacaattagaaggcggctgtctagaggtcattcccttccttatgatcctcataaagttaatttccagtctcttggagagagaactggacgatcgcctggcttagaagttttcctccctccccgaaccccgttttctcttccatttcttccggtcgcgtgtccccagcgcccacaggtggaaatcaaccgcccgcggggttgcggggcacaaagaggcagctagcggctccgctgaccccttcccgccggcctggacgaagtctgggctcgggagccgc

SEQ ID NO: 37173 - DNA, 2300 bp, Homo sapien
gacccaacaaggaaaaagatctaaaactaacacaatttaaaaactggtaaaattcttcaccttggcttcttaaatctgtttctattgccaacacataggtataaaaaggcatacaaattataatttccaagaacctgcagccaaatcctctccaaatgctaagatatatgtgtctttacagagtcattgatccgtttagactgccactcatgattcatctgttctttaattcctaaggatgaagttagttacaagaaataatgataggaatttattttttttaaattaagagctgacagagaataacatttaaatatgctagaatttatatgcattctgaaacagattttccttatcagaatttatatctgtatctatatctataagctgaatgcaccccttttagcccctggctctgccccttccttgctgtgggctgttcattggacccttttgtgctgaagtatcctcacatctaaaaatgggggtaacaattgtagttaccttataggattggtgagagacttaaataagataatatgagtacgaaaaccatgtgcctggcccataatataggctcaatggatattatcatggttaatacttatacatccaaatgactgaccgtcaaaatatgatcaaggccttgatatatgtcccttaagccctattttggtcttgttctcctttccagttgcattttacttactacacagtgcagctatccaatttataccttatttaaatccttgccataaaataagctattacaaattttgtttaggggcttaagagggttacttcttccaatggttaaaattatttcaacctctttatgatgaaagaagagtaaaggaaacaatgtccgttgagcaaagatattgtttaatttttccgctactgtttcttctacagaatgggcagaactcactctggaagagctggtgggaataatgccatttgggaagcacacaacataggcagcacagtggagcacaagaaagtccggagctgttagctcccaggtcctgaaggaatgagaactttcaccggagtctggattccactgtagacaaaatcctctctgcatcgccaaatgactcttattttcctaaacttactctaagaatatcttttaacagcaatttgaataaaccgactcacatgccactgtgatttaatgtgtgatttgctgccgaatcagctgtgtttggccagcccttctgtcttcacatttttcatagtgtttatccttaagcttagcaaccaaccaaacttcgagtggaatatcaacattcaagagtaaaatgtattattagttttctaattgttccacaagagattgagtttgtgtagtttacatttttgcactttctgttttacttatatcctcaacgcatgaaattttggcctgttcccctttactattcacaaacttccaaacactggtaaaaatgcctttgtgtgtctttaattcacgtaacagatttgtgttatgttaaatgttagtgaatatataaacctaagaatacaaggataattttgttaaagaatcaaaaagtatcaggacattcgtttgtcttatggcagagacaaattgaagttccccaccaagatatacgtattttggatttgggccagacagctaaaaaacctgtttcaacttaaaacccaaaaaggttttaagttgaaaaaataatgctgacttttgctgaaagtaaattttaaacaaaggtttttttttttaatttactccattaaaaatgcatacatttggacagagcgagactctgtctcaaaaaaaaaaaaaaaagcatacatttgtagtcacagaattagtttttgttttgaccttgaaaaggacttgaaagtatttactccaaacttactttacacatactaaaaatatagtttttgaaaaaagaaagttgatgtggcttttcagacaagggaatggtaggtaatgttttgcatcagctccgggtcttgggtgatctccaccaatcagagatccttcagagctcgtagggtctagaaagatcattattttacaccctcattttacagacaaagaacctgagacctgctagagtaagtgacttggttaagatagggagcgctccagagaccaggtccaagatcttcccccgtttcacaattagaaggcggctgtctagaggtcattcccttccttatgatcctcataaagttaatttccagtctcttggagagagaactggacgatcgcctggcttagaagttttcctccctccccgaaccccgttttctcttccatttct

SEQ ID NO: 37174 - DNA, 2300 bp, Homo sapien
tagaacaagatagtggggatagttgcacattgtgaatgtgccaaaatgccagtgaattgtatactttaaaatggtgtatttgatgtgtattttattacaattaaaaagaaaagaatttgatatttgcaatcattaccaaagccaaaaactagtgttctcaacgtttgtgaaatgcccaaaccgtggtttagaattaatttatagcattagtaacatgacaaatctattcagcttaaagttctagtaaaatttgtgaatcccatcatagaagtactcctgacagcagcagaaataaagctgtaattcatcaaaatttccttatatttaaaacttctgtgactgagtgattgacttctgtgtcaatgtttattttttatcttttgaaatttattatgattccttgtggcacatcccaatcacgctttttaaagatgtgtttttaaaaccatgctttgaaaaaaatttgtataattttcaaggtttttttttatagttttatactttgtttcttttaaagaacaaatgcaacttgttgtattagagtaagactaaataaattgtactgatgtgtacatttttatgcttttgtattgtcttgtggggaaaaaactatctgaatcttaagatcggtaggaactctaatgatcatttagcttctcattttatatttggagaaattgaagctgacgttatcaatgtgtcattcattcaacaagcatttactgaatactcatgccaggtaatgtgtaggcttgattctggaaggttatttcatgcttgaaagtttcacaggtaatttcttttttttcttttttctttcatcatctagtaactatgccagacacatggacaaatggataagtttcagaggaggggaggctttaggcatagaatcacttttaagtggttcttctcataattcttctccaaacatcttaaagagatgttcttcagcacagtaaagcacacatgatcataagtagtctgctactcaaggaatgtgtcactacttccatgactttgggaagggagtatttttgaatcaccttaaaccaattattttccattgttctaaggagccagcttcataccgttggttcaaatcaatctttaaaaaaagttaaattgctttgcagataacagtgcctctcatatagttgggggtatatatgtgaattaaagggtttgtatgcttcaagttgaacaacagtaagtataattaaatgaacttaacagaatgaggttgataaggtaataaacatagacaagtagcagtacagtagctttactgacacattgcaagagtccaaaatcaaagaaaatgagaaggtaatagttgtgataattcacacactaacacatttgttatgattttttaccgtattcatttcttcttaatattttgatacttctacaacagttaggacttctcaccaaataggttatttgacctgaatttccttaatcatccaccttctcttattccatcactttgcactctacatttctgctgcattgtattactcactatttcccaaacacttcatatccttcaatgtctgtgagcctttacatatgctatttcttttgcctagaatgttctcccctaacttctttgttcattggtgaagatccaattctgatctcatctgctttttacctagaccatctccaacagataatcatcttttatctatattcccagtttggatttcatttattttaaagtcatatcattttacagtataatcacactgcactgccattatctatttgctggtatctatatactataattatgaggtcatctaggtagaaaccatatcttatgtggctttgcatctctattcctagctgagggccttacaaacagaaggtgatatggtttggctgtgttcccaccaaatctcatcttgaattttaattctacagttcctacgtgtgagagggacctgctgggaagtaattgaatcatgggggcaggtctttcccatgctattctcatgatagtgaataagtctcatgagatctgatggttttaaaaacgggtttccctgcatgggatcctctctttgcctgctgccatccatgtgagatgtgacttgcttctccttgctttccaccatgattgtgaggcttccccagcaacatggaactgtaactccatcaaacctatttttcttcccagtctcatatatctttatcagtagcaagaaaatggactaatacagtaaattggtaccagtagagtgagatgctgctgaaaagatacccaaaaatgtgtaagcgactttggaact

SEQ ID NO: 37175 - DNA, 2300 bp, Homo sapien
cagtgcatggtccatgatagttaaacaataaataggcatttaatgaatgaatgtggccctcaaaagtaagttatttgcccacagccacagagcttgagcttgaacttttattttctggataaattccttgtatgttctaattaagacttacttaatttgtggcagaatttattaaggcatatatagaaggagagatcaatagatgaaatcttaaatgaattcatttagaaggaataaaaaaagacttctaagaaagttttaaatatattcatgaaattcatattgttcttttagtaatacaagatctctgaaatgtggggtacaatcaaaatcagtttagttgaaattagaaaggtaaaagtgaaaaacactctgaaatctaaaatacacattaacttgtttttaacattaaataatacacagtattagaatttaaatagtatattttgaaacttttgcccttttaggcatattgttatatagtatataaaaatgaaccgttatgacattctacagtattgaattgttactagaatgtaagtgcttacatcctttcaagacattgattatatgtaaaattaactggttaagtatgtttattttatatatgtcatcctaaaataaaccaagatattagataaattagtgatttaattattaaacaattttgaaaaatcaaccattttttggctaatttcttatctttttccatttcatcaaccagagctggactggccattatggaggaggagctgcagcattcccattgtgtgaattgtgtcagtagacggtgcatgaccaggccagagccagggatttcctgtgatttgattggttgtccattggtttgtggtgcagttttccattcttgtaaagctgatgagcatcgacttttatgtccatttgaacgagtgccttgcttaaatagtgactttggatgtccatttaccatggcccgaaataaagttgctgaacatctagaaatgtgtcctgcaagtgtggtgtgctgtactatggaatggaatcgatggccagttagttatgcagaccggaaatcatatgaaaatctaagcagagatgtcgatgaagtggcacaattggatatggccttggctcttcaagaccaaaggatgctcttagaatccctcaaagtagccaccatgatgtcaaaagcaactgataaagtatccaaacctagagaacaaatctcagttaaatcaagtgtcccagaaataccacatgctaatggtttagtgtctgttgatgaagaatcttatggtgcactttatcaagctactgtagaaacaaccagaagtttggctgctgctttggatatcctgaatactgctacaagagacattggcatgttaaatacaagtgtcccaaatgacatggatgaacagcaaaatgcgagagaaagcttagaggatcaaaacttgaaagaccaagatcatctttatgaggaggaaataggagcagtaggtggaattgactacaatgacacaaatcagaatgcccagtctgaacaaaatggttcaagtgatttattatgtgacttgaatacaagttcttatgacacttctgctctttgtaatggctttcctttggaaaatatatgtacccaggtcatagaccagaatcagaatttacatggtgattcaaaacaaagtaacttaacaaatggagactgtgtggcatcatcagatggcacttcaaaaccttccagctcacttgcggtggcagcacaacttagggaaataataccatccagtgctttgcctaatggcacagttcagcatatcctcatgccagatgatgaaggtgaaggtgaattgtgttggaaaaaagtagacttaggggacgtgaagaatgtggatgtcttatctttcagtcatgctccttcattcaattttctttctaattcatgttggtctaaaccaaaggaagataaagcagtagatacatcagatttggaagttgcagaagatcctatgggcctccaaggaatagatctgatcacagcagcattgcttttttgtctaggagattctccaggagggaggggtatatctgatagccgcatggctgatatttatcacattgacgttgggactcagactttttcacttccatctgcaatattagctacaagtacaatggttggggagatagcttcagcttcagcttgtgatcatgccaatccacagctttcaaatccaagtccgtttcagacacttgggctggatttagtattggaatgtgtcgctaggtaccaacccaagcagcgttcaatgtttacc

SEQ ID NO: 37176 - DNA, 2300 bp, Homo sapien
cctcctatgttggcctcccaaagtgctgggattacaggtttgagccaccgtgactattattttagtttttaaaggttaaataatcttttaaagtttttattgctaataggaaacacaccagtaaagaagttgattatactaaaaatacattgaataggctcaataattataattaagtcaatatattatggttagacttttatttttcatataaaacttttctttataaaggttatgatggaaattttaaagcagggaagaccattagacatctataatccattcatgttattttatagaactatttctctgcttaaaattctcagtgacttccagttgtaaaagtgtgaactctttggagcagcataaagcactcatcatgatttgccttattcctttctgacctcatctcttacagatacctggcattttcccctgtgatccaacaatactagggaacttgaggttttgctaattcatgcttttctgtatttgcatatgctattacttctgcattgaatgcctctctttcttaccagtttaccgtcccatacttaagacttctctttcaagactactgtgatttattctctaatccctactcatattgattattatcttctctattggtaccattttacttctgtcaaattgaccacataaaaacgagatacactttttactgtctttgacatcctgctgtagctttttgagaggaggcactgtgacttgctaatctttatattgccacaccaaacacagtgcatggtccatgatagttaaacaataaataggcatttaatgaatgaatgtggccctcaaaagtaagttatttgcccacagccacagagcttgagcttgaacttttattttctggataaattccttgtatgttctaattaagacttacttaatttgtggcagaatttattaaggcatatatagaaggagagatcaatagatgaaatcttaaatgaattcatttagaaggaataaaaaaagacttctaagaaagttttaaatatattcatgaaattcatattgttcttttagtaatacaagatctctgaaatgtggggtacaatcaaaatcagtttagttgaaattagaaaggtaaaagtgaaaaacactctgaaatctaaaatacacattaacttgtttttaacattaaataatacacagtattagaatttaaatagtatattttgaaacttttgcccttttaggcatattgttatatagtatataaaaatgaaccgttatgacattctacagtattgaattgttactagaatgtaagtgcttacatcctttcaagacattgattatatgtaaaattaactggttaagtatgtttattttatatatgtcatcctaaaataaaccaagatattagataaattagtgatttaattattaaacaattttgaaaaatcaaccattttttggctaatttcttatctttttccatttcatcaaccagagctggactggccattatggaggaggagctgcagcattcccattgtgtgaattgtgtcagtagacggtgcatgaccaggccagagccagggatttcctgtgatttgattggttgtccattggtttgtggtgcagttttccattcttgtaaagctgatgagcatcgacttttatgtccatttgaacgagtgccttgcttaaatagtgactttggatgtccatttaccatggcccgaaataaagttgctgaacatctagaaatgtgtcctgcaagtgtggtgtgctgtactatggaatggaatcgatggccagttagttatgcagaccggaaatcatatgaaaatctaagcagagatgtcgatgaagtggcacaattggatatggccttggctcttcaagaccaaaggatgctcttagaatccctcaaagtagccaccatgatgtcaaaagcaactgataaagtatccaaacctagagaacaaatctcagttaaatcaagtgtcccagaaataccacatgctaatggtttagtgtctgttgatgaagaatcttatggtgcactttatcaagctactgtagaaacaaccagaagtttggctgctgctttggatatcctgaatactgctacaagagacattggcatgttaaatacaagtgtcccaaatgacatggatgaacagcaaaatgcgagagaaagcttagaggatcaaaacttgaaagaccaagatcatctttatgaggaggaaataggagcagtaggtggaattgactacaatgacacaaatcagaatgcccagtctgaacaaaatggttcaagt

SEQ ID NO: 37177 - DNA, 2300 bp, Homo sapien
gtctaaggccaatctcctctatttcatcacactgaatttgaatttatattttatacagcctttgactcaattgttttatgtcaaaaaattctacaaatacaatgacattccataatatgtactaactccttctatcaaataagcagtcttaggaactgaattaaaatatttatccaaaatcatacagaatagcatagcgcttatccattaaaatattcacatcttagaaacatgttatatcaaacagtaagcattaaccaatgcctattttggtgaccttaaagtacctctctatacacgttagcattacttatataatattgctttttaatgatatattaggacactttttagaagaagtctcccaatgctagaccgggagaaatactggattgaaattaaatacctagtacacttggtatacattaaagtttgcctatattcgaaacttcagttctcttacagcattcacgaaactccaccatttccagaattaaaaaaaaaaaaaaaagttacgtcacggcattaaagtgctaggtaaaaacaaattggcaatttaaaaagtcagcaaaacaccatgttatccccaattaaacttttgtgatgagaaacagtgactaagcatgaagaagagtgattcagcggaaaccgcatattgaaatctaaccctctgaaaaatcctaaaggtttattttatgctactcttttccttttgccatgtcaacaattggactgctttggaaaaccttagtatgagcaaatgcaaaacctgttaatataatttccataggtctctaaagaacaaacagtattgaaatttagcaaatggaaattaaaatttaaaaagtttgggattttgtattaaaagattttaaattaatctacaccgatatcagaatgcccataaataacttcatcttggatcagagtcaacgaagtaatcatggaataaaaggtcaattcgttcccaagcatcttttatctgggacttacaacagggctcaataagaaaaacaagagaaagggagagggaaatggagtactaggacattggtaaacacatactgttttgcctctttgcctctatactcccaaatatacccgttaaaaacatactggcagattactttgaattcagcacgcgctctataaaccccttccaagcaaaggagttccaaggcgcaggtcttggaacaacacaaataacctcaggtctgcaaaataaggaagttcccctttaataaggaccgaggctaaggctaagatcctctcacttccatgaatggcaaagttaccaactttgctcatcccgtgcagacagtggatgatgcctccccagtcttactttaagccatttgtccccaaataacccaagtttctaaaaaccagacggaacgagaagcttagggttccctaagtttaactcctccttcgtcccttcccaatacaaagacacacaaactgggggggacacggaggtcggtgccctcgaggcttaagtcgccatttgctgacctcaacggctggcccggcatgcggcccggcgaggacacgagcgcggcggacgccctctcagggcgcccggacggccgacccgggacgcgcatggaccggggtcagccgcctttcctctgctccaggccgggcccgtcaaccccacggccgccagcgccagcgcctcggtcccggccgcggcctcaaactgcccggccgctgccttcgtccccgccgcagcgcggacggcgccggcctcccctgcgggcctcccgtcactcaccggccggcgcggccgaaccgcggcccaggccctagctgccctggacgccgtgcccagctgctccgctctgtcccggcgacgctccgtaccccacacagccgtccgaaccgcctcctccgcccctcttccccagccgggccgccgccttttctcttctcccggcctgctccagaggcagccaccctcctcgcgcgccccgccccgctgcgccccgcccacccggcccggcttctgccgacagctgggcggggacgcgcacgcagtcccggcggggacgcgcacgccgccctctgaccccgcagcgtcgtggctagagtagggtctggagagagctcccactgtggcgagtcctgtcgttggattcccgcggcgccccgtaaggctccgccccggcggtgctaccaaaccctgttcgattttagaatcgtacattcccagagggaatcctagacccctcattttacagttgaggaaacaggcccaagtagcatgacttgttcgcgccgctagtcgaaggagcagc

SEQ ID NO: 37178 - DNA, 2300 bp, Homo sapien
ataggagatactgcaggagaaaggactggttaggcaacagcagacatccaaatttgtttaagacagtaatgttaaaaaaaaaaaaaaaaacttcagccaaattaaatttaaaggagtttgagcaacgaacaattcacgcatcaggcagcctcctgagccagagtaggctttgagactccagcgcagccacatggtggaagatgatttaggacagaagaaggaaagcgacatacagaaaacggaactgaggtacagaaacagctggattggttacaggttggggtttgccttatttgaacaaggttcgaacaactggctacatttgattggccaaactcaatgattgacagaagtgtgggctatggtctgtttactcctccacttattatagttcacggtgtacacagaaacctttaggctgaacgtaaaatatgtaaggaggctgctttaggctaaacttgatttaacagtaactagggatgaaggtgaaagaaaaaaaggattttaaataattgtctggacatggaaaattattgagatgaagggacaaagaagacaatgaggtttccaacctgaatgactcaacttcaggcgagtgagggtgacctagtgtcagctaggtgacttagtaaaaggtaaagccccagatctcaataagtataattagagattcacagaattttaaagctggaaagggctctagagataatctattttagatcctttataagaggacagctaaagcaaaacaaaggtctgtgactcaatccaggacagtgagcattgagcggggctatagtgtagcagcacctacatcctctcccactgggccatcctgcctgtttccccatcctgaccatgtagctctctggacagtggctctcaaggtctgaaccgaggaccagagcctgtctacagccaaatcaggcaaaataaggggaacagataatttttcaaaaagttaatcatttaaggaatcaacctttactctgtaatctaagttcctaactcagtttttgttttgttttgtttaatttacggatctgaaaaacccacaggctttctctgtaggatagcaaattatgtgtgagctctctttcccaaagcacaacagcaaggggtaaagatgcagccacaaaaaggatgacaacagtgttttcctggctctgcccccatccccactgccaggattacaaccatctttcctttgttgtaattctcttgcgacggggtgggcaggagtccccgacagaggggtgggggcgggtgagcggctcccaacacccagagctcggaatcactgtccctcggccgtagaccaaggcttggtggtggtagcgggggcgtggacatccatccattctttgatacagccctgtgggatttctttactccccagtcatatgtaaggtacactgcaaaagcggcttcaagtcccctccccagctaattaccttcgcggaatgacgcctcggcccctcacagaagcagaccctggtgggctgtcccgtccgggctccagagaggctccgccgcccgccgggatccagggctgagctctcccggggggaggtaaaacccgacaggggataacgggtcacagcaccgtcctggcactaagtcacgggacttgggcacgctgagttagccggcgggaaggcctgtggcggcaatcaccaaaggtcgagcaagggcgcacccatttcctccaaaaatgagctaaagggaaagcagtgccccagagtcaagggatcggggctgctgctccttcgactagcggcgcgaacaagtcatgctacttgggcctgtttcctcaactgtaaaatgaggggtctaggattccctctgggaatgtacgattctaaaatcgaacagggtttggtagcaccgccggggcggagccttacggggcgccgcgggaatccaacgacaggactcgccacagtgggagctctctccagaccctactctagccacgacgctgcggggtcagagggcggcgtgcgcgtccccgccgggactgcgtgcgcgtccccgcccagctgtcggcagaagccgggccgggtgggcggggcgcagcggggcggggcgcgcgaggagggtggctgcctctggagcaggccgggagaagagaaaaggcggcggcccggctggggaagaggggcggaggaggcggttcggacggctgtgtggggtacggagcgtcgccgggacagagcggagcagctgggcacggcgtccagggcagctagggcctgggccgcggttcggccgcgccggccggtgagtgacgggaggcc

SEQ ID NO: 37179 - DNA, 2300 bp, Homo sapien
cagaaataccattctacccagcaatctcattactggttatatactcaaaggaatataaatcattttcttataaagacacatgcacatatatgtttattgcagcactattcacaatagcagacatagaatcaacctaaatgcctatcagtgatagattggataaagaaaatgtacatatacaacatggaatactatgcaggcataaaaaggaatcaggtcatgtgcttcgcagggacatggatggagctggaggccatcatccttagcaaacttacacaggaacagaaaaccaaatactgcatgttctcacttacaagtgggagcaaaatgatgagaatacatggacacatggcggggaacaacacacactagggtgtgttggagagtagggagaggatcaggaagaataactattggataatgggcttaatacctgggtgataggatgatctgtgtagcaaaccaccatggcacacatttacctatgtaacaaacctgcatatcctgcacatgtatccctgaacttaaaataaaagttggaaataaaaaaaaaagagtgattatgtcagggactaggtggtagctgtggagatgatgaaaagtggtcagagtctagatgcattttgagggtgggcttgattggctggtggattagatgtgaaggatgagagaagaaaaaggtactaggatgactctagagtttttgccttgaacaagaaaaaaggatgaatgccatttaccaagattatagaaaatagccagtctgtttattcttacactatcaattgacacaacttccagttaataagttcactttattttctgaaagttacaggagaagactttactggttatgaccttatactgctttaatggtcatctgtagccaaaatcatggacataaattctgaggagggttcctggtaagcctcccattcctgctatgagaagaaaccagcatgcccatgcttcccagcagcatactgtaattgctaagtgtcaatgatgatgtcagttttagtgtctcagtaacagttgctagaggaaggaaggaaggaaggaagggagggagggagggagggagggagggagaggatgaagaaaaagaacgaaaagttagaaactatgtagtcccagcctctagaagccagaggcatgaggtctacttagggtcctcttgagacaggtgaagacttttcagtgtcacaaaattaatatcacaaagtgatattatgttagtattatgacatcaaaatgtgtgggcaggctgggcacagtggctcacgcctgtaatcccagcactttgggagtctgaggcaggtggatcacctgaggtcaggagttcaagaccagcctggccaacatggggaaaccccgtctctattaaaaatacaaaattagcggcgcatggtggagcaagcctgtaatcccagctacttgggaggctgaggcaggagaatcacttgaattcaggaagaggaggttgcagtgagccgagatcgtgccattgcactccagtctgggcaacaagagtgaaactccatctcaaaaataataaaataataataataataataataataataatgtgtgggcagatgtcatctacaccatagtttcagaatgcaataaattcacatttaaaaaccttgaagtacaccgtatcaaaactttacttcatctttcattcttatgtgattcagttgataggctggaagaacaatgaaagtgagttccatcatgctgcctggtgtccgtgtccttaatgataaagactttgagtgtatttgcaaactctctgttaatgacagcatttttttttattctgagctttattaaggtataattgacatacaaaaattgtacatatttaaggtgtataatgtaatgttttgatatacatatacattctgaaatgattaccaaaatcaagataattaacacatccatcacctcatagttatccatttagcaaatcctttactaggtggcaaaattgattttaaaatcacatttttatccccttgaagttttttcatctgtaaattttcaagggcagtcttttaatagaatacaaacagctcattccttatgtggctccaagctggcatttcagcattgggtttaaactttagagcaacatatgaaaatctcctgaataaacttgtcaatgattatggtcatcaaaacttagtatgatcaaggaaactggtttttgcataatattctgaatatttaaactccacagagcttgaataaatgaagtacaaattaaacatatcgatttttttcttttggta

SEQ ID NO: 37180 - DNA, 2300 bp, Homo sapien
ttctttttccagttccttgtggtgcaacattagttgtttatttagaacatttctctttttttatgtagttgtttatttctataagcttcattattagaactgcttttgctgaattcccataccttttgttatgttgtatttccattttcatttgtctcaagatatttttaatttttccttttaattgcttcattgacccaatgaatgttcaagagcatgttatttaatttctatatttttgttaattccaaaattcctcctattatgggtttctagtttcattccattgtcagagaagatacttgatgtaatttcagtcttgatttcggacttgttttgtatcctaacatattctgctaggaaagtaggaagtaactagattgggacaaaatggttcagaactgtagtggttggaagggatcattgagcactaccactgaactggccagtctttgataaaagcaaatgctctgttcttttcctacgtagagttagcactacggtactagaaatgttgattataaaaaatttattctacattttttttgaacttttagtaagaaacgtattaatcagtggaaggattcatagttttcctggtatttcacttgaaatagttttaaaagtaagaccttgcaaggaacatggatgtttttgtctaaattctgaaatgatcacctttacactaatttcctattttctcttcgctcttgtttgagataattattagactgaaataggttctttgtagtacatttctaatcttgcaagtacacttgaaagtctacatacccagagaaaataagtgtagaatcatgattttagcatgaggattttaaaactttttccattattctatcttgctggcttaaaattagtacagctttctttcttgttttgtttatatttttacctttgaatgtttcttcatgtaaaagtgtgttgagaggattgagggagagggtttatgctgctgtggaaatatttttccttctttttggttaaatctgctcccccttgtggtataatctaggtcattatagtgctcatatttaatatctcagaaagataataagttcttgagtgtttactccttaccagatgttaggctaaatgcttcgtatacattttctcattcaatcatcacagccacctttggaaagagatataattatcattcagccctattggatagatgaggaaacacaggattagaaactataactagtgagttgtagaactatgagttgaacttaaatttgtctcattcaaaatcccataaccttaatttctctgtcataccatctccaagagcactccagaaggaaaactttctcattgagggctacagaaatacttgcactattttcctcattttcttatttctccattttaaaaatcattttttcactttcatcctcatctgatagaaatggttatggaagatgcaaaaaaaaaaaaacacacagttttaagtgtctagctttgtatgaatctgcctcattctaagtgagcatcatttgtacctctgtcattgtttttggtaatacccttgcaagaaaacattctccattggttggatccttcactgtttgcttacattgggagttttgattcattgtattcttaacatttctaatgacataatatctgaagaaagggagaataaatgaagagtgttttaaaatatcatttctgctaatctaatgtaacaaaattttgtaactataaaacctgactacttaactaaaagatcctatgttcagggtcatagcacttaatgactttctggcatgcttttacattcaaatgtctgggtgtaaatttaatgacttctacatttcgaggctaaagaaaatttccagcaaacacaaaatgaaaaagagtaaacacatatgcacctgataatttgttttgatgcatttatagttttgataataaaaagtactttgtattgcttttctattctgttcttaactagattttttagtagtaatgtgtattttgtgtgtgtgttcaaagggcagccattctacaaaagtggaagctgtggtcagaactctgatgaaaatacagcttagagatccaggggccaaagcactcgttttctcaacggtataatcaacattttcatcctcaatattaattcgaactgattttccctctctaatcagtttacagctgagaactaatttttgatgtttactcttagattttttttcccaaatccataagatagaattatttttagagaagatagaattatttttagagaaatgtgatgatgtttcacaaggcaa

SEQ ID NO: 37181 - DNA, 2300 bp, Homo sapien
actctaaaaagatttgcttatattatatgtaaataaatacgtatgatacattaatacatattctgagattctccttgactggtattaaacacattttattattccaattttgaacattgtgttttctgcagatgattttcggagaaaattagcttgacaatatcaaatccaccagttttcttagaaatgttagcgccatcaagtggctgagaatgggtatttccaaatttgacttaaacctttataacattgaatatgggtttttttttaatcttcctcagaaagcatgtctttttaaaaataaacatgcaaaaccaggtattataacgaatagataaaattcagctgctttacattatagtttaatcactataccttctttaaaaggtatggtaattatgaagagaaaattgttaattgaattattctctacaaatggtagtataaatactgatagaattcataatgtcctttgaaaagctttaatcaagactcttaactaaaaaaagagaactcactgtgaagataattgaatgttaatgcctacgttataaagtaactttattattgtgaaaataatcttctcccttatttaaagggaatagaaattggctgactacagttctttgataatgtgtgttttagaaagctttgtattagctaactaatagaactagatataaagcaatggtataagagctattgttgcaaaatttattttaaattaggtgttttgcacaacactgaatatacataatgccactgaactacacacttaaaaagggctgagatggtaaattttatgtatattttaccaaaatcaagatatgtatgtaaacttatatatgagctaaaaacagaaccaacttcaaaatttacaaaggtttgcatatatatatatatctcattgtaactatgaacatggtcctaattacatgatattcataaaaccagcttgaagtttttttttaaaagaaagtatgtgtgatacttaggaaaaaaactttctcagcaaataaaagctagaacatcttgtacctttttttggtatggattgcatggttttgccagtgttaggtttttactttaatagtatttataatttacctgtcttgaattttacaagcagcagttaagatagattctattattcaagccattaaaaatgttcatctcttactttattgagatatcatcaaactttctgtgtaaagaagcagataatacataggcattgcaagccataagatctctgcgcaactatcagcttggctgttgtagtacaacagcagccacaggcagtataaaaacaaatgagcagagctaggttctaataaaactatggaccctgaaatttaattttcacatgtcacgaaatattttttttgaatttttttcaactatttaagaatgtaaaattcattctaagctgatgtgcccaacagataggcagagggtagaaatgacccatgggccatactttgccagactgtgctttaatcgatactttttgaattgctttatttgaatgaggtgctgattatgaacagtagaaaacagcatacatctcagaccatgatttgtgtgaccagaagaagagggagatccctgagtttctgacatgaagtttttaattgcaaattatttggcctaataccaagaacaataatagctaccaagaatactatatttttctgatcgctatgtgtgggttggttggagtgtcttaaattttttttttaataaataatctataattaccttaagtttatccttaatttcaaacatcataatgactactgattgccaccttttaacttcagcaagaggaaatttttttgtctaaattaaaagtttatccaatagcataatctcaaaacattacaaacgtttgattataaacatatttcagtataattttaaaatattataaatgtaatataagaacattatattccatggaattaaaaaaggaactgtactcagccttttttaaaacttgggcaatcatattaataccaagtcaaatttctttacttaaaaaaagttataatcattacattttatttttacagtattcttaaataatggacaactagatgacattgggaactaaatatgtgactctcgtatgctttaaatacattttaattctttaggtgagtatgccttggcagcagaattgtacagagaagtgttgcgctcctcggaggaacacaaaggaaaactcaaaactgattcacttcaagtaagtaaagactaaacagtttcataggtattctgtttgtttttttaacaaa

SEQ ID NO: 37182 - DNA, 2300 bp, Homo sapien
cttacataaagtcaggagtttaatttcagaaatgcaactagttgcaatcaattaattaaatatttttttcataggcagtagggagtccaaggaaaattcagaaagaaactagaaaatcagggaacaaggacacagattctgaatacttgccatcagacacctctgatgatgatgatgatccttactattattattataagtccaggagaaatcgcagtaaattgaggaaaaagcttgttccatccacaaaaaaaggaaaaagtcaaccatttatcaatcccgattcacaaggtcactgtccagctactagcgactctggaataactgatgttgctatgtctaaaagtacatgtatctctgaattcaaccaagaacatgaaacagaggactgtgctgaatctctaaatcatgctgatagtgatgtaccaccttctaataccatgagtccctttaacacctctgattaccgctttgagtgtatatgtggtgaacttgatcagatagatcgtaagcctcgtgttcaatgcctgaagtgtcacctgtggcaacatgcaaagtgtgtgaattatgatgagaaaaatctgaagatcaagcctttttactgcccccactgccttgttgcaatggaaccagtgtcaacaagagcaactctgatcatctctccaagttccatctgtcaccagtgggtggatgagatcaacaggcatgtgaggtcgtcatctcttcgagtcttggtaaggccacttggactaaagagggagaggaaaatgtaaagttttgcttcttcatgatagtttcctaatctttgtttctttgtggtttatcctcaaaactaactgaatgatttaatagtaatgttaaatcaaagcttaaagaaaaaaattgagactaagaactagaacagtacaatgttattcttttctaacatcagaatttcaccaattaaagcattttgagtataaagatgtggaagctttttaaaaattcttgagtatgtaaatgagaaattcttggtataagcatttatagtcttcagagagaaatgcaatccaaaggcagcactgtgtaataggagctacttatctgatctgccatctcttagctccaaaatcatcctctaaagcttcagttacctcagctgtaaaataagaatttacttatacagcaaatctttattgaccacttattatgtgccaggaactgctgagttttaaaaatagtatccagtcatttgtgaagatatgattttgtcaagtactgggcacatagtaatgttattgtttcctaatattaatacccttcactaatttcattcttccttctttccatgcaagtgttactgaaggtttttgtatttcatccactttacataggcatggagaatactgtaataagcaaaacaatttttgctgttaagaagctctattctgtgtgggtaggcaaagctttgagtcttagttccatcagttttgagcaagtcactttatttttcttatgtgtgggataggaatattaacaaccaccaacagaattattgttgaagtttggagataatgcttagcacagtatctgaaacataaaaggcatttcataaataatagctcttattgttctactttttcataccattgtgctttcacatatgctattgattccatcctcctacctacatatagcccttttctctttttgccacctatgagaacctttaagatatacctcaggttttaactcctctgtgattttaccttctccgctacagaattggtctttccactgtgatgctgtcatgttcacatttattacagtttgttgcacatcagttatgtaattcatcttccacactaaaacatgtctttctccaaacaggtatgggatctgtctcatagcatgaatgctcctaagaaaatagagaggacttagtaagggtataaatgagtgaatatttcattgcctttagtgagcctttttgcaataactgcctgtattgattatttcctaggtatatcaaggagtgaagaaagatggctttttacaacctcattttttggcagaacaggatatagttatcattacctatgatgtactgcgttcagaattaaattatgtcgatatcccacatagcaatagtgaggatgggcgtcgcctacggaaccagaagcgctatatggctatcccgagccccctggtagctgtggagtggtggaggatctgccttgatgaagctcagatggttgagtgtcccacagtaaaagtgagagtttctgcaaaatcttttgagggctggggaagaagggtga

SEQ ID NO: 37183 - DNA, 2300 bp, Homo sapien
tcagcacttgctccttcaccttgtactttgatgttatggagatggcttcttttcttaaatctcatgaaccaacctctgcttgcttcacatttttctgctacagcttcatcacctctctcagccttcacagaactgaaaaaagttagggccttgctctggattaggctttggcttaagggaatgctgaggctggttttatcttttattcaggccactaaaactttttccatatcagcatgaggctgtttcgttttcttatcatttgtgttttcattggagtagcacttttaattcccttctagaacttttcctttgcattcacaacttagctaactttggtacaagaggcctagcttttggcttatctcagcttttgacatggcttcctcactaaattccttcggttttcgatttaaagtgagagatgtgccacccttccttttacttgaacacttaatagtccattgtagggttattaattggcctaatttcaatattgttgtgtctcaaagaatagggaggcctgaagagaggaagagagacaggcgccaatagtgaagctttcagaacacacacaacatttattaagtttagcatcttctatgagcagagtttgtaatgctcccaaaaaactacaatagtaacatcaaagataactaatcatagatcaccataacagatgaacagcaagtgaacacatgctgcttgaaaaatgatgctgacagacttgcttgagtaaggttgccaaaaaacttcaatttataggaaaacatattatctgcaaagtacaataaagggaagcaaaataaaaggaggcggggatttgcttatggaaacagcttcgtatctgtgataaaggaatatactaagtaaaatatggactaccctggactgtctaacacaactacaaccgatattcacttggacaagaacttagttcaagtgcttctgtggtcacacaacccaaaaggcctccacagcagaaaagctgctattaggtactcactaactaagtactgagtccccagtgtttcctgagggttatttcacaggctcctgaccctgaagcctctcagagttattccaacattaaggtcacttctatgaggaagaggtgagaggaaaaaagaccaatagtggaaggccagcttcagcgcaacacatgtatttaatagtttctctcatctttgaatatttattcacatttccctttaaagtctgtttttgagggggagaagctttattcgtacctacttagtggctgctttatagcagtaaaatagatgcttttgcagaattcttttctgcttttcttttgtgagacggagtctcattctatcacccagtggggagatgtcggcttactcaatctctgcctcgcaggttcaagcattctcctgcttcagcctcccgagcagctgggactacaggcgggtactacaggcgcgcaccacaacgcccggctaatttttgtatttttagtagagacggggtttcgctatcttggccaggctgttctccaactcctgacctcaggaaatccgcccgcctcggcctcccaaagtggtgggattacaggcgtgagccaccgctcctggcccctgcctttttattagagatacaaatcacacacgcccttcgcttcaaggggagccccgccccctacttcgggcattcggccatcctgtgttctctaatggcgtggggcagagctatcgcgagactccactgtatcctcagcaagtttttaacagtgtgaacttgcgcagaagagactcatgaagccagcgcaggagaaagggggcggggtgctctgacgagcgcgttcgccttgaccccacgctacagcgcgcgcccggcagctaggcgctgtggtttctgggtctcccgggggacccctacacgttccggcaaaaagcgctcgtgcccacctcaagcccatgttcggtgggtggcgaatgcgtgcccgtgatctgctgggtctgtagaggagcgcaggcctggtgcaaacagactcaagaggctcggagaaccagcttgggtaggcgcttgggtgatggaaggtcaggggtcagaggtcgggagggagggagggaggtggtctttggcctccgggaccagggagggaggacgctggttgtcctggagcccgggaagctcaagggctgagagggagccgctgcgcgagtcttccccacctcttcccgatcccggactagcgaacttcggaccaccacgtccctccggggataaagtggggtcgtgggaaaggaggctgtgcttctcctcatgcactgggg

SEQ ID NO: 37184 - DNA, 2300 bp, Homo sapien
atgctgttaagtagatgtgctgtcatccacacttcattgttccatttatagagtacagacagaatagatttagcataactctttagggccctaggagtttcagaatgataaatgagtattggcctcaaattcaagtcattagctgcattagcccctaacaagagagtcaacctgtcctgtgaagcttagaagctatgaaagtcctagatggccttttctttctatagaaagctgtcttatctacatggaaaatctgttgttttgtgtggccacctgcttcaattattttagctagatcttctgaaaaacttgccacagcttctacatcagcacttgctccttcaccttgtactttgatgttatggagatggcttcttttcttaaatctcatgaaccaacctctgcttgcttcacatttttctgctacagcttcatcacctctctcagccttcacagaactgaaaaaagttagggccttgctctggattaggctttggcttaagggaatgctgaggctggttttatcttttattcaggccactaaaactttttccatatcagcatgaggctgtttcgttttcttatcatttgtgttttcattggagtagcacttttaattcccttctagaacttttcctttgcattcacaacttagctaactttggtacaagaggcctagcttttggcttatctcagcttttgacatggcttcctcactaaattccttcggttttcgatttaaagtgagagatgtgccacccttccttttacttgaacacttaatagtccattgtagggttattaattggcctaatttcaatattgttgtgtctcaaagaatagggaggcctgaagagaggaagagagacaggcgccaatagtgaagctttcagaacacacacaacatttattaagtttagcatcttctatgagcagagtttgtaatgctcccaaaaaactacaatagtaacatcaaagataactaatcatagatcaccataacagatgaacagcaagtgaacacatgctgcttgaaaaatgatgctgacagacttgcttgagtaaggttgccaaaaaacttcaatttataggaaaacatattatctgcaaagtacaataaagggaagcaaaataaaaggaggcggggatttgcttatggaaacagcttcgtatctgtgataaaggaatatactaagtaaaatatggactaccctggactgtctaacacaactacaaccgatattcacttggacaagaacttagttcaagtgcttctgtggtcacacaacccaaaaggcctccacagcagaaaagctgctattaggtactcactaactaagtactgagtccccagtgtttcctgagggttatttcacaggctcctgaccctgaagcctctcagagttattccaacattaaggtcacttctatgaggaagaggtgagaggaaaaaagaccaatagtggaaggccagcttcagcgcaacacatgtatttaatagtttctctcatctttgaatatttattcacatttccctttaaagtctgtttttgagggggagaagctttattcgtacctacttagtggctgctttatagcagtaaaatagatgcttttgcagaattcttttctgcttttcttttgtgagacggagtctcattctatcacccagtggggagatgtcggcttactcaatctctgcctcgcaggttcaagcattctcctgcttcagcctcccgagcagctgggactacaggcgggtactacaggcgcgcaccacaacgcccggctaatttttgtatttttagtagagacggggtttcgctatcttggccaggctgttctccaactcctgacctcaggaaatccgcccgcctcggcctcccaaagtggtgggattacaggcgtgagccaccgctcctggcccctgcctttttattagagatacaaatcacacacgcccttcgcttcaaggggagccccgccccctacttcgggcattcggccatcctgtgttctctaatggcgtggggcagagctatcgcgagactccactgtatcctcagcaagtttttaacagtgtgaacttgcgcagaagagactcatgaagccagcgcaggagaaagggggcggggtgctctgacgagcgcgttcgccttgaccccacgctacagcgcgcgcccggcagctaggcgctgtggtttctgggtctcccgggggacccctacacgttccggcaaaaagcgctcgtgcccacctcaagcccatgttcggtgggtggcgaatgcgtgcccgtgatc

SEQ ID NO: 37185 - DNA, 2300 bp, Homo sapien
tctttgaactcttatagattagtgtatttacttgtatttgctagtttgtatgtagctcattgttgcagtaatccccttcaatcctactggaagaaccatcccttagatgtctgcacatgtattataccctgcctcctatgtgaagtcttcatttatagaaagagaaagtatatttgggtgatcttgtcttcttttgtctcaatgccttcttctttgattgtttttgtcctggtaccttctatagttagctcttaaataattatcaataaatttaattgatcatttcaaattaatacatttgaaattttttttctttaacactttttgtatatgcatgcatctggcatgttataatcctcaaattcatcgtctttaaaatgattagtttcagccagcctgaatgtgtagtttttacttggactgtaaaatgaatttgagaaccaataaatctgaacatttaattattccttcagtacagcaatgtgatatattaaagatgttcagctttaggagcacatattgacactaaatgtggacttcagagacattactttctttaatgctgaaaatcataattaaggggtatatatgcacagaaatctttgcacattcactatatctctggaatattctaggaaagtaacatttagagcttatcacactctaatgggcttatctaaaattgaacttaagtggctactagaggaagtcagatactatgggactctgtgcatacctgtggcttgctgttcttcgaacagacatattcctagggtagaagcagagagccatttagtcccatatgtgatgatcagaacttacctcttcccattttccttatgtaaacatgtggctacttcccgaattgagatcatttagtctaaaaaatgtgaacgttgtttagtgcattatttgtggaaaaagaaaaaaatatattctctttgggctgtctaaaaaaaaaaaatccagaaaactctgacacttagggaaaaaaagatcagaaccagaatgagaaagaccttttgttattgactagaggtattgttttccttcctaagtttcatggaacacactgaagagtatttgaaactgcctcatgtggtttgtcccctccagtctgacatggcaccattccataatataataatgacctgagcaaggcgattataagctgacccataagggaccaacgtaagctgatctctctgctctgcagatgacacaaatagaaagctttgaacaagagtagaaagacacactgtcacttgtcttttcccctgaaaaagccgggccacattctgctcagccaacatgttcccagaggaatgtgatttaacttccgcttttcacacagtcagaagcaacaccatagacctgtagggaaggtgatggccgcctgggaggaatttggataagtatttgtcactccagtattttcatgtgacctgactctcattctcaatttagttacatcttgacctgaaaatgcagccacaatatgtctctcttcatttggcataccttaattcataatgggcatgcctgtcctttcccttctcccaccctatgcagcctcttcctgatttcccttgcaatctactaatagagcctttctttagatgtctgtacatgtgtttacactctgtttccctctgtagggactttactcgcagaaagagaaaatatatttgagtccctgagatatatatacaaagatatctaccccaaagcagcctaggcagttctccacttctttggccagattgtctgactattcacgtatctggcagcttctatacgacccctcatatagtaaaggaattaatattccccacttcctcctagtttgtctcccctcctccctctatcaaacgactgatttttatacatgagataatagacaagccttgggtgacctgtttttttttttcttccctccccctctttttcccttgcggtaaaatagtgctgaagaaagagggcactagtgtacagcccagatcgcatccttgcaccgtctggattagagctgaggcgtctgcaagccgagcgtggccacggtcctctggccccgggaccatagcgctgtctaccccgactcaggtactcaggtatgtctcaagtccatgtcctccaaacagactcaggtgagcggacacttcctccggtgaaacccacccacaacggcagacaaagtcccagtctatcagattttcctccgggtcccaggcgcattctcgcttatgtatttcttttcgtcctgtatcctcaggaagagtcgggaccaatgggtgcctggg

SEQ ID NO: 37186 - DNA, 2300 bp, Homo sapien
tctctcttcatttggcataccttaattcataatgggcatgcctgtcctttcccttctcccaccctatgcagcctcttcctgatttcccttgcaatctactaatagagcctttctttagatgtctgtacatgtgtttacactctgtttccctctgtagggactttactcgcagaaagagaaaatatatttgagtccctgagatatatatacaaagatatctaccccaaagcagcctaggcagttctccacttctttggccagattgtctgactattcacgtatctggcagcttctatacgacccctcatatagtaaaggaattaatattccccacttcctcctagtttgtctcccctcctccctctatcaaacgactgatttttatacatgagataatagacaagccttgggtgacctgtttttttttttcttccctccccctctttttcccttgcggtaaaatagtgctgaagaaagagggcactagtgtacagcccagatcgcatccttgcaccgtctggattagagctgaggcgtctgcaagccgagcgtggccacggtcctctggccccgggaccatagcgctgtctaccccgactcaggtactcaggtatgtctcaagtccatgtcctccaaacagactcaggtgagcggacacttcctccggtgaaacccacccacaacggcagacaaagtcccagtctatcagattttcctccgggtcccaggcgcattctcgcttatgtatttcttttcgtcctgtatcctcaggaagagtcgggaccaatgggtgcctgggttttctttctcctttttctgcctcacctcctgtgctctcctcgcccgctcccatagcccccttttcgtcgactctcaccttgagaaaaggagcaggggaggaacgggagagggagccaacttcagccccgcaggcggctgagatttggcgcctctgtccccaagcgggtgggtttggatatatacctgcacaagcggtgcaaggtgatgagaatgagggcggaggggcggtggggactcgagtggaagggagtgtgtgtgtgtgtgtgtgtgtgtgtgtgtgtgtgtgtgtgtgtgtatgggtaaagaactcagaggagggaggttgaaagagcaaagcgggtcagggaattgcaactcactggtcaaagcgtcccttgcaggccctgccagggaatgtctggctggaccgagcactgtccagggtcctgaaggcggcagggctcaggctgccgcggcgagagcaacccggaagctcccctccgttccctttctagcaactatgcaaaccccaaagcaagcgcaggaccccccctaacccgtccacccaccgcgggaaacaagttaccttatctgcaccccttcttcttgaacatacacagcaagcctgacttcttacgggggaaacataccaaactcctccatacggagactttaccaggcgttgccttagtaactaatgtggattttcttcaagctggcaaatttatatttacagctgattttatgtcagggcttcttcaacccctcaaaattaaagtaaaaggtgcatcctttgtttacgtttattttaaagtcgcgcttccacctttacaatgagtttccaaattttcttctgaaaaaaagttgatcttttccaatccggaaagttctcttgggttgaaggacctagctcctcccctcctctctgctcaccttccccaccgccctccaagttagaaagcatgataggttttaggggaccaggaaacgacttaaggttggaggagcgggcgagttggcggggctctgcgccgcctggacccgtgaggacagagggggcaggacaccccgccttcctcagtgaccacagctgcgctccaagctgttcctgcagccgatatcaggatgtgccgaaatgaaacggacaaggcaactgttaacattatagaccccagagttttaacacaggtcctctgatgacaaggttgtgatttttctctgtcttttgtcagcagcatctagctcaccgctgccaacacgacttccactgtactcttgatcaatttaccttgatgcactaccggtgaagaacggggactcgaattcccttacaaacgcctccagcttgtagaggcggtcgtggaggacccagaggaggagacgaaggggaaggaggcggtggtggaggaggcaaaggccttggacgaccattgttggcgaggggcaccactccgggagaggcggcgctgggcgtcttgggggtgcgcgccgggagcctgcagcgggaccagcgtgggaac

SEQ ID NO: 37187 - DNA, 2300 bp, Homo sapien
gggcttattgaacgttttagattaagtgtgatcaaatttggaaaaatggccattatttcttcaaatattatttctgcctttgttgttatattctttctagctgagattccatttatatgtgtttgacttcttgacatttttacatagaaattttatctatttatttattttccacttttttcttttacattttcaacagtttctattgctataactttgagtacactgatcttttgttttgcaacatctaatctgccgttaatcccatcatgtaattttaaaatttcagatattgtatttttcatctctaaaagttatacctgagtattttgtttactttctatttcttttcttaacatggtcattcttctgggatatataaaaacatatttagagtagttgttttaatgtccttctctgtcttgccaggcaggctttccactgcagtttatggggtatgtgctgttctcagtgttgtgtaagttccaggatttgtttgttctatgttttccagtgagtctttctcccgccttagatattttcttctcagatatgtgtacatcagaacttagctaaagactggagggaatccctccaaagatttgtttttcaacccacttttctcctttttggtactctgtcccagtaagtctacctgcttcaaccttcccaaactctgatccctgttttcttatttttcgctgaatttcccccgccctgttctgcagcctagagactaccaccagacagtaacatgggcaatttggttcatctctttgattttacttttctggagaattatagtcctatattgacatttatacaatgtctgataacagttggttcatatattttatttcgtgttctagttgttgaaggcaggaggccaccatttcacattcctactagcaatgtatgaagcttccacatactaaccaaggcttgttatcattattgtcctttttatatagctatcttagtgagcataaaatgatatctcacgtggttttgatttgtctttctctaatgtttgtttatctgagaatgtctttatttcacctttaattttgaaaaatatttttgctggatataagattcttggctaacaacttttttttccctccagcatggtgaatatgtcattcaactgtcttttggcctcttttgtttttcataagggattacttctgtatattactgtggttttctttttatatgatcagtggtttttcacttgctgttttcaagatttttctgtttaatcccatgtaaccatttttactatgctgagccttaatcttcttgtgtttatcttacttagagttcattcttgcatatgtagataaaagatttttcagcaaatttggaaagttttcaaccattattgctttaaatattttttcttctcctttatctttctccactttttctggtactctttttatatgtatgttggtacactcacttaaaggtatctcacatttctctgaggctccgttcatttttgtttttattgttgttctattttctgtctgttctttgggttttgtaatcgttattgattcactcaatatttcttctgccagttcaaacctacagttgagcccttctaataaactgttcattttctttatcttttcaactccagaattaattttggtccttgttttttaataacttctgccttttaattgatagtctgtatttaattagacactgtcattatatccttttttttacttctttaagcatagtttccttagttctttgaatatatttataatagatacttttaagactttgttatagctgacatctggtccatctcacaggcagtttttggttgcctgctttttttttgcatgtatgtgagtcacacttttttttaaaaaaatctcatttttggttaaaaactggaaattttgttaatatgttataacaattccagatactaatcctgttcctcttctctggggcttgattttgttattgtttatattttttgtcttgggtagattattttattgaagtctatttttttgcagtgtgaaatcacttgaataatcttttttgaatttgtgctgtgtactgggggcattttatatatgagaaaaccatggctcactgagatttgatgacttatccagagccacttacctagtcactacagcaaagatattcaaataaaaatttgtctagcttaagagtactctcctgtgtaagtagggtaccatgttgaaggttgcagaggaagtatgtatttattttctgttttctactataataaattaccacaacgt

SEQ ID NO: 37188 - DNA, 2300 bp, Homo sapien
ccaaacactaccagatgaaggttgaaaaaggattgttagggaagtaaagtaagatggcttcagagtccctgtgtcttctttctcaaactccttccataatttaaatgctaaagcatgataaggtttttaatagactattttgttgtgtgtgtgtgtatatatatatatatctatatctaaggtatacggcatgatgctttgatatacatagtgaaatagttactagagttaagcaaattaacaaattaacatgtccatcatctcacatagttacacaattttttcttttcattttttcttttctttttttttttttttttttttgagatggtctcactctgtcgcccaggtggaatacagtggtgcgattaagctcactgaagcctggacctcccaggctcaggtagtcgtcccacctcagtcttctgggtagctgggactacaggtgggtgccaccacacctggctgcaatttttttttaatggtaacagcacttacagtctactctcttagcaaatttccagtttaaaatacaatattattaactataacgctcatgctacattagatcattaggactcattcatcctatataactgcaactttgtacactttgacctgcatcattccgtttcttccctgcccctggtaaccaccactgtttccacgtattccgtgtgtgtgtgtgtgtgtgtgtgtgtgtttaagattccacatataagtgatattgcacagtatctttctttttgtgtctggcttatttcgcttagcataatgtcctccaggtttatccatgttgttgcaaatgtcaggatcgccttctaaaggctgaatgatattccattgtgtgtgtgtgtgcgtctgtgtatatgcgcgcgtgcatgcctatgtatgtattacaatttctttatccattcatcgttaacagacactttggttgtttccaaatcttcgcaactgtgaataatgctgcatgaacttgagagcgatttctgagatcctgatttcatttcctttgagtatacacccagaagagggatagctgggtcactggctttagcaacgatttttgcaatatcacaccaaaagcccaggcaaccaaagcaaacctagataaatgggacttcatccaactaaaatgcttctgcaccgcataggaaataatcaacaaaatgaaaaaacagcctatagattgggagaaaatatttgtgagccatatatctgataaggggttaatatccaaaatacattacgttcacagaactcagccaaaataaataaataaaacacccagttaactaacgggcaaaggatgtgaatggactttttttttttttccagaggaagtacaaattgccaacaggtataagaaaaggcgctcaaaatcactaatgaacagggaaaagccactaggtatctcctcacacctgctaggatgactgttataaaaaagataagcgataataagtgtcggtgatgtgcggagcaaagggaaccttgtacactggtggtgggaatgcggactggaacagccattatggaaaaccctacggaggttcactcaaaaagttaaaaacagaactaccagcccagtgttatccgtccttcgttaagttcaaagtcacggtgccacttcctttcccatctaaaggggactgctcgcgacccaagccaaggcccgcaagtgtggctctccctgcggggagagtagggcaggaggtggatttccaggccagaggcttccaggctgggcccggaccccacgccgaccccggccccggggggggctcagcgacctcggcgcctcctcaggcccccagtgaacctccggggcccataaaggctccaggccggctccccggaggcccaccagcgggcgtctgggcctccctccgcgccgcgaccgccaggaggcgccgcccgggagaggaagtccagctgggcccggccgggcttcggaggcgccgcccgggagaggaagtccagttgggcccggccgggcttcagaggcgcagggcgggagccgcctcgcgcagggtcctccccaagccggcgccaggccctgccctcgtccggccctgccctcgtctggccccgcccgggccgcgagcactggcgggttctgggtcctgtgaccggtcaggcggcgtcagcgggcgcggcggagggctggccggcctcgggggagtttccgcggccgccgggggcgcggcggcagagcgcgaggccgggcagggggccagactcggagtcgaggcgcgcccgacagccgcagcgctcatggcgggcggaggagccgg

SEQ ID NO: 37189 - DNA, 2300 bp, Homo sapien
cttagctccagaaagaagagaaattccatttatgcatgttgcactcttaatataataaaggagaaagaacactggcgtaggaattaataggcaacttatactcgtcacatcttttatgattatcttattccattctggtgacaacccccttactttatcctaatttaatagatgtttaaaaagcaagctctgagtggagtagtgatatgtttggcttaaactggcaatgctgactttaatgtgtttagtccaaattccatcaataaataacccagcaacttttggcaagacattttgcttgtcttcgcctggagttatttgtccataaaataccggtgggatgtagatcttttgatttctaaggcttatcttccctaattcttttggcatcttgcagccattaacaatggctgcaggatagcccttgttcaagaagaaactcacctctctgtggggttggctgcttaaagttgtgctgttttcagccaagagtctttgtatatacttatagctataaatttgattactctgacaaaatttggtagtaaataatttttctcaccatttagtcctctactttcattcaagagagttctctggaaatttgaattatggtataaacaaagcagaatcttcatgatgtgttcattgtctttacatatataggagatgtttgcagggcagtcttgtagtcataatattaacactgctgacttggaatttatttattttgcatatagaaatacaacgaaggggctgtctgtcatctaggtaacccccagtagtaatccaatagtaataagattgggatagtctgacaaaccataggctatgctgagtggagagccctgagcattcatttgtcagagaagttgaaagattttctctgcaggaagctgcctcttgcctgcacaggtggaactgtgagcatgtgcccagtcccatgagtggaggggatttcttttatttaaagatacttaactatttctaggctcatgaaagacaccaaccagtagtagtggtcctaggcctaagggctgtgtgtcagatatctctgaagtgaggttatattgaaccaacacaatattttgttttgttttgataaatttgcaagctcttgcagtctaagcatgtctcagttaagcatagtatccactactctgtatttacctggccaacttcattcattcacgctgtctgctgctcctcgaaaccaggtggtctgtcatctctgaaagagtggctcctatttgctgcgctttgcatcttatcctcaaaacagaactgtgagttaggtataactcctatttataagtgagtaataggcatctcctatttataagtgagtaaactgagactcaaagggaaaaactagcccaaggcaagataactaacaaatcaccactgatgactgagccttaagcctgcgccctaataagtttcattttacttggttctgtctgtgtcatctggcccctggaccttttctggaaagtctgcaaaggaccacctgagcccatgacttggactcactctttcattcgaacaacaagacaccttattggttttattacagatatcatcacctagccctcagcgactcaaggtgtcattattttgccttccttacacccactgtgttaatttctggaccccaggttttcaagccattgacaatttcagcgtgtctgtaatgtctccttagtaattattgaaggtacttgttatatttagccaagagaataactggggtggtactaggataacatctacgttcaaatagttggatattcaagagtcgatatatgtctatggttccgaagggcaaagccaggcagtgtaggtcctgcagaactccaattaatcagggctgcccagtaatcctaatgccaaacccgtgccccagaacctcgatttctccccagacaccaactccaagttcctccacggggatgtgggatttcagtttatgctcttgcgtccctctgcagccacaggccgcagagcccgcccccagggccccgcccccgctctccgggcgctggacgcgggacgccgtctcctggcaacgcagacgcggagccgagcgcgcccgcaggctctttgctcagagctcagccctacatagatcggcttctgccatggcctccaaacaaaccaaaaagaaagaggtgcatcgtatcaactcggcgcacggatcggataaatcgaaagagtaagggacctctgcctgtccgtccctcccctggcctagcccctcgacctcaccactagttctggggctgcctccctgcagcaaa

SEQ ID NO: 37190 - DNA, 2300 bp, Homo sapien
gaagctcctaaagagttgtgagccttcaatgtgcattacttgtaaccatcagtgacttagttatttgtgtgtgtgtgtgtgtgtgtgtgtgtgtgtgtgtgtgtgcgcatgggggaggggtgtactcaaaattcttttgcaatcctttaatatctcctagttaagagagtcattcattcattcactaaacacttttgagtgcctactatgtatgatcttggaactatctaagtactaagaattcaacagtatgtaaaatagaaaaggaaaatccctgccttccctattgggaagacaaatgaaaaaaaaaaatgtagtttttaaaaagtgaaatatatagcatgttaaatgagcaaaaaaataaaagtcaataaaaaaataaaacagtgaaggaagacagggagctttgttttgttttgttttattttggcagagaagtagaggttgtaactttaaatcaggtggccaaagaagctaacaggagaaaatgacatttaggtaaactcctgaaggaagggagagggaaaaccatatggatatttgagcagaaaagctttccaataggggaaacagcaagtgcaaaggccctgcggtgggaacaatcctgagatgactcagggagtggagagaaggctagtggaaggtaactttagagaagtaatacaggcctgattctgaagggcgtcctcggccttggacctagaggaatggaagccattagacaacgctgaaaagacctgactttggtacacagaagtaaagcaatcctattaaaattacatatgtaatatttatataaaattatatatgtaatattacttatatatgtaatatctaaaatttaagctagtaaaaggaatggattatctgccgggtaactggaaacctgcttatgagagaggttagaactaagggactagagattcacagacatgggaatgagtctgggagaagaattcacaaagaaaaagagtttaaatcctagggatcagtgaatcatagggatcagtccaatgtggaattcttcagccagggaaggaaatggagaaacaggcatcaaggatgtaagaattcaatttgaaatgattgattgcatcgccctccccatcaggcagagcatgaagaacatgaatgatcccactgaagcagggcgggcagctgggattctctcacagtgggaatgaacattagaaatggtgtaagttcaaacagccccaatcctatgctgtggataactggatatccctagggaaacagaccacagaaaataataatcatggggaagtacatcctaagacacaacacctaacaccagcccaggacaaaggcaccataaaaattccatgagcgagggtctgtttactttctcagagtaaatgttagtaacatgaactatacatttataatgttttaaggtttagaagccactttacgtctgactatatctgattaaagatcgtagtcgttggactgggcagatgcaaactagaaaatcaccattaaggtgaaatgtgtccatgtctgtctgtcactcgctgtctgtatcatttccggggccatgaagatgtggctttaaccagaagtatttgagatatgcctctttcttaggaaagctatggcctttctaactgcctgagagggctatgaagaagaggaggggtggcagattcacccatgggagctgaacacccaaagcaagaaaatcaggggctctgggaaaggaagtgagtcaagacaagcaagagagaaggatgagagcgagcacctccaggatctggtttaccagagaagacaagctgcgaggaggccactaaacttctgccctggcacagtttgctgcagggaggcagccccagaactagtggtgaggtcgaggggctaggccaggggagggacggacaggcagaggtcccttactctttcgatttatccgatccgtgcgccgagttgatacgatgcacctctttctttttggtttgtttggaggccatggcagaagccgatctatgtagggctgagctctgagcaaagagcctgcgggcgcgctcggctccgcgtctgcgttgccaggagacggcgtcccgcgtccagcgcccggagagcgggggcggggccctgggggcgggctctgcggcctgtggctgcagagggacgcaagagcataaactgaaatcccacatccccgtggaggaacttggagttggtgtctggggagaaatcgaggttctggggcacgggtttggcattaggattactgggcagccctgattaattggagttctgcaggacctacactgcct

SEQ ID NO: 37191 - DNA, 2300 bp, Homo sapien
ctcttccatccactttacataatttttaaaatattgttgacattacctgtaattagcctgtatgagtttataccattttactttttatatttatttttgtgttccagaacacaattatttgatattaaataattaaaacaaaagttatacacatgaattcaacttaaattccttgttaaaattttcaggagccatttttataattgaaatcagcctttttaggttctgtacattactttcagtcataatcttattaagttatctatattaatagcagataccttgtgccaagtaatatgtctacttagggatattactgttttaatttaactcttgttacaagattcaatcatttagtaaattaacatattctgtgtcttaatgtgacaagcttaaatactcagtcaattgtttaattccattcatgtcctttgacatttaaagttaaaaacaaatttttttggtaggttttagtaaattttcccaaaaatctatttcttcaaagtttaaaaaaactatattagctcttttagtaactttggtgctttggatagctgtaatgttttgttggattcaaagtgtgtttcttttaattcatagggaaatactgcttcacaagttatacttggaaaaggtaaattaataattttcctgtgacttttttcaatgtacatcaagatacagaggggcatctctgcttcttgacagcttcccttctggctctcagcagcctttcttcagtgtctcctttgatttgctgagtctagtctgctctgggctttaaaaaaagagataatttcaattgttaaattgaagctaaaaataaaaatgaaagagaatctgattacccacaaataaagttcatgtgttttaatgctgcaccctgtgatcgaaacactaaaaccactgcaaattccttagttcctaaataaaagacttggccaagaattgaattcaaaattatatatatatttttggatccagaagtctttaagaatgctatgccggccaggtgcagtggctcacgcatgtaatctcagcactttgggaggctgaggcgggcagatcacgaagtcagtagatcgagaccatcctggccaacatggtgaaaccctgtctctactaaaaatataaaaattagcagggcatggtggtgtgtgcctgtaatcccagctacttgggaggctgaggcaggagaatctcttgaaccagggagtcagaggttgcagtgagccaagatcgtgccactgcactccagcctggactccgtctcaaaaaaaaaaaaaaaaaaatggtatgccacattacttggtaaatataaaataaggctctagaaccactgactgtggggagtgattaaatgtgttactgaaacacatttgttgcaccagatctttcaagttttcatttccctttctgttgtctgagccaccccctcctataagaatatgtccatctagagcagattttcagtaaagaatctagctaatttgtgttgtaacttcacaatctctaaagaatctgtgagggccgggcgcggtggctcacgcctgtaatcccagcactttgggaggccgaggcgggtggatcatgaggtcaggagatcgagaccatcctggctaacaaggtgaaaccccgtctctactaaaaatacaaaaaaaattagccgggcgcggtggcgggcgcctgtagtcccagctactcgggaggctgaggcaggagaatggcgtgaacccgggaagcggagcttgcagtgagccgagattgcgccactgcagtccgcagtcccacctgggcgacagagcgagactccgtctcaaaaaaaaaaaaaaaaaaaaaaaaaagaatctgtgaacaaattcgtcaaagtaattctgaaatttttgaacaccctgatatgcatagaaattgtgattaaattctcctttgtgtatgaaatgtgtccctgtgtggacctccataaatgtatgaagcctggattatctcataaatattttcccaaaaatagactttgatatttaagtttccctttatcattttacatatttcaataacttgttatttaacaatataagatgtgtttgacatgtgtgtcttctaggcacagatgaacaaacagactttggattgggtgatgctcatcagagtgatggattaaacttggaaagagagatagtcagccagaccacagcaacacaggaaaagtcacaggaagaacttccaacaacaaataatagtgtttctaaagaaatatggttagattttgaagatttctgtgtatgctttcagtaagtatacca

SEQ ID NO: 37192 - DNA, 2300 bp, Homo sapien
ttccagatgatttttcaaacaaatgagtgaataattaagtgaatgaataaactaatgcataataaagaagccactatgtatgtccatagtgacacacatctagaaggcataaaatgcatgttaagtgtgttcttaaatttattaaatcagatacatctatgtatatgaaataaaatctttttgccaataggccagttttatcagcttaaaataaaacatggcagatgcaaaacttatattcaagcactttgggaggctgaggggggcagattgcttgagctctggagttcaacaccagcctgggcaacatggggaaaccatgtctctacaaaaaatataaaaattagccaggcatggtggcatgtgcctgtagtcccagctacttggaaggcagaggtgggaggattacttgaacccaggaggtggtggttgcagcgagcctgagccaagatcacaccactgcactctagcctgggcgacagggtgagatcttgtctcaaaaaaacaaaaaacaaaaaatatatattcaattattttcattctgtggtttttgctgacattttgataggagaagccttacctccaatagaattctttacatatattgaaaaactttcttgtaaaaaaaaaagaatctatttaaaacatttaatgataatatttaaaatgtttaagcagtaaaaacgtcagatacacaatggtttaaaaaccctaaattacatagtttaatgatagttgtctaattcaatgggttttttcctcattacaaaacatatgcattcgtcaaactcaatataggatgtcttgcttcattttgtgctgctataatggaataccaaagactgggttatttataaagaacagagatgtatttcttacagttctgaaggctggaaaatccaaaatcaaggggtttgcatctggacagagcctttatcccatgaggaaggtggcagggcgagagagcacattcatgaaagagagagagagagataaaggagggatagagagagccagaactcatctttttatcaggaagccacttctgagataactaacacactctttcgataatcacattaattcattcataagggcatagccctcatgagctaatcacctcttaaaggttccacttctcaatgctgttactttgggaattaagtttctaacacataaagttagggaaatatattcaaaccatgcatatggtaaaatatgcttttattgtccatatatgttgtaaaaatttacatataatgattttacttccctttttagagactgaaaatatgggcaatttagtaatgtacttcatagagtttgtgttcaactattcaaaatgttttttaaatggtgtttgcatttttttcactcaacatatatttattgaataactcttgattgcatggcaatgttacatattttggccttatagcagtcaatgaaacagacaaggtttctactctgatgaatcttgtattctagtgagagtaagcatataatagacaagtaaatatatgaagatatcaatttcagatgctggtaaatactatgaagaaattaagataggataattagaaaaagaatgttagtttctgatacagtaaatttgaggctgttaataaggattcacattttcttggcaaattatctacttttaaaccatttgcagataatgcagtagattgagatctaataaaatcctattagccatttttctttacaaaaattggatggattactttttctgagataagatctgtcacaaaaaaagttttagtgtgacagaggtctccttatgtaaacactttgatgactatcttaaattaggtcaagcaatattctaaaactttaaattaaagatgaagggaaacagcataacacggtgagcagagctcttgactagaagtttgtagctcatattttaaacctgagttttctgctaatgaagcctatgactttgaataccatcttacttgtgagtttcaacttcatttgtgaaaatgaaggctttggacaagatgatctttcaggcatcttaaagcttaacgtttttattatttattattatttttagacacaaaagaaaatatcagtgttgcagatactcttcaaaaagtttgggctgtattggaaatgaatttagaacagtatgcagtttctctcttaaggtaaagcagtcaaatgatatttttattgcagtatattgtccttttgtcaaagtccagtttgaatactaccatatttgttgagagcgccccagtcactgcagctagaaccacaccattacttcggac

SEQ ID NO: 37193 - DNA, 2300 bp, Homo sapien
aatagatgataaagcatcctgatccattgaaatcacttcctgtaacgttcttagaggtttttattttctgatgaagaaatttgctacagtttaaatctgatcagaagtcagtacattaatgaagctgtgtgtatgcatatgtacagagtaagtcagttaagtaaatggaagatgtcagtcattcatatttttgtgagaatattggttacatgtaaaattgtgggaggcagaagttgaaaatgaactatcaaaacatacgaaaacctaaataatgtgagaaaaattatctagaaattcctttacttaaaataggataataaagaagccaaaaaaaaaaaaaaaaggctgggcgtggtggtgcgtgcctgtaatcccagctactcggaaggctgaggcaggagaatcacttgaacctgggagatggaggttgcagtgagccaagattgcaccactgtactccagcctgggcagcagagagagactccatctcaaaaaaaaaaaaaaaacaaaacaaaaaaacaaaaaaagaaaaacattcattgatgtgaaaatacacaaaacgaggttgcaacgttgttgttgttgtttttccccagcccagtacgtttatgagtcagacacattctgctgataacattgactaacacgcgtgaagggggttggggaggggagggtaatgggagatctgcttgaacaggttgctcaggtaatcctgatgtgcttctcttccctgactcctcccattgagaattacttgtctatatttcactgtactcaaaagtatagatgcactaatggaaaattttgcctgtgataacctgttataattttataacaaagatgttagttaattgacatccgcctgaaatacttgagtgtgatatgtgcataaattacactctcatctttattagttggaaatgatgtaaataacatacaggattaaagcctacctggaactgaatcccaaccttgaggaagtaacagaacttccttggttctcagtgtctagagcaatggggatagtgccacatctcatataattcttaaggacattcagtgagaaaacagataaagagttcctgctattatatctggcagatagtacttgctctttgcctcatctcggtcagtcatccatagttaaacttgagtaactcttattgagcaagctgttttatttgttacatttctgcagttggttttccttttaaaatctggactggggctgtggattcctgaacagagctggaccacagctctagtgtggtactctgataggaacaagagccttttgggaacaatacattcactgaaggtggacacagatggtcacaggtgaacattgtgggcggcaaggtcagagaggtcaatgcttccaggacaaagctaggggcctatcctgtgctctcttactgccatctcttccacgtttttctaatcttcacctttatcattttttttattttcacatattctaacaaaaatgctctcaatccatgataattttcttggctttttttttttttgcatatgagaaacatgctgctattctgaccatttttgtgctaatcattgattgctgctcacccacttgagatatggttaaatagttaccatggactgaattagccctttctgtttattgttgaggaagaacagataatttcattcctttgctatctcagtcatttactatttaaggtcgacttttcagaattttgttcaaaatggttactttgagtcaaatactactttttcagtggaactgcttcttggttcttcactggaacccacatctactcttccatcttcaaataacaggaaaatggaaatttgttcctgttgcattcttcaccctcagaattcatctgttgtgctgggtcatccaattttctattcttcccttccccaaaagaagtggcataatccagtggatgtctaacttaacacacaaaggcagagaaaaatgggttctagtttattccttggttgttgggaggtggaggagtttgacttactccatgactcacttttctcatctgtgtaatgaggatagtcattctaacataacttcctccatttcaacttcctgcctggacacttttgttggagcctgaatgcaagagccattctcactgggatgccacagctctggagacttcttatagatgttgtttggaacactccaggcttggagatgggcctttagacactgcctgtagtactgcttagcaacagctctacagacataaagagattgcagtggctgctccttcctggctccaccattcagcaag

SEQ ID NO: 37194 - DNA, 2300 bp, Homo sapien
agttctgtttttaatttttaagggaaactcccatactgttttccataatggtggttttccataacattcataccaatttaccatctccacagacatcacacaagtgttcccatttctctacatccttgacaacacactttttcttttgactttttgataacagccaccctaacaagtgtgagataatatctcattgtggttttgatttgcatttccccgatgatgagtgatgtcaatcttctttccatatacatgtcggtcatttgtatgtctttggagaaatgtcaattcagttactttgcccattttttaattgggttatttgacttttggctattaaattatatgagtttcttacatgtttggatatgagtcttgtacgaactgtacggtttgcagattattttctcctattctgtaggttaccattttattctgttgattgtttgctatgcagaaacttgtttatttttgcttttatagcctgtgcttttggtgtcaaatccaaataatcattgctgagaccaatgtcaaggaaaatttcccctatgtttgtcttctaggaattttacagtttcacatcttatgtttaggtctttaaatcatttggtgttgatttttgtgtatggtgtaagaataatgggtctaatttcgttattttgtttgtggatatccagtgaggtaaacatcatttattgaagagtctatcatcttcctattgtacattgtcatttgtaaccaataaagaaggaaatgttttcaggtaaatattttctgaattgctaaatgttacactaacagcaaagtcagtcatcaaaagtgttcatggagtcagccacaggattatctgctttctgcttcaatgaattctacataaaggaattcttgctcagtagaatgatgatgcaattttcaattttggtcacaatgagcaacagggaattatctttaatttctgtttaaacatcataaacatttggagttagccctgacttaaaatgccagctgtgttctgaactagccgtgtgacttcaggcaagtcactttatccctctgagcttcagttttcttacctgcaaaatgggaataatagtacccactttcctgcttgtattgttgtgaggattacatcatctagataatttacgtgaagtctttagcatggtgtctggctcatggcggatactcagtaaatatttttaaattgttgtttgcacttttattgctgtaattattaactcgacctgtgagtttttcatagaagggattatgtcttaggcatcttgtacctaatgtccaacatgttgttgtaaccccaacacctagctcaagcatgtttacagaattgagctaagatcctcttgagaatgctaaatgagaagaacaaaggggctgtgtaataaagaagttcagcctttgtaattattcagccatgtgcttctaattcaggttaaaaaaatttgaaggccaaagaatctttttaaacatatcttacaaaggaaggtagatttaactatttaaatggagtcactggcaaacatgttctaggaaaataataatgaactagtgcgatcaaaaggtgatctttactattgctttgttaaaaatagtcttctcatctaaaactgtttttatatatgcaactttgtgagatctttttataattcttgtaatggaaaagctagaatgatatgttattaggaatttatcataatatataatatataacattacctgacttaaggaatgactaaatatgtggaataattagctatgttatagtgagattctcttctttgtggattacatgaatgctttagaaggtcagtagcattactatttctactggagaactttcatttttaaatatattataaaaatgactttcaataatgacataaaatatagaactttttttattacaggaattataaaacatttttgcaccaactatgattgtaatttaggctgaaataatgccagttattttgctactttgctgaagtccccttttttgagcctacactgaacctgtaatacttatggaaagagttaccatagcaacctatattgatgtcacaagctcaggcttctgacttcattgcataatgcagtagccactggatttgcagcagaaacactctgctacagaacaagtgtcttggttcacagcaaagaggacaaagaaaacagcaagttttagggggttgaatcctggattgtgagtcagattacctgagttcttattttaaccctccctctcacttgttgccttgttttgagtaattgtgtttacatgt

SEQ ID NO: 37195 - DNA, 2300 bp, Homo sapien
ttttccccctccagttcatgctcataaatttctaagaaggtggtattaatctcattttaaacctgaggaatctgatccctagaaaaatttaaaatttgcccaagattacacatattaccatggcctggactgaagttcatggctggctgacaacaaagcctatattttcccactacaccacaaagcctctcaacaagaagttgtcttttttttctagaaagttttataatccaatgatgaaaaattatccaatagatttattttagacctaggtaagtaaaaaggcagatcatacaattctatggggttgtgatctgtctgttttgcaatttccccctgtggaatcacatgtacttttaaaaagctctcaaggtaattctgaggctctcttccccattgtcttccaatggtctttgcctcctgttcgctaggtctgctcctccttatccggcatgatctatggtgggcgtcaccatgtccaagccttcctggccagttaagtggccctctgccgtcctccttcattattccatcattggactcatcacatcgttttacaattactatttatgttaaaagtcgtctccgttagaccgtagtgagcttgctgaaagcaaggattgcattttcgtgtctttagtacctagcacaccgcctgacaacaaaatgttagagaactaaattaataaaaaattcagagccacttggaaatagtttaggaatgtcctcacatttgttttcttggtcgttgcacccagcgaatcaactaattcaataaatattaaacgacaaatcaaaattttgtaggttccaaatgcaagacatcgtcctgggatgcggaagctgcagagtggactacatttcccgaaatccctgggcccagtcgtagttggttcgctgactgcttttgaatgctggttaactcaaccaatagggtgacgagaatttccctaaaggagagggagccgacctcacaaagaagagggcgggtgcttctgacaggtttggaacttaaaaaaaccctttgtggcggttccgtggcttttccgcagaccagagcgcgcgaggagtcattcgctaggaacctgtccccctctccccgaattaggattagtcttcctgcacttccttccttccttacgtctttcctatttccacatccttcctaatcaagtacctgtgcttccgtccacctgtcctgttgaacgcactctccggggggtttccccggcacaatctcttgtctgtcttttccaacttgagccaggcatttgtctccaagcattcacgcgagatgggcagtgcggcctcggaaagatctgagcaaaaacttcatcctatccccctttccccgttctagagtgaagctcccagggcattactgagtggctcatcagcgtcagggcagattgaaggttctgaaaaatagtggcagcgcggcgtttcctgccacccgcgctcctccccggcgaggggctgggtgcggggtagtgtcatcggcccgggctgacaccggccctggaaccgttccccgctggcagcctcttccatcccagcagctaactgctaagaccagacacgttccaccaacagtaacagctgtaggaaagaacccgttttttcccgtctaggtttctctccttttcctagtacctaagtccatcatcctcctgccactgacatatcgttgtctagacgctctttttcaaaactcaaatccaatcaaacaaaaacaacgcccgtcaataaagcaagaaaaataatactgcagccagcggccaggagcgtgcaccccattaacggcgagaaagcatcaacccctgctgtaatgactgaattggaaagaaaggtttcctgctgcttgttagtcgtcaacatttttactatgccagctgcaagagaagcagctgcatactctggcaactcgactggggtgggagaaatttagccagcgtctgggattttcgcagaagataatttaagccccagcttcgctcgggctggggggctgggggcctgctgggccagggtgggggaaccgggctgcggcgcgcatgcgcaggtaccgcagcccggctcctgggaggccctgctgccgccaccgccgcggcccgcgctgtaaccgcggctgccgctgctgctccgggcgggcgttggtgccgtgtgccgaggcgccctgtcaggcgatggggagcggctgggcggggagagccgacggccgcggcggcgcctgaggaacgcagccgggctcgggagcggcgagggcgggccggtccagcggcggaggagcgaggcggggc

SEQ ID NO: 37196 - DNA, 2300 bp, Homo sapien
gaacgcagccgggctcgggagcggcgagggcgggccggtccagcggcggaggagcgaggcggggcgaggcaggcggcgcggggacccacaccaggcgccttgtgtgcgaggccgagcggcggccgcggacagagagccggcgacccccggcaggaggagaaggagccggaggacgcgccgagggactgcggggccggggcgggcgagcagcggcgcggccgcgggccatggacgcagcggcgacggtggcggcgccgggggcgagccggggcggcggcgcggcgcagagtccgcccgcggccaggtgaggctgggctgagcgggctcgggcgccgccgccactgctgctgctgctgctgccgggccgcggagcgaggcggcggcggcggcggctgaatcggcaccacagcagccgcgccaagcagcggcggcctcggaggaagaggggtcgccgcccaggtttcttgcggccgccgctcttgtcgtcgcagtatttcctgttcggattatcttttgcttccccccagctgcctccttaccctcacactcccactcctccgtttccgcggtcgaagctgccttcggccccgggtggtctcccccgcccggggaccccctgtgcctcccctcccgggctgcgggggagcccctccgagaccatgaggaaattcaacatcaggaaggtgctggacggcctgaccgccggctcgtcctcggcgtcgcagcagcaacagcagcagcatccgcctgggaaccgggagccggagatccaggaaacgctccagtccgagcactttcagctctgcaaggtgaacggagcgcgcagccccgcgacaccgtcattgaaaaattggggttgttttaagggggctactcgggctttacatgggaatgcaagggaagagaacgccaataataataataataactctaataaaaggctcgctcctcccttggcaaacgtttcttcggtgggttgttttggagattgataccttactccttttcattgatttttctctctcccctttgcacatgcagcaatcagttcaaggttgcttcaaactattatccgacctttaatcgtattctgacactgccagtaataacctggaagcttttatattcaagcgttttaatatgattcaccaacttcgaagtttcctttggaaacggtgtctaatgaatgttgtttatcaaaaagccaaacctgttctaccacacctttgctcatcacttttcccttaaaatgtggtgtaagtggcttacgatatgaaatcacagggttctttttatcattatgtttgttaaaaagtactgagatttttgcctgttaatggcacgataattgccatagcgttctgtaattcagaaagaatgatgcagcgaattaagtcaccagctgcttaatgagaaacacaaacttgcctcggttttaatacctgcctttctcataaatagccatgtatttgtatgtcagagttaattaaaagtgtgcatatatatatatatatatatatatataggtctaatgccctaaaatgattatggccttaatagtaaattgcaaaaatgtatgttgtactcatcttcattctgttacaagtgtaaaatgttgggatagaggtttgattattgctctactgaatgcttgactaaagtaattatatgacagcttttccttagaagtacttgcgttagcatccaaataaagtaatgatgaaatgaatactgccaaaataaagtatgaattgcatttaatgggtttacagaattttggaccattgcaaactttagtcatctggtgtcggatgtagtagtatagaatattaataaaagattttcttctatggaataccagtattatggaaaagcgaaattaaagtatatcactggactagatttttgtttgtttcaggttctatgtgaataactttgttaatgtaggtttcacttattttttcaaaagcagtaagtgcatgtgtatgtgttttgcatcagtggtagtggttctaaattctaacgcctctattgactttctattttaaaatttcgcttgctgccttggttgctgtgatgtcacttgcccatccctagactgttcgccatggatttccctatcaaccctcagccctggcctttgatcctgtacagaagatcctggcagtgggaactcagactggtgctttaaggctgtatcctttctttaattttattttttaacttctactttgttctccccagtccttctgtgttgctgattagttccaaagaaagtttttattttcctgttggtgtga

SEQ ID NO: 37197 - DNA, 2300 bp, Homo sapien
gtatagtaacctaacagtttttacaaatacataacaaatgtagactatgagagaaaaagtatatcaagagaaaaaatttatccccatgcatttttcaagaaaacgctctaaaaactggtagaaatattaaccatttataactattcatagaaaattaatttgctacacttctgctaattgtttttctacacggacatgccaaaaacaaccaaattcagattgaaatccaatctctaatttattagaataggtcataagttcaatatctaccatgcataatatttttaaaagtaattgtctttaaacctcatccttaacatacctcattcatcacaccaatagtatagaagcagatatatttttccttagaaacttctatctccttacaaataaaatagttatcataaaaaaactttagacctctatttggatatatgtttagctactataaactaggagctgagaaacatcacagcagtatataagctgaattataatcaagggaaaagccaacacatgatttctcatagtatatatctaatcacaccaacaggaaaataaaaactttctttggaactaatcagcaacacagaaggactggggagaacaaagtagaagttaaaaaataaaattaaagaaaggatacagccttaaagcaccagtctgagttcccactgccaggatcttctgtacaggatcaaaggccagggctgagggttgatagggaaatccatggcgaacagtctagggatgggcaagtgacatcacagcaaccaaggcagcaagcgaaattttaaaatagaaagtcaatagaggcgttagaatttagaaccactaccactgatgcaaaacacatacacatgcacttactgcttttgaaaaaataagtgaaacctacattaacaaagttattcacatagaacctgaaacaaacaaaaatctagtccagtgatatactttaatttcgcttttccataatactggtattccatagaagaaaatcttttattaatattctatactactacatccgacaccagatgactaaagtttgcaatggtccaaaattctgtaaacccattaaatgcaattcatactttattttggcagtattcatttcatcattactttatttggatgctaacgcaagtacttctaaggaaaagctgtcatataattactttagtcaagcattcagtagagcaataatcaaacctctatcccaacattttacacttgtaacagaatgaagatgagtacaacatacatttttgcaatttactattaaggccataatcattttagggcattagacctatatatatatatatatatatatatatgcacacttttaattaactctgacatacaaatacatggctatttatgagaaaggcaggtattaaaaccgaggcaagtttgtgtttctcattaagcagctggtgacttaattcgctgcatcattctttctgaattacagaacgctatggcaattatcgtgccattaacaggcaaaaatctcagtactttttaacaaacataatgataaaaagaaccctgtgatttcatatcgtaagccacttacaccacattttaagggaaaagtgatgagcaaaggtgtggtagaacaggtttggctttttgataaacaacattcattagacaccgtttccaaaggaaacttcgaagttggtgaatcatattaaaacgcttgaatataaaagcttccaggttattactggcagtgtcagaatacgattaaaggtcggataatagtttgaagcaaccttgaactgattgctgcatgtgcaaaggggagagagaaaaatcaatgaaaaggagtaaggtatcaatctccaaaacaacccaccgaagaaacgtttgccaagggaggagcgagccttttattagagttattattattattattggcgttctcttcccttgcattcccatgtaaagcccgagtagcccccttaaaacaaccccaatttttcaatgacggtgtcgcggggctgcgcgctccgttcaccttgcagagctgaaagtgctcggactggagcgtttcctggatctccggctcccggttcccaggcggatgctgctgctgttgctgctgcgacgccgaggacgagccggcggtcaggccgtccagcaccttcctgatgttgaatttcctcatggtctcggaggggctcccccgcagcccgggaggggaggcacagggggtccccgggcgggggagaccacccggggccgaaggcagcttcgaccgcggaaacggaggagtgggagtgtga

SEQ ID NO: 37198 - DNA, 2300 bp, Homo sapien
aaaaaataagcatatattaatagtttttgaaaatgagtctagataaataatttaggtttaataatgactaatagagagaatgggaaaattagttataacagagttatggggctaattagaattatcaggctggcaactgataaatgtgtgtatgggagctatggtttgagaatgcatcagccaaggttctagaagaaattaaggcatgatttgagtgacttcgcagttctctcaaaagtgatttgtattgagtacaattcttgatgcgttcttgagaatttaatccattacctacaatggatgcctcaaggcattaagattctctgtgggagcttctattgagaaggcctggttaggattggaagtcaaagcaatacattttagagactttaatcagcagaaagccagagagaattttatgaaaattttatttaggagataaagttttagggaggtataaaagttaaatttagtcaatgtttatttttattgcaggttaattttcagcaattcacttgggtcttaactaatccaattaaaaattccatgagacaattcaattatatgatgtgtaaaaatgttagaatttaagattttgttatttcactaaattaaaaaattatgatgtagcaagaaaattatctttactatgccattaataatcttaatatgtattttatttccagggagccttttattattttatcaggaggtttgtcatatgatactgtaggaagaagaccttgcttaacagtgatgcatgggaaaagcactgctgtgctagaaatggactattcaattgttgattttctaacgctgtgtgaaacaccatacccaaatggtaagctttgcaactttaaagctcattctctatagagagctgatattaaaaaaaaaaaaaagacctaggttgtttagataaaactactcatcctattgtgctaattcttctggagaagagctgctgcattcataatctacaaactttatttcagaagtggtttaataaatttaatctgttttgaagaataaaaaaacgctattcatattaagaaacattttaaaattctgttaagatagtaatgtattagtaaggattctccatagacgcacacactcataggagagaaagtgattgattgattgattgattgattgattgattgattttaagaaattggctcacactgttgtgggggctggccagtctgaaacctgtagagcaggctagcaggctggaaattcaggaaggcattcatgttgcagtcttgagtctgaaatctatagattgaaatttcagacatggtttctatgttgcaatcttgaggcacaattgcgtttttttcaggaaacctcagtttgtgcttttaagacgttaaactgactgaatgaggcccattcgtttagagggtaatgggcttgactcagaatctactgatttaaatgctaatcacatctgaatatatgtatatatatgtatatttttttttcacagcaatgtctagactggtatttgaccaaacagctgggggcaccatattatagacaaattgacacatacaattaaccatcagagctagtgtatataattcaagaagaatttaaatctggaccttttttcacttcagttgaaattcattgaggtgtaaagatgtaatgtattttacagttattgacaggcacatatgaaacatccaagaaagatagtattatagtagaactcttttgggttcctgtgagattaaatgataactgttcttgtgtgtattcagatttaaattttagttttgttgtccatgtgcagctttgaaatttgcaatgccatagaaatttctgtcttactcatttttacaaaagtaaaataattttgaaatggtcagtaaatagatgatctcataaaacttactagccttaaataacatgcatgaagtatcataggatcagaatgttaaatactcaagagaatgaaactaaataaaatcaagcaagaaacatttatctaatttgctgtccacttgcatttttgaaactataattcatgcattgtccaattccagattttcaagaaccatatgctgtggttgttcttctagaaaaggatttagtacttatagaccttgcacaaaatgggtaagaaataaaatttggtgagtgattctatcagtatgtggttgaaaaaagatgccttttatcatagcattagctatttcatttctttgaaaactctacatttatatccataaccttgacctcttttgagagctccagactcacatatctacttactcaaatttctctat

SEQ ID NO: 37199 - DNA, 2300 bp, Homo sapien
ttatctcttcctttctaaaatcctaatgacaagtttagttcagcatggatttaactattcatgaggtttgggaataggtagtcatacctgctgactagtttcacttgtagttctctaccatcatctcaaacttaaccccatggtctcctaaaactacctctttatccctccctccctcccttccttctgtctgattgtacattcactgtttcttcttttcttcctctaccctacctctactcaacctccaattcattcagtaaatattgagtacctcttttgtgccagtgttaaaagtattaatagctgcaaggtttctgccttcctgaaatgtaaagccttgtctgttcttactccattaatgtgtttcaatctccctttttcttgtttcacatcagaatcacaggaacttcccaattggtgaccctgttctacttcgtcttacctatgttcaccaaattaatcttccccagatatttcttatcaaccttcattggcctttaattcttcttttttttttttggagacggagatctcactctgtcgcccaggctggagtgcagtggtgccatctcagcccactgcaaccgctgcctcccaggttcaggcgattctcctgcctcagcctcccgagtagctgggattgcaggtgctcaccaccacacccgggtaatttttgtatgtttagtagagacggggtttcgccatgttggccaggctggtctcgaactcttgaccttaagtgatctgcccacctcggcctcccaaagtgctctgattataggtgtgagccactgcacccagcctgtcttaattctttaataatgaaaatatattacctttgtctaatttgaccatctgcaaagtacttttcataggcagtcacaagttcctcacattgtgactaggtagtaatactcccactttctaggtgaaaagacagctggtgagtaacagaatcagtactcaaagtccaccttgctgagagttctttctaccaacatcaaacctttgtggacaggacttgaagaccctctaaagtctggccctggcctgtcttgctgtcttctcacttttactacacactcctaccactgtggccacacttaacacttatcaatccttgaacatgggttttctgtctgtgttctgcaagagcattttttgtagcattatccagcaattattaaaaaagagtctctgcgaacaaaaatactgtcacctcaaagtcaaggtagatttgttttacagtgaaagtaggtgcacacacacacacacaaattgctcatatttgttgtaactcatttttttaacttgtttttggacagtttttcgttatgttacttcatgtttttaagttttgtggggtttttttttggtttttttttttttttttttttttttgagacagagtttcgctcttgttgcccaggctggagtacaatggcgcgatctcggctcactgcaacttctgcctcccgggttcaagcgattctcctgcctcagcctccagagtagctgggactacaggcacacaccaccacgccaggctaatttttgtatttttggtagagacagagtttcaccatattaaccaggatggtcttgaactgacctcaggtgatctgcccttctcggcttcccaaagtgctgggattacaggcgtgagccactgcacccagccatttttaaacctgcttttctaacttacatttttttctaacttgatttgtttttctcttcttaatccttggactgccgcttctcctcagctttctccccagccctccctgccttctttcctttctccctcttcttcctcctcacctcttattttctccttttccttcacccctgctgtcctcccccactttatatgtagagtttgcatatgagttatttttgttaattacatacttagtccctccaactaggttaaatgcttctagaaaacaggattctgatttttatatatttaagtatctagtatcgtttcatataaaaagttatttataatcatataggccaatagttgaaaatggtttaaagataccatgttttcttttattttagagttaaaaactcaccacttaaacagtctccaggttatcaaacagaactagttattcagttggtttgggtgggtggagaaccaccacaacaaataaccagcctggcagtcaattcttcctatggactgtaagtataagttacgtttttttctaagtctcttcatagtattccatatgtcattttgtttttaaaaatagaaaggatggtctttgttatatcgtcaccta

SEQ ID NO: 37200 - DNA, 2300 bp, Homo sapien
ttttctaagtctcttcatagtattccatatgtcattttgtttttaaaaatagaaaggatggtctttgttatatcgtcacctaaaatggcattctacaattttgatttcagacgaaattgactgtttatttggaacataatttcattctgaataacttactttgggtatgcatgcagtatttcctgatgtaaagttaaatgcctcatggaccaataaattatttgtgatgaagttttaaagtcagtatatcctctcctaaatatactcccagaaataattttcttattaataattactataatggaaatctaacaatatgaacccagaaaactgttataaaactgatttttgtaaatgttgaagtgtagttgtgtaatttttctttctacttccaattaacttgtataaattgtaaaagcatgacaataattaatattcatttatactgtagtatactgttttatcaattcatgccttcagccatatagtgttaattatacatatttttattacaatatgatagacttataaagcatttgttattttcttgtttcagaaatcaacactgcagtgtaagaaactgcttcctaactgttcagtcccagagctatttatcatgtgtagttcattgtctccttgcttgatgctagccctagggactcattcattttttttcttgctggtagctcccaccacctattctgtctcttgcagctgtacagttagccctctgtatccacggattcaaccaactgtagatgaaaaatattcagaaaatataaccaaaaaacaatacaacaattaaaaaaaatttttaaatacaatataaaaactatatagcatttccattgtattaggtatatgtaaataatctcaagatgatttaaagtatatgggagactgtacattggttacatgcaaattttatgccattttgtattgaggacttgaacatccgcagattttagtatctgtgggggtcctggaaccaagcttctgaagaaaccaagggacaactgtacatcaaactaacactggctacagtctgagatagtcttctttcatatcttttatttgctgccacacaatgtaagagcacaaactttcttcttttaaatatttattttccacgaccataaagaaaacataggaaataagaaaaagaaccaataggaagtttcaaaggaatctattacagacctcactaggcttacagttgtattttgtttggccctttctgtgtatttttagaattttaattagttaccaagactatataaatccatacttagagctccaacttaaaaatctgattatgtggccgtgtccgtgtttctccatggcagcttcatctggaactgagttgaagcttttcctcattagatgtgccatacaatcttaagtaaccatgatgcttacatgtcctcttttacttagttatatagctctctatacatgtcagttctccattcctggcttaaaagatcttaaaagaataaatttcctttattcatagttgattggtttatagttcctgactcataattgagaaggtatttagaacaccccaaagggcctccaagatgtatgctttctactttttattcttgacttgaatgattaccaaaacttaccccaaagtataatctcctactttcctaatagaagggaatgtctcccacccatgaagagctcaaaatgcccccaaggtagaaaaatagatgttgcgttgtgagatgtgagagatttatatctctgatcaagtttcaactcctatgccaaatatttttataaataatgcagttgattgatttagtgatattaaataatgtctgcagaagatctaaacagttccgtgagtaggcatatgtaacctgtatttcagttcctatagttgtcttttgtttcaaagaattttctgaaagacccaccatgcttctttcttcagccttatagactgtagtacatttttttggaattatttgtttgtgctaaaatgtttgttattttcctattcccagggtggtttttggcaattgcaatggcattgctatggttgactacctccagaaagcagtgctgctcaacctgggcactattgaattatatggctctaatgatccttatcggagagaaccccgatctcctcgtaaatctcgacagccttcaggaggtaaaaagaaaagaaaagaaaattctgagctttaggatttctataaatgctggcttacttttgtgaatataagtattatagttaggtaaatagcttgcctgatttagtctgtatatataaactgcca

SEQ ID NO: 37201 - DNA, 2300 bp, Homo sapien
cccttgtccttgttctcattaattcagctaaaggtggatttgaccaaaataatgctggttaaatttgtagaaatgttgaaattggctgtgttttaaattttgcttgaatttttataaaatgtttaaccaaatgtacctttgcattctttaattaaaattgcttaaaaaaaaactttcattatttcagtaaaatgctcagctcccttttcaaaatgccctttatttgctaactgttccaatacactcaggtgatgagccaattaaatgttagtgcacatgctatcgcatggaaaattacaagcatctgttgtcaataattatataagagtttagtctgatgacctacaaaatattttgtgtagaaatatactataaatctgtacatatcctttcaaggttttaaaaaaccaaaaagaaaggaaaatatgtacactgtgataactaaattatttctgtattggaatataatacaatttgagaccagcaatggacaatgaatgattgtttcatagaatagcattacgggcaggaaagaaaccacctagtagatctagaagtaagcaatctcagaatacagactaatctgagattattattgattgttgttaaagcaacccagcaaaagcaaaatggaagcattaaaattaatgttaatgaaatttaaatattgtcttctataaaaaattcctttaaatgattttgttttttcattaagagataatcagagcacaaattgatagtaaacaggatggttgtttttctattctatatgatcattaaaggaatatgtaggacatcttaactttttcatacagtctgttatgcatattttcctctacttttcattaataaagcttttatgtttacattttataacatgcactactagatgcaaaagtttacatcaaagtttactttaaatatcatttggtagggactaaatgtgtgtgatagagataattgatcaagccaaaagaaatattttttaaataagcccttttcaaaagtttttgaatttatagaaagcaccaatgaataacatatttctgtttcgttaatgtcagctgcctgaacattcagcagtttataaattgcttaatttgtgttatctattatccagtaaacccatagttccatgatatgtcacaggaattgttaggtcctattttaaaggtacagttttgtgaatgtcatcaataaaatcaacagttatggatttgaagaagttgggaaagcattatgtagattaatatactggttggttccctatctatgtggaaggtcatattagctgcaattatttaatttgctgtgttattttgtgttatataacacaaatatatttgtatattaacttcatttttactgtcatttttcctgttgtatacaaaatgaactaatcttgtaattattttcaaatatagaagtatatacattagatggatttccaagattttgtaagaaaatcttaaatcagtgttttgagttatttaatttttaaattaatctacaaattatgcacaacaaactagagactcagttaggattagaaagcttaaagtatgtttgagtgtaggaaataagcttctcagagttatacttgattctgtctgtagataagagacagtctacagtaataactaacccagggaatttactgtaatttgagaggtaacatctctatttttttctttttaaatacagaaagtaatagtcaccagcaagccacgatttcaggaaaactgactaaaaaaaaaagtcaaaatagaaaatatcagaaaaatgaaagatttttgtgtgccctctccatatcctcattgtttttgttgcatttgtccttgactctaaaatcactgaagtattcatgattagtagtttgtaagtaggaagtggtttttctgtatgtaccatatatccagttcatttcagttttcaaactaaaatccatatgtatttgctgagaaagttatttgaaatcttatattctgacaaattctgtacattacatccatttgaagttttgcatcatcttaacacttttgctttgcatttcaattgtacaaagtgtttccaaaaaaatggttatagattcgactgagctattactaacttctccatttgattttttatggatgtgaaaaatgctgctacttgtctatgttattatgtgtaagtatattacaatttaattaagtacaatagtttaaagaacgaagcaatttttttttttttggcttagaacttcttaattgtaggttcctctgaagcgatttcatgtagatatgtgagtgttttaaaca

SEQ ID NO: 37202 - DNA, 2300 bp, Homo sapien
ttaaaccaataactcctattttctgcagatgatattactggcttccctatttcaacttccatatttgatttaattaaattagagaattattagcaaacctaaaacactaaatcatagcagtaatatacgagagaaattgcaaaactagttggcatgccctgtatatgaggaagattttcaagtattgctcctttcaagacgcttgattaggaggctatgattgcaatcactaattcttttctcaagggtcacgcaattgttcagaaggcctagaaattgtaattacaaagcaaaatgagggatgctggctggctgatggtcctttttctgaaatccaatcctcttttaaagtacactgcattccaataattgcttttcatcagtcctccatttaatagtaatattttatgattttgcattttcattgaaaactcccattagtccacaaatcatttagttgtgtgagttttccagtcatcaaaagccttgttttctacttccaaacctcagaatttctacaattttagaaatagtgtagtcaatctgtttccttggcagccacatttacttataagtgcacaggtcttgccccttaacatgctgctgacacaattcctcacctttgacagacctttgctccacaaatacagaaagtgaatgaatgacaagccactctaaattctgttggttgctttactattggagctaaaaagtgatgactaaaagaatggaaggaaggaaggaaagaaggaaggaaggaaaggagggagggagggagggagggttgcattcaggatttttttttttttttttttgtagtggccagagagaaaagagagggtaaagtgttaacagtaattttaaacgtagattattcactgggaaactaaataatggagagtttagggagacagagggtacagagtacagagaatatacaataaaggaaatagattttcaaagttcatggctgtgcattgttttccatagctactaaaagaaaattaagtcagttttctccatcacagcagcccatgagcattcctctctgagttaacaggttataaagaatacagaagcatttctatatatattaaccttccaagactttctctgcattctatgttcttctgactgacctatgtttcagccctggatatgggctatgctgttatgcagcatcactcacctgtgacactgtcatcataaaaacatcactttaaacctagacttcaaatggggagatggtggagcttgggcactggtgtgaaatgtctgggctcggacctggttccattgcttgtcagctgtgtgatggagaacaaatcacttgtcctttcttgtgtctcagtttcttcatctataaaatgggaataataataacatctccctcataaggtggtggtgaagactgagttacttaagtgcttagaagagccacgcctgctacttagtacaggctcaatatttacctattattgtcatggttactattcctctaaacagacaatttttgctcctctcatattctcttgagtctactctgaccaggcttccaacaccacctccattaaaactgctcttatcagtcaccagtggtccacacactgccagcaccaatggtcaactcagagttctcatttatgtgccaaaacacagaacactgtagtcactccccttccttaaaactcctggttgtctctgctttctcctttctctgtcccctctttttggttctctcccatctaacattggaatgtcttagggctcagttctcggaccttgtctattgtctatatatgcttatcctaggtaatctcatctcatggctttaaatatcatcaacatgcccacatctcctagattgttcttctgaagtccaaagttagacatcccaaatgcaagctaccccaaactgaactcctgataatcttccccaaacctgctcctctggaaatggcatcctttgtccttgcagttttaggacaaaaaccttggggtatcttgatttctcttatttggctcaaccttcaaaaatatccagaatccaagtacttacagcttatcttactggaccaagcctcttctgtttgttgttgaggttattgtaggcacccccatactgttctccccacttttatccttgtccctctttagtctgtgtttagtccctcaacacatcagtcaaagtgatcccattaatgtaagtcagggaatttcatatctttgctcaaaatcttctgatgtcttccaatttcaacaagagtgaaagccaaaggcatgcccccaaggctctttcc

SEQ ID NO: 37203 - DNA, 2300 bp, Homo sapien
aaaaaaaaaaaaaagtatcacgtggtgaataaattcaaattcttaaatataccaatacagtcaactgtaaaggctatttatcttttcctatcatttacttatatttatctatttatagaaatgacaattaaaaaaacctcatcagccttaactgaatttatttttattcaaagtatcacagagcacgagggagccttgaaaacccatctggcctaactccggcatcagcctaggaaagcacaagacctggctgtactgactcatagttcagtgctctttctacttcaacacaatgcctcaatgctattaaggagaaatttaataattcttttggtttcctttcacaaacattatcgtcagagactgtgcgcagtggctcatgcctataatcccagcacttgaggagaccaaggagggaggatcccttgagtccaggagtttgagaccaccttgggcaacagcaagagatcatgtctctataaaaaatttaaaaaattagtctggtgcagcggtgtgcctgtagtccctgctactcaggtggttgaggcaggaggattgcttgagcccaggagttcaaggccgcagtgagctacgattgcagcactgcactgccggggtgagagagcaggaccttgtctctaaaaaaatttttcagcatactttttttttctttggagacagagagtcttcctctgtcacccaggctggagtgcagcagcaggacctcactgtaaccttcgcctcctgggttcaagctattctcctgcctcagcctcctgagtagctgggattacaggcatgttccaacactcttgctatgttttgttttttttttttgttttttttttttttgtatttttagtagagacagggttttgctgtgttgaccaggctgttctcaaaatcctggcctcaagtgattcgcccgcctcagcctcccaaagtgctgggattacaggcgccagccccgcacccgccaaaaacacacaaaaattatcagggattgtgtttataaatttagttacttttgaaaatgtttttacattttgaactttcctgtaaggactattcacccattgcattgattggtgctcacagcacttaatacttgaacaaggggaattcaaggacatgctcttatcccctttcaagtggactcagaaggaaaacaaaacaaaacaaaacaaaacaaacaaacaaacaaaaaaaaccccacaatcaacaagaaacaggagaggcctcaaaacaagcagggctctctccctggggcatctcacttttttttttccttttaaaccacaaggccctaacagaggagcaaactccatgtggtttcttaactgtttcaaaagtgatcaatcaccaaatcgaatgtgacgtgcattgtcaccttccaaggaaaactctgagtagtcttgaaagatagaatcacaaaagggaaaaatcacctctccagggctagttcccttataaaataaatctgtcctggggcttccccttggaaaaacacacacagggccccaagtgtgtgtaggctgactggctacacaatcatttgaatttagtttcgaaaatagcccttccctgtgtccctaatgtaaaggaataattaaaacccaaagcgcatttcccttaattagccgaaagccctagcaatgcatggcattgtgggcattcaggagccaaaatgcccccactcataaaaaatgatccaaacaatggctcgtgcccaagctttcacacttgttttgcagagaagtcttggctggcagaggcaggatttgtaattccttgggtcgcttgacttcacgaggggcgaggtatgcattgtagcgacacggactacttgtgaagcctttgggcgggagtcgcttaaagattaactttctcgggtttccgttaccaaaagcgtttccgtgaatagcgtgattggaaacttgtgcgggccggagaccgcggcgcggctgctctttcaacaggcgatttgttctcctgtccgaggctcatttccatgcaaagagcctgacatcagagcaccttttgttgctaaacgctttctttagcctcgagggagagagtcatgtggagctggaagagctcattttgaagagaggggtcccggggagctccctccaagatctagaggctccgcggccacccctgccgggtcctgccaagacttgctagaaggaacgagtcgcgtgccttagttagttggttcccgtcacaggaagaaacgcctttgcagtgggtttaattgcttctgggccgagcgaattccccgccgtacaactcagtgg

SEQ ID NO: 37204 - DNA, 2300 bp, Homo sapien
actcaggtggttgaggcaggaggattgcttgagcccaggagttcaaggccgcagtgagctacgattgcagcactgcactgccggggtgagagagcaggaccttgtctctaaaaaaatttttcagcatactttttttttctttggagacagagagtcttcctctgtcacccaggctggagtgcagcagcaggacctcactgtaaccttcgcctcctgggttcaagctattctcctgcctcagcctcctgagtagctgggattacaggcatgttccaacactcttgctatgttttgttttttttttttgttttttttttttttgtatttttagtagagacagggttttgctgtgttgaccaggctgttctcaaaatcctggcctcaagtgattcgcccgcctcagcctcccaaagtgctgggattacaggcgccagccccgcacccgccaaaaacacacaaaaattatcagggattgtgtttataaatttagttacttttgaaaatgtttttacattttgaactttcctgtaaggactattcacccattgcattgattggtgctcacagcacttaatacttgaacaaggggaattcaaggacatgctcttatcccctttcaagtggactcagaaggaaaacaaaacaaaacaaaacaaaacaaacaaacaaacaaaaaaaaccccacaatcaacaagaaacaggagaggcctcaaaacaagcagggctctctccctggggcatctcacttttttttttccttttaaaccacaaggccctaacagaggagcaaactccatgtggtttcttaactgtttcaaaagtgatcaatcaccaaatcgaatgtgacgtgcattgtcaccttccaaggaaaactctgagtagtcttgaaagatagaatcacaaaagggaaaaatcacctctccagggctagttcccttataaaataaatctgtcctggggcttccccttggaaaaacacacacagggccccaagtgtgtgtaggctgactggctacacaatcatttgaatttagtttcgaaaatagcccttccctgtgtccctaatgtaaaggaataattaaaacccaaagcgcatttcccttaattagccgaaagccctagcaatgcatggcattgtgggcattcaggagccaaaatgcccccactcataaaaaatgatccaaacaatggctcgtgcccaagctttcacacttgttttgcagagaagtcttggctggcagaggcaggatttgtaattccttgggtcgcttgacttcacgaggggcgaggtatgcattgtagcgacacggactacttgtgaagcctttgggcgggagtcgcttaaagattaactttctcgggtttccgttaccaaaagcgtttccgtgaatagcgtgattggaaacttgtgcgggccggagaccgcggcgcggctgctctttcaacaggcgatttgttctcctgtccgaggctcatttccatgcaaagagcctgacatcagagcaccttttgttgctaaacgctttctttagcctcgagggagagagtcatgtggagctggaagagctcattttgaagagaggggtcccggggagctccctccaagatctagaggctccgcggccacccctgccgggtcctgccaagacttgctagaaggaacgagtcgcgtgccttagttagttggttcccgtcacaggaagaaacgcctttgcagtgggtttaattgcttctgggccgagcgaattccccgccgtacaactcagtggtgcggactttgcctcctgctaccctgttgctgcgccgagcggggtgggaaagtttctggagttgtcagtcgcgcagcccgtggccacctagacccgaggtgcgggcgcctgcgaagggcccccgcggggtggccggggccgccggggcatgcagcgcgggggcgcggctcggtgacgccgcgggcggggacccggcatccgggcaggctgcgcgcgggtgcggggcgagggcgccgcggggactgggacgcacggcccgcgcgcgggacacggccatggaggacgcgggagcagctggcccggggccggagcctgagcccgagcccgagccggagcccgagcccgcgccggagccggaaccggagcccaagccgggtgctggcacatccgaggcgttctcccgactctggaccgacgtgatgggtatcctggtaagttacctggggagggggcggcgcaggaagtacagttcgcagcagcccctctgaaaccgggggctcccttctcgcccacccactgggcaacccactc

SEQ ID NO: 37205 - DNA, 2300 bp, Homo sapien
cttttgttgttgtttatatagtaagtaaatatatcatccctttgaggctcagttacataatttatgtttccccagtattcagagaagaaaccagaacaaatccacttccagattccagtccagctgaatgaggttatcagtagattaaaaagttttccttgatcaccagtgacactgcttgctttcctttacaaaatcttagtgtcctgtgctgtgtggaacgtctgtctaattatcagtacgcgtggaaatgagaaaaacggatgtgaacagcagacacgtcacagcacacctgggttccttggcaacattccacttggttcttttttcaagttgtcctacttttaagcattcccagttttttgtattcacccagcgtcacttgtgattcaaaataaaccttggattctaaaaaaaaaaaaaacagtctaaagctaagggaaagggagaggtacagagggagagggagggaaggaggaagccaacagtttaccagctaatgtggatttttaaagaacccaaccaactccccatcacccactctgccatttgcggtgacacagatagtaaaatgaatcaacccagcaggcttctctcttcacccagcacacgctattattctccctgtgcaagtagcaaagggaacttgagggaacttgaggagtatttttggattgattgattacaaaatggaaattagatggaaatacagggcaacataaattccaaagtcagccgtgcctgaaatggtttcctacaagtctacaggcagactctttccctctgtctcttacaccaaaggcaaattaagccacagccgggggcatcctaacgatattggaagctggtaaaaagtatgaatgagaaagatggggaggagagcagggtgtgggactggagtggggatgttaaagctcatgttcagtaacatgtccttccccacacgctgaccagaggcaccattgcccaatgtggctcagatataccagaggcaatagcagtctgtttgctctgtaggaaaatctttggaatctaatgggacattctcttctctgaggttctagctgccttcaggtgcgagttggaagttgattttccctcagtttggaaaccaatttatgacaataatactttcagatacagacctatatggcacccttcttctgattaactcaacatgcttcatgtctgtgatttgcacttagcattttttatttatttattttttttgtcttcagatggagtcttgctctgtcacgtaggctggagtgcagtggtgtgatcttggctcactgcaaccttcacctcccgggttcaaagcaattctcctgcttcagtctcctgagtgtctgggattacaggtgcctgccaccatgcccggctaatttctgtatttttagtggagatggggtttcaccttgttggccaggctggtctcgaactcctaacctcaagtgatccacctgccttggcctcccaaagtgctgggattacaggcatgagccactgtgcccggtgcacttagttttgaggaataataacagtgaaatagcttagtaggaatggaaggttttgccaggtctgaactctgtgaccttcctctgtcatgacctaggattctttcccacttctttgcaaaaatattttcttctcatttgtattgctaatggaaggacacaaagaacccacagctgaaggagccttggaatgcttgtatgatccagttgggtgtgtaaattagatctttactccacctatagcgaggatctctctctcactttcctccaaaacccatccactgggtactctatctcaaaggctctgatcatcttgaaggatttgtttctatggtgacacccacgtgttctgcaagcctgtttctcaatcagaggtgcttattggcttcttaaaaagcagcatatttttgccaccctttgcttcatcagtaacgttcaacatacatagtgtcctgagcaacattcttctctagcccgagacagcagatgttccgcattgacgttctgtttcgccattcttgttttcactcctgttgttctttgtcctcaatctccaggagaagacgttggttatgttgccagtgaaataacgatgagcgatgaggagcggattcagctaatgatgatggtcaaagaaaagatgatcacaattgaggaagcacttgctagggtaagcatgcagatacctggtttatatttgtgaggacttgactttctgaagtgtaaaaatgtttgcggccaacaaggggtataggaatcaggtacccatgttgtcagataaaa

SEQ ID NO: 37206 - DNA, 2300 bp, Homo sapien
caatgatgaggcatctgggtgccataccatgtctgtgaagccctgagtcacgggaaaggaactagaataaaatcactgcttttgcaagaaggaggaaatgtacatggcattataagctggaaagagaaggttaatgttaaaaattagccttgagaggtggtcataacattgcttacccagttaggtgatttggtgaatatatttgtgtagaaaggtttttctctttctatagaatagatataggtccagttaagctgacgataagagaaatcagattgcccattgatatttaatacagaattaggataatgtctattagaaaacaagtcggtagtagcagcagcagcagcagcatcggtgaataagaacagctctgagacctcctgatgtcagttgtcacgaaatgctttccttatctcctggccctctccagaccccaatggccgtctctcactttgtggcccattcctggtatgctctgattttatagttgaactcccagattagattgtaaggcccagaacaaagctccagccctgtatttgcatatttgtaatgttaactaagcctcaacttcagtataacagctgtcaggatgactaccacattctcagtacagccttaatgaaaagtagtggaagaaaccagcattcatagagtgtctgccttgtgccaggcagtgcgctagaaggcttcaaatatgatataagtattattttaataatgaagaatctaaagctcagagagtgtaagtactttacctgagatcacacagcaagtaagtggcagaaccaggatttgcatctagatttctgtgatttcaaaaatgtaggcattttccttctaggatgtttctactttatcaattcagttaattatatatatatatatatatatatattttttttaatgaataagcaatgcttatagtatattaggttggtgcaaaagtaatcgcagtttttaccattgaaaataatggcaaaactgcgattacttttgcaccaacctaatacattgtacttttctgttcatttcttccatttaatagctgttcattagacttctctgagaagctggtaatacaaaatattgaagcccgaatctacaattaaacttttattactgatttttaaaaaagataattagctgtaacattaatgtgtgttgtggggcacagggcggtcactcagtggcttttactagaaaaacaacagtgaatttgaatcaagttctgcaaatacagaaatcactaagatataagcagttccgtgaagtttgcaaccacctaaaaggataataaagttttcattctttataacatcagcattgttcctactgaaattaaaaagtgtggtcaaacacagtcactgaatcaaccgttttctttctgggcaaatgtggcatcttcattcactgagagaaaagggtcaccatgaattaacttgggcagttcgatgggaaagttaccagcgtttttggctaggatggggaagcggtgagtgagtaattctcttggcctgattggacaactgtaaacataaccttctccccccctcttctcagcgatttaaagctaaacaaaatgaaagtctgtttgaaaagcttgctgttggtgtcagagccgtgggatttcaaacctgggttttcaggatgcctgagtacatggatcctctaacacatatcccttcattatctctactgaatgtagctgatgttaggggaagttctgtgctggagacagggaatctcacagcactggactcatggagggtttttcttttgttttttaggctttttaaaaaaaatggttggtttttgcatgttaaggggattctagacctctggggtaggcagagttccagtggcctgtgaaagggaaaaatgagtgaagtttccttacgacatgactcatgtgtttttttctcatcatttctcgttttctactttcatcctgtccacgtatttgtgattcagagatgtcctgcaaacggggactgctgggttggtgcactgccggctggcttaagcataactgaagtttttctgccctaccctcttttccacagagaacctgcagttttggaggatttgacttgacgaatcgctctctgcacgttggcagtaataattctgacccaatggtgagtaacatcagaggaaagcaaaaaatatggattcaggcgatgaggttgacaatagttcaccattgagtatctttgagaattgatactgggtaccgttttccttggtaatcctgagtcacgtttggaaaaaagctctatttcacttgccttaca

SEQ ID NO: 37207 - DNA, 2300 bp, Homo sapien
gatttttcttttctttttatgaggcggagtctcgctctgtcgcccaggctggagtgcagtggcgcgatcttggctcactgcaaggtccacctcccgggttcatgccattctcccgcctcagcctcccgagtagctgggactacaggcgcctgccaccatgcccggctaattttttatattttttatgagagacggggtttcaccgtgttagccaggatggtctcgatctcctgacctcgtgatccacctgccttggcctccttaagttgtgatgatttttctaataatgaaaagtaggaccatggtcaatatcttcagtagtagcactaggctgatgatctttatgtaacaacaataatatcctacaaatgcatagcatgttggtgtttatcagtgtggaacatacaggtggacagggtcaaagcacacaacaaacatgttatcaaccaaaaatgtaacaagggacagtgtgtgtgtgtgtgtgtgtgtgtgtgtgcgcgcgcacatgtaagtactgatgagaacaaagcattcagcacattgtctggcccatgaattgtaagttcttggcaaagcttatccaacagcagcagtttagtatcaactaccagtcgtcagataagtagattatgtctggttgatagttcagttatcagtctggcagttgtaactaggactgttgctttgctgggacctaaaactttatcagtattttgtagattttctttggcaaagtactcacaaaagtttacctgtctgtgtccaggttggttgattgcttctaggataaacttactagaaggaggggcttcagggaaggtgggatttgagtattcacagatcactctgtaggggataccatttatagaacctgttgtgaaattcagtccagctctccttttccatcatgaccttgagaaattgtactcacccaacaaatctcatcaatatgcggtatgatgatcagcctctttccacgtcgattgcagtggggcacagacttaagccaagatttattttactgcttgacacagcgtatttctttcccatgtaacccaattaatttcagtcttcatgattcctttaataagactaagaattctttctaaaaataaaaatggaaccataataaccctctatcacccgatgtcataaatggtgattttatgtttttagtgtaattgaacaataggatgtgggtgttggagatttcaattatgttagcacaactttatgcatccgtttgattgatttgcttttaaaatgtgattgtaaaatattcccttgtctcacaggcaagactcggaaagctagcctcctatctgccaagtcatccaccgagcccagcttgaagtcttttagcagaaaccagttgggcaattacccaacattgcctttaatgaaatcaggggatgcactgaagcagggacaggaggagggcaggctgggtggtggccttgccccagacacgtccaagagctgtgacccacctggtgtgactggtttgaataaaaaccgaagaagcctcccagtttccatctgccggagctgtgagaccctggagggcccccagactgtggacacttggccccgatcccattccctggatgaccttcaagtggagcctggtgctgagcaagacgtgcctaccgaggtgacagaaccgccccctcagattgtacctgaagtgccacagaagacgaccgcctcttccacgaaggcccagcccctggagcaagactctgctgtcgacaatgcattgctactgacccaaagcaagagattttctgaacctcagaaattgacaactaagaaactggagggctcaatcgcagcctctggtcgcggcctgtcaccccctcagtgtttgcccagaaactatgatgctcagcctcctggagctaaacacggtttagcaaggacgcctctggagggccacagaaaaggacacgagtttgaaggaacacaccatcccctgggcaccaaagaaggggtagatgctgagcagagaatgcagcccaaaattccatcacagcctccacctgttcctgccaaaaagagcagagaacgccttgctaacggactccaccctgttcccatgggccccagtggggccctccccagtcccgatgcgccatgcctgccagtgaaaaggggcagccccgccagccccaccagccctagcgactgtcccccagcactggctcccaggcctctctcagggcaggcgcctggcagcccaccaagcacaaggccgcccccctggctctcagagctccccgagaacacaagcctccagg

SEQ ID NO: 37208 - DNA, 2300 bp, Homo sapien
aatgtgcatattaatccaaataaaaccctgattcatgagataaatgtaaagcaaatgattaacactctattcagggttttctgtcacagaacaaaatattttcttttctcttggggccccaaaacagccttctcatcccttagaaagtgggctaggacaatgtaaaattggacagtagagttgtgtgtgtgtacgtgtgtctctgtgtgtgtgcagcacctgtcacctcatctacacatctctctagctcatgatatatgtttcaaatcatgaaccagagacattcatatatgaacatggttaagacatattcattctttctttctttcttttcttttctttctttttttttttttttgagacggtgtctcgcactgtcgcccaggctggagtgcaatggcgcgatctcgactcactgcaacctccgcctcccgggttcacacgattctcctgcctcagcctcctgagtagctgaggttaagacatattcttaacgagtaagttctttgtctaggataatattttgtaattttccacagaatattcttcagatgcctaacttgatgaaggttttcaggagcctagtcttagaatcatagaggttcttggctcctggttccttcttaaatccaattgttcattactggaatatacaaatgagtagggagccagaaatgataggcaccagaaactgaggtttccatttctcaatgtggcctgaactaaatgaattaaatctcatcctcctatgggacgtgaaggaaaagggctctggctgggaagtactgctgtgcagtggttagtatagtgggtctgagggtcaaatagatttgagtgcaactcccaacccaactcctactactagctttgggacctcgggtgagtcacacagccctcaggtgctacagcttctataaatagtgatatagtattcttacttaaagtgtggctgatcagagcagcccttccgtggatcaaccaccccatcagaggatctatgtctaggattgagccttttctgccccaggaggttctttcaggtccagaggctttcccgtggagggaagagaggcagcaatgaaatcagcgtataggcggactgggctctttccccttcatgtctgcagggcaatgacctcctagagtccgctatgcaccccccacttgcctctctgggcactgcgaggtggagcagttgtaggaccaggaaaagcaagaacagagcgtcctcttcggctaccctacccgggagttcaggcgctgcgcctggccctctggggcgtgtttgaccataactcgcaccgcttgctcttttcccatttcagcaaagtcttgagcctgtattctagtaccttttatcagccttgggtaagcagctcgcacggggtatataaggagaatcaactttctgaactgaaaaaaatgtaaatagtaaagtcagtcgtgcttcttcctgccggtgactgtttacaagagggaagtcagcggggcccccaagaggtcgctggtggcgcaggaaccgcatccagattgtaaagaacgggggaaggaaaaaaaaagaaaacacccagaaactttcttccttgttgcgaataatcgccgcctccccccctccgcccccagcagaagcagtaacgtgacacccgagcgaaatcccgagacccgagcggagagggaggggagagggaggagagtgctgcggagcgccggagggagaaaggggaggagaaggaggaaaacccctgtcaaggaggtggagcgaggggatggtgtccgcctcctgttcctccctgccgttttttagagaagcctgaaccgggacaaaacacgccgagacctacagacacaaagccggggggtccacgctggcgctggaggcgagccccggcggccgcaagcgagcccgaggcgcggcggggcgcggggcgtggggacgctagcgggcgccggacgggcgcggcgccccgtcacgggcagcgccccgaaccggggccggacacctcggccgctcgggccgcggcggcggggaccatgccgaagaaagtctcctgagcccggcaacttcggcccctccccgcccccacccggctgccctccgcgcggccctccccatgtgcagccggccagccgggctctcctcctcgcggcggatgggtgaccttttcctggcacgggcaggctgtgggaggcagcggagcaggcgatgaagaagaagcagcagcatcccggcggcggcgcggatccctggccccatggggcccctatggggggcgcccctccgggcctgggcagctggaagc

SEQ ID NO: 37209 - DNA, 2300 bp, Homo sapien
ggactccagttagttgttcatccagttacatgaatgtgtatttctgagaactaacaagattcgcattgcaaggctaatctcacccatgagcagtgtgtgttccaatgtggtagtatttaagggctccagggtgtcattcatatgtcctggtgcctgaaattccactatctcagagttgttcctttggattcttctctctgaagattctttttaaaaatgcagataaaccaggaacaacattatatgaattcatacacagaaaaggatgggggcttgttattactttcctctgacaacagagccccatgatatgggaagaaacgttaacaactgagaggcacacactcagatgttcatttcttcatttggtcatcatttgttgagcacctactgtgtgccacacactgagctagagcgtgtcgttcctggctgcaggaggcccacagtctgatgggagaggcacacatttccacacagtgcaagagagagggcccagggcacagaggagggaggcatggaccctgggttgggcattaattgctgagggatgtgatgtgactccaggctgggttttgaaaggtgaatggagtctgccagctggggagaggcaggagcggggtcctgtcagtttgttttctcttagttctttctgacccctgacagaatgtccaggcacattcctcagaaggtcacgaggccatagggctagagaaccctgcaggcccctcaggaggtcaccagagcatgccctctgcccagagactggggcactctccccgaactcctcaaggctactgctttcaagcagttcaaagagaaaaagaaggaatcattaagagaaatccagccaatctcatcactctgcttcgggaagaccttgttcttgggccaagatttagtggattcatctaatcctttcatggaaggaattaaaatggaacacctggctatttgctttatttttatctgaagccacttgccatcacttgaggataattatgttgaattttgtttcattcttgatatcccacacaaaatttcctcaactccagaaatcacttttccataattaagagcatagattctagagccagattgcctggacccatatcctagttcagctacaagttatgaaccttattcctgcctcagtttccccaagtgtaaatgaggataattattttttctactccattgacgtgttatggggcttcagcaagctggttacatgaggtatttagaacaaggtgaatagcgagtgctcagtgaagactggctgttattcactcccttactgcagagcacctgacccggaactgtttgaattacaatatagaggaagtgccgtctcacccagcaaggcagtcagaacctaccaatcaactgaaacattcaccgagggccaattgtgtccctgtgggttctgttctagccattggaaatactaaatccaatacagagtggcccccatcctcaagaaacctacagcctggtgagaaaactagacaccatctcttccttaacatgcacaatggtgtggtttgtaccgtgctatactatgaaatgtcctcacagcccctcaacaggtacctggaacaggtatcatcctccccacttcctgcatgataataaaatgcttatcaggaaacaccgtttgcttattacgtgtcattggcaccttagcataggaggtcatctttcaataagttaacctagagggaaggggagatgttgtctaagtaggccctgttttcgtcctgcagtgatgggttgtaacgaactcaatgtttgtgttaggtttggaggagaccagcctgtctacatcaacatcattagagaccccgtcaaccggttcttatccaactattttttccgtcgctttggagactggagaggggaacaaaatcacatgatccgcacccccagcatgaggcaggaggagcgctacctggtaagtcctgtcgcatgcaaaaggcggtctccccactgcctgaggagtgggccctccaccagggaaggttcactcttcccttcccaggccttctccttggcgcctccatggagcgtggcgcagagagggtgcttccgcaggaaggaggtcttggcgagagaaactggttccgggtgacccagatcctaatgaacatttcctcaaattattttctgattttgctttgctcagttgtctttagtgctaggttttgggacccagagcgttaacagtctttcctaaggagtcctgactagcactgtagtgcttaagaagaacaaaggtgttgggggggtgtctgttagagggc

SEQ ID NO: 37210 - DNA, 2300 bp, Homo sapien
agcctgggcaacagagcaagactgtgtctcaaaacaaaaacaaaaacgaacaaatggaaactccaaaccataattttttcccctcacatttgccacctttctctctaatgattgcagcttattatttgtgtgagtgtgtgaaaactgcattatatgaaatgatttacaggatggcaacagaagcttgacagaacggaagaagctagagcattcctcttaactcttacattaatatttgaagagtagtgttcataagacgtgtttctgtattgttggttttttggcattttctgctgtcctttggttctaactttcttagcatgaggattgaatcagaactatgaaaaaattgtctggattaaatggaatgtatgctgtttttaaagagcatatagatatattaatcaagatccaaaacaaataataaagataattagagaagacattattcttgtagtgtttctatactctgaatacacgtctcaccaaataaaaaacatatagtcatattcataacctatagttttttattttatttaattattattattattattttttgagatggagtctcggtctggcacctaggctggagtgcagtagcacgatcttggctcactgcaacctctgcctcccggattcaaaggattctcctgcctcagcctcccaattcgctgggatcacaggcatgcgccaccatgctcggctaatttttgtatttttaataaagacaggttttcaccatgttggccaggctggtctcgatctcctggcctcaagtgatgcacctgcctcggcctcccaaagtgctgggattacaggcgtgagccactgcgcccggcctcataacctataaagaaatagattagggtttcgccataaaaactaaaaaaaaaaaaaaaaaaaaagggaaaagccacttttaaaatatatcatcaaaggaagaaaataaaaataaaaataaaatcatcaaaatatttcactgaagccttaggtagttgatcaaataccgaaggtgagtggaaagccgtgggtctggtgtagtcgtctggccctggctgagacactaacttctctgtatctcagttttctctactctaatcatggatttgaaaacatgaacgtgacactgaggggacatcatccccaaatgctcccagcctctgaacatccacttccattatgtttttaaaatgagatgaggaagcagccgtcctggccgtggccctgagattcggtgcttttctccagcggcaaggctgctgctgacggcacatcagcagtggcctcagctctgggcgatcttccagctttgggaacaacacctctgactgatcctcaacacttcctactttcctgcttgtgcccgacaacagcccaggatgggtccgggtgaaccccaagggctctctcagacacagagaccaggatttcagcctcctgggcaccaggctgtcagctcctcagtacatgtttctcaacacagggatgggaaatgtacctttcgttctagtgctgaaagaaagacgcgcaactccgccctccgtttttgttaccaacctctgtgctgcggaaataattactgggctcgagactaacatcccttatggagctgagggtcccaaaacaagtccagagaaagcaaacaattactggtgcaatgacagggttctatcgcgctgtggtggaaagaacccagactgtgaaggcaggaaacccgaaacagtcggtcgcagttgcgcccttacctgagaggtgactgtggcaaatcccacaacctttagaatctcagggtcctcatctgaaaacacctccccctcccagagtggtcatgggaactgaatgggctgagggatgagaaggggctctgccgccctctaacagacacccccccaacacctttgttcttcttaagcactacagtgctagtcaggactccttaggaaagactgttaacgctctgggtcccaaaacctagcactaaagacaactgagcaaagcaaaatcagaaaataatttgaggaaatgttcattaggatctgggtcacccggaaccagtttctctcgccaagacctccttcctgcggaagcaccctctctgcgccacgctccatggaggcgccaaggagaaggcctgggaagggaagagtgaaccttccctggtggagggcccactcctcaggcagtggggagaccgccttttgcatgcgacaggacttaccaggtagcgctcctcctgcctcatgctgggggtgcggatcatgtgattttgttcccctctccagtctccaaagcgacgg

SEQ ID NO: 37211 - DNA, 2300 bp, Homo sapien
aaaataggcacataataatggcctacctcccgggatggctgaaggactgtatgagatggtacacagcaaagtatcaaaccagccacacctagcatttgagagccatatgtgttaatttcattttgctcaccacttctcttcagagttgttatgaaaatcaaatgaaataatacacatgcagctgctctgcaaaccatatgtaatgttcagattattgataataaattatccctgatttgagaaatcaggtggctttccagaaattatgaagagctggaaaggaactttaggccttgtggtggcaaagtcagtgctccagccaaggaggcccatgctctgcttagctaaacggccctccctggagatagcatcattggagggcaatcttagtatgtcatacaaggttgctaggtgctaaaaatatagacttgccagtttcctacagagaaggagggttttctgctgggttcaagcattactctagcagcaagatctgggggcaccttctcttttatctctcctccgaatcaaatgtcttgccctttatttgaaaataaagctctcccagcactttgggaggctgaggtaggtgaatcacttaagctcaggagtttgagaccagcctgggtaacaaggcagagccccatctctgcaaaaaaaaaaaaaaaaaaaaaaaaaaaagaaaggaaaaacactcagccaggtgtggtggcacttgcctgtagtccctgctacaagggaggatggcttgagcttgggaggttgaggctgcagtgagctgagttcgtgccactgcattccagcctgtcttaaaaaacaaaagaaaagaaagctccctggggctctcacctctctcattcatccaggctttccccagttcctggaattctgtctccttctgccttctccggccactagaccacctcatatggaaattcagaccgtgacctgagcagccctatggagctacacatgtcacttcctgctctcttcatagtcacatgctagtacacagcagccccgacctagtcacagctacctgcagtggggccctcaccctaaaagccccaccaataccgacacacagccagttaccttgatttggagacattaaggttctcagaagatcacttaagcccttaaatcaacaaagtagttcttgatgcggcccacagcgaggtttcttaccaacgctctgtctaacagcttcaaccaactatttttgctaactaggtactaaacttttaaagtcattatttaagtcttttgtgcctcctaaattcactgccttggagcaaatccctggtcatgaacctctggttgcccccttgcccagactttctcagagagaaaggtaggaatgggtcccagagttgatgtctccacttaaaacccatctgccacttacaaactattgaccttcggcaaatcatttcatttctccatgcctccgtttcctcatagataaaactggtgatgatcatgatgatgttacctacatcacagagtttttgtaggaaattaagaaaatgtctgtgaggtgctcagctcagcacagtgcctcgcacattcacagtaagtaaagaatatgtcttaattttagtattagtattactgtttagctcaggagtaagcaaattaaggcccaagtgtcaaatcctaccacacacattcatttacatattgtcaatgcatgttttcactacaatagcagagttgagtgattgaaacagagacagcatggccacaaagcctaaaatattaactagctggccctttacagaaaaagtttggcaactctgggtttagcctgttgtatctctccttcctggccagatggtgagaccagcataaaaaccactggtgacagaggctgttagttgcctcccaatacccagttttctcttcctgtatagtaatagaatcctctcccctttttagcctgcacatgatgcctggaataaagactgcatttcccagactcccttgctactagatacagccatgtgactgagtcctggccaatgggatgtaattttaactactttatgcattttttcttgggggaaaataaaattcttataggacttccttttcctcctttctggagtctgaaatgttaagtatggaggcaaaagctgaagctggagcaacagtctcagaatatgacaacaaccatgagaatggaggccattcatagcagaactacgagacaagaggagcctaggtccctgagctgcagaactgcatactaacctggtatgcatcttatttgagcaattttgggctttctgcactca

SEQ ID NO: 37212 - DNA, 2300 bp, Homo sapien
atatgtaccttctttgccccccactggtttttagacttgacctgctcaaacctataatctataaagcattatatttctattaaaatacgtacatgtacattccataaatttttttaaaaatttgcataaaatacatcatcctaccatttcaaaagcaattgttgcctctgtactttataatggtttcaaagacaagtgaaatttacttaatggattcagtttatctaaaattatttaatcaattattttatcattgagtatggaaataattcctcagagaactgctgtaaagcgttaaagttaatgatttcttctcgccagtaaaactagaatcttcccaattttgtaaatcctaattttacttttgcttctcttaatggtatcaccaatggagaataattaaattccgatattgtaaatcataagtactttcagcttttgaagtggcaaagtatttgaattggtgctatagcccagacttcaggtattttcaaaggatgaatgaggaaaaaggaagtggggagaaagaacttttaactgtgaggaaggctctactatttaaaagatggtttaaaaaaaattctcactgtagctacagtgctcacactggaaataaaagtataaaaatggtcctttaggatttttctctggagtaagaattgtttcaaggaagaaactgccagggatatggacattttggacaggggcagaaaaatgccctagtgttttggacaccatggaagcgctagaatttttaaataaatatttcacattgtgagaaacgtctgagtattaaacacgctttttttttccctagggggacactaaacaaatatttatttaaggaggtagaaacttgaaggccccccctcttcccgcaaagctagtctttggctctgcttctaggacttctaggaacgtgcaattaaaataaaatcgaaacaacgaaaccctcgcagcatttagatttcttttttccccctcaactgctcaagaaaagtcagaagccgacactttttccaagtctcgaagttgccagttgtgaggctcccaagacgtctcccgcacaccctagggacgattctgcacgggtccctcccgttagccggcggtgcgatccggctccaagggggtgtgtcccggaccgcagcgacccggcgccagcctccgccgcgggcccacctgctcctctcggccgccgcagcgccccggggtccggccgggcccccggaccccacccgcgcggcgccgccggccgcccggcaagtcccgccacccacttccggacccggccagcccctccgctaggtgcagctgggacgcgagctcagttcctttcttccctcagcccaaactgctagcggcccccgtggcgggaggtggaacccgcaacctacccccaaggatggggggcccaggcggagaaagggggtcccagccctccccgggctgcccgcaccggcacccccctcgcacggccccagcggcggcccgcgtcctccctccagccctagcaagacaggcgtagagactgcgagtgtcgggggaggggtacaggtcggaggaagagcatccccgggccgcagccgcagccgccgccgccgccgccgcctgctgctcccccgccgttcggctaggggaggcctcgtcacagccgccgcctcagccgcggctgcagatctcgcggtgtttgccggccgccgcgccgccatattgtgtgacagtattttgatttggactgggctggcggagccgcggcgagagcgagcgagagctgggggggtggggggagggcaggcgagcgcgaggggggtgggggcagagggaggtggggaggccgagcgagccggagctgaggattggggagcggcgacgccgcccagccgtcgtttttgatctgctgcagccgccggcggggcgacccagcccgaccccctcccctccccctcagccaggagcggtggcggcggcggcggccggagggagttggcggcggcgggcgagcggagggggctgagcggggagggagggagggctgaggtgtcccccctgccgggtggaaccggaggcggcggcggcgctggcggcggccgtggtggcggaggcgacggtggagacggctgccctagtgggagaggcggcggcggcggcggccgaggaggaggagggggaagcggcggcggcaaagggtaagcggacagcgctgccgggcctcggcgggatccccaacctggctctcccctcatcgccccgcacccccctccgtctggaaggggctctgccgcctcgcgaggcccgtg

SEQ ID NO: 37213 - DNA, 2300 bp, Homo sapien
ggtctcgatctcctgacctcgtgatccacccgcctcggcctcccaaagtgctgggattacaagcgtaaaaacaatctgaggtttttttcccccccgccactctggagtagatttttatgatgttatctaaaggcagagataggagctagttcttctggaggctaccttgagcctccagagagagagggattacacaagttaagaggaagcgtgtgaaggattgagatgactggtatgaatttcagaactttaaatgctacaaatgtaactttttaaacatttattagtttaaacaaatgtgtatagcacttgatacattgtgctatatatcaaacattgatagaatatttttccatttagctttttaaaaaatgtttgattatacagtattatatacttaagttgaatgattatattttgttcaacattaaaattgcctttttaattaggttataattttactatatctgtctgaatccattttactcctcgtatccattgtagctgctaaagtggaacaatgatttgattcactttgttagtcagagagagcttttccattacattagtagtgaggatttttaattcaatcatttgcataaaaaaacttctcaaatttaaatatccaaatatatgttataattgtattagccagtcacttggtaatcatgtatttgtagagatgcaaatataagcattcgcttctgattgttaacatcaatcaatttattttgttttcatagaataataataacctggatgcctgctgtgctgttctctctcaggagagtacaagatatctttatggtgaaggagacttgaatttttcagatgattctggaatttctggtctacgcaatcacatgacttctctcaacttggacttgcaatcacagaacatttaccaccatggaagagaaggaagtaggatgaatggaagtaggactctaacgcacagcattagtgatggacaacttcaaggtggccagtccaatagtgaactatttcagcaggagccacagacagcaccagctcaagttcctcaaggctttaatgtttttggaatgtccagttcctctggtgcttcaaattcagcaccacatcttggatttcacttaggcagcaaaggaacatctagcctttctcaacaaactcccagatttaatcccattatggtaactttagccccaaatatccagactggtcgtaatactcctacatctttgcacatacatggtgtacctccacctgtacttaacagtccacagggaaattctatctatattaggccttacattacaactcctggtggtacaactcgacagacacaacagcattctggctgggtatctcagtttaatcccatgaaccctcagcaagtttatcagccttcacagcctggtccctggactacttgtcctgcatctaatcctctgtcacatacctcatctcaacagccaaatcagcaaggccaccagacctctcatgtctacatgccaatcagttcacctactacttcacaaccaccaaccattcattcatctggtagctcacagtcttctgcccatagccaatataacattcagaatatttcaacaggacctcgaaaaaaccagattgaaatcaaacttgaacccccacaaagaaataattcttcaaaactgcgttcttctggacctcgaacctccagcacttcctcttcagtcaatagccagaccttaaacagaaatcagcccactgtttacatagctgccagccccccaaatacggatgagctgatgtcccgtagtcaacctaaggtctatatttcagcgaatgctgccacaggagatgaacaggtcatgcggaatcagcccacactcttcatatccacaaactctggagcatctgctgcctccaggaacatgtctgggcaagtgagcatgggtcctgcctttattcatcaccatcctcccaaaagtcgagcaataggcaataactctgcaacctctcctcgagtggtagtcactcagcccaatacgaaatacactttcaaaattacagtctctcccaataagccccctgcagtttcaccaggggtggtgtcccctacctttgaacttacaaatcttcttaatcatcctgatcattatgtagaaaccgagaatattcagcacctcacggaccctacattagcacatgtggatagaataagtgaaacacggaaactgagtatgggatctgatgatgctgcctacacacaaggtaatatgaatactaaaggtgggatggttttccatgctgggcttgttggtgtgcat

SEQ ID NO: 37214 - DNA, 2300 bp, Homo sapien
agatagtaaaaataaggtttatacattctttagacaatgatagtttcttatacttgagctattaatgacaagcaatgttttcttatagtaaataatgtttacaatttaattcagttccatagagaactaaaaggaaatgttatcacttaaacctaattctgaagttggataaataataaaaagatataaaatggaaaagacaggaaggggaaggaatctaaccaaaagagaagtctttaatcacacttgggactgtgttctagaatctgttcaactggaagatgattatttttatttttattctttttaaatgttgattaagctatttatctttaaacattcatagaaaaataccataatttaactctaaaaagttggtgctgttctagaaactacaatccttgaacttactctttttgtgtaaaattttaaccattctattacatagtgcaaggtttttatatttacttgaggtaaagctgtttagttacttaagtccatgtttgatcgtttaaaattacattttaaattgtgaaattttaagttattttaacttgccacatagaacagggatctacttctacttctattaatgtcttaccagcattaatttgacttctttcacagtttaccacttacccgtgtttatgagtactacattatacctaagataatatatttgaaatatgttttgaaatcttacatataattcgaggttagaggggcaaaataaatgaaaagcatttcttatagcgtgtttatttttagaaagaaatacttgttttaaaaagtaaagttgtttttgagctataagcattgatatatttactttttatatatttcaggaccacattttaaccccagcgctattcataacttttatgacaatattggatttgtaggtcctgtgccaccaaaacccaaaggttagtgtatccattaaatgtgaaaactgttacttttgaaaagcaaaattttagaaaatttttcctgttcagcaaccttcctctctagaattgcttcaaactttggcattcttaaatgaattcattaagaagatgtttgcttattttcatttacatgcttggggttgggaaggatgcaaagatgtaatattcttagctttttaaaagtaatatgcacgagcttaggaaacactatgtactcccaaccaataatagcaagtcttggttaaaaaacaattactaagtacaaaaatttgtatcatttaaaactttagacaaatgataaggaagataccttagggaagttccccccccccatgagtatttagtttaatttatatataactttaagtaatcaaaataccctaaattccaggtgaatagttttctaccttctatcattttacatcattgatattctcagaatatatgcacaccaaactaagacatttcaaagtatgtctgtgtgttttgatccaggcattaaaatgtgtgtagaaatggaaacaggtacataaatatcactgctgaaggtaaaaatatagacatatttacagattaacacttaaccgtggtatataatttactttcaactctaataagaaagttaaaaggtaaaaatgtgttaatggatacataatattaaaagaagaaaactgcaagaacacaaaagtgtgggagggtggaggttgtaaagatgcagtagtatttttgtatgcatttgaagttaagttgttatcaacttaaaatagaagagtataaccaaatataatcaaagtaaatcacgattaaacgttgtcgaataacaagacaataagaggaaaagaggagcaaaacagttgtcaaatagacaggaagcaacaaactgccaatagtaagtcctcacttattagtaattaccttaactggaaatggattaaactcaccactcacaaggagttgtatgaatggattttaaaaacaggatctggcagcagccaatgggaggccccaacagctcgtgctggcgcacacagcgggaggggagggagcccaggatgtgcacgcaccctctccctcatccaccgctgtcacctcctgctgctcttcctgctgctcgtgtactcgttaggtgcggacccgccacctcttttgtgaagcagcagctgaggagactccggtgttcaccatggccaacgaaaagcccacagaagaagtcaagactgagaacaacaatcatattaatttgaaggtggcgggacaggatggttctgtggtgcagtttaagattaagaggcagacaccacttagtaaactaatgaaagcctattgtgaaccacggggattgtcagtgaa

SEQ ID NO: 37215 - DNA, 2300 bp, Homo sapien
tgtttgtgtaaggcacgtttttgagcctgatggccctgggcttccatcttcactcagccacttaatgagtgaacgtgggcaggttggctgccctttctcaaccccaataacctcatctggaaatgggaataattattccaatgccatcgagcttttgtggggattagggcactttgatgtaaactactatatatatcattggtgctaaacaaataggagttgtcggccgggtgcggtggctcacgcctgtaatcccagcactttgggaagccgaggtgggcagatcacgaggtcaggagttcgagaccagcctggccaacatgttcaaaacccatctctactaaaaatacaaaaattagccgtgtgtggtggtgcgcacctgtaatctgagacaagagaatcgcttgaacccaggaggcggaggttgcagtgagctgagatcacaccactgcactccagcctgggcgacagagcgagactccatctcaaacaaacaacaacagcaaaagaaaaaaatgggagctgttacttgaaaatccattgtaccagaaaatttcaaagctagaattagtgttctaatgcagtgactactctaatctagctttctggtatgatgttctttttttcttgtaaggatttctgattgaactttcaaaaaaatttatttatttgtttttgagacaggatctcactctgtcacccaggctagagtgcagtggtgcaatcatagctcactgcagcctcaacctcccaggctcaagcaatccacctcagcctccagagtggctgggaccacaggtatgtgccactatgcctggctaatttttatattttttgtagagctgggatttggccatgttgcccaggctagtcttgaactcctgggctcaagcaatcctctcgccttggcctcccagagtgctgggattacaggcgtgagacactgcacctggcctaattttttattttaattattccattctctgtgttttaatcatctacactgcttcacattttctttgggagaccggtggtgaataaataaaaagagctacacattccagttaccatgtgccattcttacctccctagcaccaacacctgggttctaaacccaccttggccaactggttgactgtgtgtcctggagcaagttgctgcctgagacagggaggtttgttgggaggtgggctactgtgtgggttgattgtgttctttcctcttcttctgacccctgatgggcatcaccaaatttaggaaataatttcagagttctgggtctgttgcctgtacctggtgaggctggagaccaggcagtctgcagaatgctgtggtcaggtgggttcagacttcccctgccacagtgggagagaagccaccacccacgccacgcagggcggcagtagggagccacagggccatgttatctctgacacaggctagtgccttggtccctagtcagaaggacttcgtgactcgtttggaattccccttcgtgaaggcagggacagagtcctccctgtgccatgtccccatatgcacccatatctccgtagccatctctgctctgtctcttgctctgacactcttcctcctgcaagctatgtttgtgtccagctgtgagtaccgactttccccaggagcagctagaatctgatcatcttctcagctggaggcaggagaacttctgttccaagttcccacttggaacaggggttctcccccttggactctgaatgctgttctcctcatggagcctctcctggctttgctgtgcagccaatcccagccgtcctcacggagacttgctgccctcacggagggtttgttttgcatgtggttgctgaactttgattcggtgactcatgctgaggtgcaaactttaagtcccccccgcccctttaattgctttcttcctttcctttttttttttcttaaaaaaaaaaaaaccaaaaaaacccaaagcataactacttttgcagctgaacgtgactgtggcgtgcaggaagtggagcattggcatgaagtggctcctagtggctgcttggcgcacgccagctgccctcctctgactccagtggcacctgggggcctggcctcactgacgggagaacattggcgtgaaggctgctggcgactgggccagcattcattgtgaagaccggagggacacaccctgctggtgagtgcatgtcccctggctgtcagtcagtgtggccaacaccacgcagacttgagtccaggggtggaggagagagactggaaccccggggcagaggcaggaggagggctgttagaga

SEQ ID NO: 37216 - DNA, 2300 bp, Homo sapien
cactgcaacctccgcctcctgggttcaagcgattctactgcctcagtgtcccgagtagttaggactacaggtgcacaccaccatgcccgtttaatttttgtatttttagtagaaatggggtttcaccatgttggccaggctgatcttgaactcctgacctcaagtatctgccccccttggcctcccaaagtgctgggattacaggcatgagctaccatgctcagccgctttacttgtctttaaaatggagattgcaggattgtttcaagaattagcgtaatagatctgaagctccaagcactgttcacacaaagtatgagttatttaaatattagctattaacactgttaagaataggaacagtgtagttcaaattttgaaatcttatttggatttcttttccagagcctgcagtttgtaacataaatttagatgttttaaggaaatcagcattgtgggattggataggatttagaatggaaactaaataggaattgatttatgtttttgtttgtttgtaatttaggtgggagacctacctgatgcagatattaaacctccagaaaatgtactgtttgtgtgtaaattgaacccagtgaccacagatgaggatctggaaataatattctctagatttgggccaataagaaggtaatccttagaattagtgaaagagatatttagaaaaactaggtatcagttggtggttttctaatgacatattttgatgattctgtgaattctaggcgaattttgtactggtgaatttttacaggtgagtctttggacagtagggaagaaaagtatatatgtgtgtgtagacatacatacatacgtgcacacacacacacagataaataattgaatctcccactctcaacacattttcaccctaaaacaggaaatgaatggaacaatttaaatctagttctgtaatactctcaacagccttctttaatatttaaaatatttatctcattcaactcctggaattaccagcaatttatgtcaaaattaatttaaaactaaattttctaaaatttttcttttggttagttttccctgcattaatgaaaaagtctatgaagctagtatttctgtgaggaaggggactattttgtaattgattaaaaagtattatatttagggtttccttttgtttcagggattttattttattttatttatttttgtttatttttttgacatggagtctcgctctgttgcccaggctggagtgcagtgatgtgatctcggctcactgcaacctctgcctcccgggttcaagtgattcttctgcctcagcctcctgagtagctgggactacaggcatgcgccaacacgcccagctaatttttgtatttttagtagagacggggtttcaccatattggccaagctggtctcgagctcctgaccttgtgatccgtccgtcttggcctcccaaagggctggggttataggtatgagccactgcgcccggcttttaaaatgaggtttttaaaatgagacttatgacacttggggcaagggacaagccaggtgctttcaacttcagcttattggccttttcacttggttattatggtatattagttctgtaattaacattgtgcttacagtgttaaatttgagcttgatttatattaaaattcaaaaatttcaaagcttgaacttaaacatttatatatgtatgagtatgcatacattattctacagtaatgttagatgttagatattctataattcgactatatttggactagaaaagtgttgtgattttaaaagtctttagcagtagtttacttttgccaaaggaaaattaaatatttttattcttacttcagtgcttaagggaatttaggactgtaggcctatataaggcacttagagtagaatttagataatttagttactgctctggtgaactacttttaaaaaagaattgttattaaatgaatttggaaaaataatctatgaatttaactttgccttgtagtaactgacttatttcttcttcagttttgaagagtgagagtgaatgctttcttccttttttttttttttaagtcacttttaaatactttctttcagttgtgaagttatccgagactggaagacaggagagtccctctgttacgcttttattgaatttgaaaaggtatgtcataatacagacataagtttggtatttatttgcttttatatggtattaaaatgtgaaaaattatagaactttttctagtttctagagttgccctttcttttggcactccccaaaattaagtttattgtatctat

SEQ ID NO: 37217 - DNA, 2300 bp, Homo sapien
cttccgtgttcaagcagttctcctgcctcagcctcctgggtagctgggattacaggcatgcgctaccacacccagctagtttttttttttttttttgtattttttattagagacggggtttcaccatgatgggcccggctggtctcaaattcctgacctcaggtgatccgcccacctcggcctcccaaagtgctgggattacaggcatgagccaccacgcccagccatgaatattgtggtggcagtcgctgtggcgggcacctgtagccccagctactggggaggctgaggcaggagaatcgcttgaacccaggaggcggaggttgtagtgacctgaaatcgcaccactgcactcaagcctgggcaacagatcgagactccgtctcaaaaaaaaaaaaaaaaacccaaaccgaaaaaccatatttattcattcaacaaacatttatttgcacattgtgtaccaggctgtcatacgcattagggatatagctttaaacaaaacagacaagatggaatatcctggaacacacattctagtaacaataaacaaacaaacaaattcgtaaatagcatgttagattgtaaaatgtactctggagaaaaagctatatggagaaaaagaagtgtctgtggggttaattttaattatggcagccatggagggcctcactgacagggtgaccgacgccaaagcgcctgaaggaggtgaatgggagccatacaaataactggaggaagaggtccctcaaccaaggcaagtgaaaaggccatggggcaggagtatgtcagcagtgttcagggaatagcaaactgtctactgtggcttcagaggaataagaagatggcgtaggatggggtaggagaggatcttgtaaatcattataaaagctctggcttttccgccaggtgcggtggctcaagcctgtaatcccagcactttgggaggcggaggcgggcggatccacgaggtcaggaggtcgagaccatcctggctaacacggtgaaacccggtctctactaaaaacacaaaaaattagccgggcgtgatggcggacacctgtagccccagcaactcgggaggcggaggcaggagaatggggtgaacccgggaggcggagcttgcagtgagccgagatcgcgccactgcactctagactgggcgacagagcgagactccgtctcaaaaaaaaaaaaaaaaaaaaaagctttggcttttcgtcagatgtgaagttattggagattatgtgtaaaatgtcataagaaagagtgacaggcttgcccagaagagtgtctggggaataaacttgcatggcaaaatgttagttttggccaggcgcagtggctcacgccagtaatctcagcacttcgggaggccaaggcgggaagagttcgaactccttgagctcaggagtttgagaccagtctgagcaacatagtgagaccacctcccccgaccgccatctctacaaaaaataaaagaacaaaattagccgggcgtggtggcgcgcgcctgtggtcacttgggaggctgagacaggaaaatcgctggagcccgggaggtggaggttgcagtgagccgacatcgcgccactgcactccagcctgggcaacagagcgagaccctgtctcaaaacagaaaacaaaacaaaatgttagttcttagaatcggaaacccctagtagaggcccaaagttgttttgcgaaaaggagactgacgaggaaacccggaggagtccgcccaaataggtggagagaagatcccgccgcgggcgccccctggtggataaaagggccgcgcggagggccgctctgctcttgagacggacacaaacggggcacaaaacactatactgagaccgttctgagggacaggcttccaccaaaatcgccaagggcggaccaggattttcaaaacggccgcgccgggggcgggaccaacccgatccgtaagtcagctgggcagcccggcgcccgcacgccgaccggaaggaactgctcggaaccgggggcggcgccggcgagatgacgcaaaaggggtcgcgccgagggtgacgcgtggcgtagacgacgccgtcggcctgcgcctgtcacccccctcctcccggggtttgtagcggaggaggagcgggcgccatggcggttctactggagaccactttaggcgacgtcgtcatcgacttgtacaccgaagaacggccgcgtggtgaggcttgagccccactcacctgtcgccggggcccccgagcttgtctccctactttcccttctctgcgcagtccagggcagagattggctagagc

SEQ ID NO: 37218 - DNA, 2300 bp, Homo sapien
agcaactgccaagttaattctgtcttttgtttctcagattaatgtgaaggctcagtaaaccaagctgagttttccaatggacaagtggaactcagccacaaagcttgtttaaagttttgttgtaactcattagagttgtggtatggtgctttttccccaaatgatggggttttttaaatgaaattccgtagcgctcatgggtgcatgtagcaaaacaatggcctaaagagaaccatttcatacaaaacagtaaaatttttgattattaaataatactgtcaaccacttagacattatttgtccaacaaacccccactgagggcttactctagcaagctgtttgctttaaggtttggccaccctcttcctggagctcacatctatctgacgagacagataaacaataaagaataatggacagttagaccatgggaaaggctttgtaagaaaacagagagcctcaactttacctattatcttttcatatagacgtactttgtaaccttatattactaattcaaattatacagatccacatgtcatgttttctgacttccagattcttttttttttttttggagacggagtctcgctccaccgcgcaggctggagtgcaatggcgcgatcttggctcactgcaaccttcgcctcctgggttcaagcgattctcctgcctcagcctccctagtagctggaattacaggtgcgtgccagtatgcctggataatttttgtatttttagtagagatggggtttcaccatgttggccaggctattctcgaactcctgacctcaagtgatccacccgcctcggcctcctaaagtgttgggattacaggcgtgagccactgcacccggcttctagattcctttttttttttttttttttaatagactcaggcgatcctcctgcctgcgtttgctgcatagctgggagtacaggcacaaatgaccacgcccatctccaaattcatttttaattccagcagtaggaaaaaaaggaaaaggccaagtttgcagatggaacccagaagtgtgtggggcttcgctgtgaaatcacttgtagcttaacaatggcgtggggaatctcagagtaagcccggagttagttgaaaggagtctttagccaaaacgtttataatttattctggggcggggccgggggagggggcggtggcggtcagcaggcctgtgggaggagggtgttcaaaggagtaaagggggctcaaagagagaaatagattcttgtttcctttttcatgtcaaaagttttatttcatgtcaaaagttttatttcaaaggaagactaaatattactcttattctgcctgaatggccaagtttccaagtttttctcaatcaacatgcaatcctgttaatctaaaatgcttgaatttcttgctactctgctttacagggttccgtaacttttttttttttttaaatctgcaaggtggaagaaaagtctaacactttcactttagagttacgatactgaccaaaaaggcactgacagcccaggtgcgctggcttccttccagctgagcgctgtccccgcgccgcctccaggggtcggcagaatgctgaacagtaagcatggcgcatcctcaaccttggccccacaatgaatcacccgagaaaattaaaaaaccaccagggcccgagccgcagcccaggctggaaagtggggtgttcaggaagaccccagtactttttaaagctgcccgggagagtcccacgtgcagccaagggtggggaattacccacttaataaaaacttcccctgtaaatgcgatgtttcatttttaatgtataacagttttctgaaatattaccgttgttttcatcgtataggtacatgtacatgtgcacacacagacacatgcatgtgtgtaaatactaattttaaaaataatggttacgaggacatttacatcgctccagttggagtcctgtccaatcctgagggcgggtctaatgaggggccgtaccttccaagatttcactccgcccctcgacgccgcgcggcgctgcgcgtgcgcaaacgcctttccctggcgagccggatctcggagcgtccccgcgcctctccgcggccgcccggggaggggagggcccgtcccgcccctccccgtctctccccgcccctccccgtccctcccgccgaagctccgtcccgcccgcgggccggctccgccctcacctcccggccgcggctgccctctgcccgggttgtccaagatggagggcgctccaccggggtcgctcgccctccggctcctgctgttcgtggcgctacc

SEQ ID NO: 37219 - DNA, 2300 bp, Homo sapien
ggataaattgtgtaaaatagaaaatcagtaattgtcttggattaaataaattgttggtgcctttgttcactatattataaaatacgaaatgactgtgaaatatattgacttggcatatgcacagaatacagtctcattctcagtgaacttatcctaaatgtgacagaatagcagtaaaaagaaaaaaagaatgtctttaatccagctggttcaagtaggttttgtcctaatctaagtattagtagagacacttaattaaccaggggcttgactgcgctcgtttcctcctttctaaagtgagcataccacacagggttctgaggattaaagctaaagtgtatacatcaaacagctctattgctatccctttgcataaatggtggctgctattaaggataaaacttggtaaaaggcaagagctgtttgaatctgaagttttgttttttttttttaacacaaatgagaaaaggagaaaccctgaacttacctagcttttcctctacatggagaaaatatttaattttcttgttaacagtttctcttctcttctgactctgtgatgcttattcttcattttattgaatagttataatgaaattcaaattgctagctttaaccccacttttactttttctgggattttatattcagtattaattatttaaattagcatcctttttcattacagaagatttaactgcttaaaaatcaatcacaacaggctttgtattccaataagtttctatacaatactacatatatatgtaatataattagagaatgctacaacagatcaattgaaaatttttctattaacaggttttcatttaaccaaagtaacattgtgtgtgttgttgttgtttttaacttaaaacctagggatgcgtccttgatggcaatgagaaggcgcattgaaggtttgactccagaggaaatccgaaatctttccaaagaagaaatgcacatgcctacaactatggaggatttcgagatggctttaaaaaaggtttctaagtcagtgtctgctgcagacattgaaagatacgagaaatggatatttgagtttggatcatgctaaattctcacatgtaaactgtgagaaatgtgccttaagtgtttgaatattaaatgcagtaattcattgtactgagtgctatattttttttaactttcataatggtaagatttttttaaaaaaacccttatgattctgaataaaggcaatatttttaagctgaaaatttgttttactttagcattactagatttctattattatttcactgaccacaaatgttacttagcttggaaagctgtcttttttttctttgctttttctatttttttcaagactgtttgtttcttctagctgaactggccattcatactgggattagccaacagaccataagaaagacatcaatcttggctcttgtttgaaaccaatagctacaatggcaaaccatcacgtttcttgattcagggcctaggaaagctgactttatatgcacttttttttttttttttttttggtatataaactatttattaacagacaaggcctacagacttacttcttcttagacacacccacgatgcggccacggcagcctgtggtcttggtgtgctggcctcggacacgaaggccccagaagtgacgcagccctctacgggcccgaatctttttcagtcgctccaggtcttcacagagcttgttgtccagaccattggctaggacctggctatattttccatcctttacatccttctgtctgttcaagaaccaggctggcatcttgtactagtgtggattctgcataatggtgatcacatgttccacctcatcctcagtgagttctcccgccctcttggtgaggtcagtgtctgctttcctcaacaccacatgagcatatcttcggcccacacccttaacggcagtgatggcaaaggccattttccgccacccatcaatgttggtgttgactactcggcaaaatatgctgggacttttcagggatcactagagacatggcggcagcacaagtggcggcatgtaggcctcctgtggaagagagctatatgcacttctaacttggcatcttctctcctactgtttgctgctgttactccttctaggaagaaaaaaatattggctctagctccagttaaccttacccattgcctctgggtgccagcggataactgaaaatccctgaacatttttacacagtagctaattaaagcatgagccaagcccagtatgtcttccttcccacctggtgttatggtagcttcccttc

SEQ ID NO: 37220 - DNA, 2300 bp, Homo sapien
ggctgtagtcccagccactctggaggctgaggcaggggaatcgcttgaacctgggaggcagaggttgcagtgagccgagattgcgccactgcactccagcctggcaacacagtaagactccatctcaaaaaaacaaaaacaaaacccaaaaaaacccaaaaaaacccccaccatacttacagaaatcatctgggcctggagcttttttgtctttttttaatgttttcttgagacacagtctcactctgtctctgttgcccaggctggagtacagtggcactatctcggcttactgcagctttgacctccccaggctcaggtaatcctcccacctcagcctcctgagtagctgggactacaggcacacaccaccatgctctgctaatttttgtattttttgtagagatggggttttgccgtgttgcccaggctggtcttgaactcctaggttcaaaggttggattaggttctcatatatagaaagtttcatggcagacacatttaacatttattgaagacctactatttgtcaagtagtatgcttagtactttaaatagccatttattgtttatagcgtaactcctgaaagtagttgctatggcagttccacagatattaaaacaggcttagaaaaaagttaagggacttgattaaggtggcacaattataattctagccaagatttttctaacttcaaaatacatacgccttctgctaatccacactgcttcaaaaaatgtatctaatattcactatttattctgcagatgtttaataaaatgtgtgtcatgcaaggatcatatagtctcacacctttcagatgcaaatcctactgtcagataacagtctactagagataagacatatatagaaactgtaatttgaagtagacaagtgtcttgggatgaaagtcacagtaaagtgcaaggggactttagaggagggagagtttattttgaactgaggagttcagggggtagacatactaggaaaactgccatctgagctgggctttgacaatagggagggtttgaatgtgggaacttttttaaaacaatgttttaaatttattttattttatttttttattttttgagacagagtctcatgctgttgccaggctggagtgctgtggtgcgatctcggctcactgcagcctccgactccctggttcaagtgattctcctgcctcagcctcctgagtagctgtgattacaggcacgtgccaccatgcccagctaatttttgtatttttagtagagaccgagtttcaccatgttggccaggatggtcttgatctcctgacctcgtgatccacccacctcagcctcccaaagtgttgggattacaggtgtgagccaccgcaccgggcctgttttttgttttgttttgttaaacagagtcttgctccatctcccaggctggagtacagtggcacgatcttggcctactgcaacctctgctaccctggttcaagcaattcttgtgtctcagcctcccaagtagctgggactataggcatgtgccaccacgcccagctagtttttacattttagtagagacagggtttcgccatattggccaggctggtcttgaactcctggcctgaagtgagctgcctgccttagcctcctaaataaaatatttctttgaggccaggcgcggtggctcatgcctgtaatcccagcactttgggaggccgaggcgggcagatcacctgaggtcaggagttcgagaccagcctggccaacatggtgaaaccccatctctacaaaaatacaaaaaaaattagccgggcatggcggtgggtgcctgtaatcccaactacttgggaggctgaggtgggagaattgcttgaacccgggaggcagaggttgcagtgagccgagatcatgccattgcgctccagccggggccacagagcgagactccgtctcaaaaaaaaaaaaaaaaaaaaaaaacaatgttttttttaaaggagtgaaatagcatgagcacacatatagagatgggaagtgtggtatgtgtgattgtttcttgagggagccctggaaagtattttttaataactatacttatttttaagagacatgtaaacctaaagtgtttctttttttcttcttctttttagcttacagttgaacatgagtcttcttatgattagtgagaatgtaaaattggctcgtgaatatgcattgctgggaaactatgactctgcgatggtctattatcagggagttcttgaccaaatgaacaagtatctgtactcagtcaaagatacatacctccagcagaaatg

SEQ ID NO: 37221 - DNA, 2300 bp, Homo sapien
agactggccaacacagtgaaaccccgtctctactaaaaatacaaaaattagctgggcatggtggcgggcacctgtaatcccagctactcggggagggtgaggcttcaacctgggaggtggaggttgcagtgagccgagatcgcaccactacactccagcttgggcgacagagctacactctgtctcaaaacaacaacaaaaacccaaaaaatcttcatatataatacgcgtacgtacacgtaataaaatgtgcccagtttgtgtactgttgatgaattttaataaatgtttacacctgtgtaagcactaccctaacagaacatttcctttccatcaccttaaatatttcctggggactttcagcaatctatttcttctccccctcctcctgaatacagcctcaggcagccaaccactgatcagctattattatagattagttttgcctgttctaaaatttcttttctttttcttttttttttttttgagacagagtcttgctctgtcacccaggctggagtgcaatggcgcgatcttggctcactgcagcctctgcctcctgggttcaagcgattctcgtgcctcagccacccaagtagctgagattacaggtgtgcgccaccagacccagctaatatttgtatttttagtagagacggggtttcaccatgttggccaggctggtctcaaacgccttgacctcaagtgacccacccgtctcggcctcccaaagtgctgggattacaggtatgagccaccgtgcctggcctagaatttcttatcaatggaatcatacaatatgtattaattttgtggcctttgagaagttttttaactgtaaattggctttataaattagcatacctttgaactcacataaaggatgaaggttgaattagggtaattaatctgtacctccctgaattggttttgattccaaaaatatatactaaatatagtttcctgttccctattacaatagagttcatatttactacagtgaaactatcattttccactcagttgagacgttacaagactttaagccccatgaaacattctatttcgtgaccactgtatacccagtgccaacactgtctcacacatagtagttgctgagtaaacatttgttgactgaatggatgtatttcccctgaattgcttctacatgtctatgttagatgactggggtgcttttatttttttagagatagggcctcactttgtctcccagactggagtgcaatggcgccatcatggcccactgcagcctccaactcctgggctcaagtgatcctcttgtgtcagcctcctgagtagttgtgactacaggcgtgcgccaccatgtccagccaatttttgtactttttgtagagacggggggtctcactatattgcccaggctggtcttgaactcccggctcaagctattctcccgcctcagcctcccaaagtgctgggattacagggatgagccactgtgcccagtcgggatgctttaatgttagaaacttaattaccttgcgtttttaaaggaatgtgtgagaagtgccctattctgcctcaagtgatggcagagggtggagattgagactggaggaagccctgtgcagtacatatctgtaagtcatgaaatagcatcattttccttgtctggtcatattaaaacggtgattaaaaaatcaagaaaataaaatcccactagcagtgtgtccgagaatctttgtttacctcctccctattgttatgtcatgacatggagcccagctggggaattctgaatactaggttctaaaacaggatttgtcataaacgaattgcttgatcctggacattcacctctaaaatagacacctgacctcggtgtgtgtgtgagtgtggtgaaaatcaagtgggagggaaagtgagcaagcacctgaacaaggtacagaggcgcgcgaggtagtaccataataccatctacaccaaggtctatactatccctggtctccgctgcgtccgccgggaggaggcggtgcaagaatgcgcacgcgcggccccgggcccggccacaccctcttccgccgctcccgcccagcgacctcgctcccggggcgacgccccgcgtgcgccagagtcgccgaggtcgtccccggcaccggaagtgaccctggcgggtttgtcttcaaattctcggcgagcaggagccgcgccggcaggtggtgttgacgattgaactgggcagtactggggccgtgagcggagagcaaagtgggctggactgggtcaggccctccttcctcgctgccgggatctccact

SEQ ID NO: 37222 - DNA, 2300 bp, Homo sapien
atataactgaaggaaacttctttacactttttaataagatatatgtgatgaataaacctataaactccaaattttctaaaagtaaatgttttataagtatatcaagagatgagacccacgtatttcttttttcttttttttttttttttgagacggagtctcactgtcgcccacactggagtgcagtggcgcgatctcggctcactgcaacctccgcctccggggttcacgccattctcctgcctcagccttccaagtagctgggactacaggcgcccgccaccatgcccagctaattttttttggtatttttagtagagacggggtttcactgtgttaggcaggatggtctcgatctcctgacctcatgatctgcctgcctcagccttccaaagtgctttgattacaggcgtgagcccccatgccccagcctgagacccacatatttctagtttatttttaaatgttgtaagatattgtatgaagcctagaagacaacccttcctccaattttcatataaaggtattatgtacacctaaactgtataccgcaaattatatttttcttaatttacacgagattttattataggaaattctgaataaatattgaaatactaaaataaaatgctacaatcaaaagtactttaatatttattcacttttaaattccataactgataatatattttatttagctataaaaagaaagaaaaatactggacacaatattttaaaataaacaccaagcaaacagatgattaagtataaaaatggacattttaaaaggttttacccgcatcatttcattctctaattgttttttacgatgtagacgctgctgatgagatttgagtacattttctacatgttgctccataaagaatttaaatgcttgaggagaataactttgaatacgagattcccttcgctcttcatctttcttgtttttcctaacagtaataggtgaagttgtaatctgtttcttttctttatccccactatcaacattttcataactcttttcactctcatcttccttgggcaagcttggctgatcctctttgctaggcttactgattgactcgtatggaggaacagatgggttttggtgcagcagatgttttgggtagggtggtggtggtccttgatagtttggagcttcagcaacaggtggcatcacagtcacatttgaagcggttccctcaggaaaaggactgggttgaacagtttgaattggctgtggtatccaagaagggtgtgtaggtgctaaagcagtctgtagctctggttttaatacacgcatacttttcacaggctgttgaataggagctggtgtaattgcagtgactgttgtagcagaaggctgagaattagcagagtgacttgctctatttcctaatgggttattaaaagaatttgacctcactggtatgttaggttgccatgtagggatttcatgcccactgctcggggatgactgggctggagcagaagatgactgaggccaatttgtttgcagtccaggtacactaatgttatatagttccatgttatgactatttctgtttggcaccatcatagactgaggaatacttccatttgtatatgacgaaggagcagcagatccccctgtttgtaaagcagaagggctttgtccattagctgctgtcagaggatatggaggtggtggctgccgattcacagtgccagcagggacaacattttggtgtatcatgaaatcagtttgtccagtaccattctgcattccaggtctccctgatggaaagttaaatttgctagaactctgcatgatgattggttgtctgccaacaggaacagaactaatgcctctctgtccttgattaggaggattcatgggggaagtgttgagaggtggtggaggatagccctcttgccatgccccaggtgggacaggagagattcgggagattacgtattccatgtttccagaatagcgctttgtttgagagtttggttcccatgaagggggaggtggagttgtacctcttggagggggagtctggcctcttggaggtggtggaggagtaacactccttacttgaggtggtggtggggggttcactctctgtccgttgctagggtgagcttgaacaaatgctgatataccagatccagacaaaggtcttcctacatctgtctgtgagttgggactctcagaatgataggccacactttctcctagtggcgggccatgcctctgaggaactaaggattctttagaacctttccagctctgtttgcggttaactgattgc

SEQ ID NO: 37223 - DNA, 2300 bp, Homo sapien
ccagactggtctggaactcctgacctcaagtgatccgcctgcctcggcctcccaaagtgctaggattataggtgtgagccaccacacccggccaataaatgtttgaataaataaaggagaagggataaatctgcagaatgtcaaataatttatttgaattctccactttatttattttatttatttattttttggggacagagtctggctggattctccactttcaagaagatggagcacaactccccattccttaagagtgggtggcacatagtctggtgtcttcccctaagatcgtatgaatttctggaagggtttatgttctcagggccacactggtctccagacttcttccatgtacactgccccctaattcctttctaaggtcacacaagcatgaaatcggattctacatctattgctaaaaacaagccccatttccatgaagcactgaagaattgagtaggctgaaactggaccaagatcttccatcacaataatataaaaacctgcaaatgtgatggcaggtatcaccattcccacacatccagcacccacagtaagtatttccccaaccatcatcactctccgcacctacagtccccaatgctttgcatctcgtcagttctcttcctgatcattccacctctgctttccctgctcttttatctctcgccctacttcacaggagtaagcctcctagtcctacacagagcaatttactcagctccctgaattatctaggaatttccccaaagactagagtttgtggagatactttcctttaggtttagagagcattgaggagcttaagtaccatgggttgatgacagacgtgacaggattctgggggcagtctgcccttccagatgcataatccttttggatagggcaagcagacctgtggacatattagattcctataattcatataattttagggctgaaaaggtctttatggggcacccttacgttgaagaaagtaagccctggggctctttagtgacccaccttgggtcacattgccttctacaaactctgtgcttgtagaaaatagactttcaaccaaatgttcttggaacataatctttttttttttttttttttttttgagacggagtctcgctctgtcgtccaggctggagtgcggtggcgcgatctcggctcaatgcaagctccgcctcccgggttcctgccattctcctgcctcagcctcccgagtagctaggactacaggcgcccgccaccacgccgggcaaatttttctggattttttagcagagacggggtttcaccgtgttaggcaggatgttctcgatctcctgacctcgtgatccgcccgcctcggcctcccaaagtgctgggattacaggcgtgagacaccgcgcccgtccggaacataatcttttaacgggttttcacatttggatttctagatacagtaagtagccagttattactttaacgtcagaaaaagatgtctttaatttttttgtactctgtagtagaaaaattacgaaagaaggtacttgaaaacactaactgtatatttcctagaggaaaaactggcaaaggcgatcttcacaaagggtggaccgtaccttatacatcaaacccaacgatcccatcccacactttacattcagcttaaccagaagtaaaacctcttgtcacaccgtcaccggtattccaattatggcaataacgatctccttctacggatgcggttgacagataagatctctaaaccgctgctaatcaatcggtcctggctcaagcatttcttatctgccggattcagaaaatacagatgctggaagctcaccggcttgttcggggaaagaacgctaagcaagaataaaattttatttcaaagcgccaaaaatctggaattctgaggtccacagggaggtttcccagagcaactcagttgttcccttctgagaacgtagctccgtgaaatgcacatccctactcggtccagagaaatagatcaatggggaaaaggattgaatcaaccaagtaggctgggcgggagacagccttaacccacgggcgcgggcgagtcgtatgggcaggggcaggcgggagcgacgtggggcgacgctcacgaacgatcagagctgcgggcgacgcaacgaagcccggaggccgcaggctgcgcgctccctcgcagcagccgggcgggcaaaagcccccagtcctcggcccccgcgcaagcgacgccgggaaatgcccacatccgggaaacctgcagcggagtgcggcggcggcgacactgagtggaaggcaaaatggcg

SEQ ID NO: 37224 - DNA, 2300 bp, Homo sapien
acttgaggtcaggagttcaagaccagcctggccaacgtggtgaaactccgtctctactaaaaatactaaaaattagccaggcatggtggtgggtgcctataatcccagctactcaggaggctgaggcaggagaatcgcttgaacccgggaggcagaggttgcaatgagccaacatcacaccattgcactccagtctgggcaacaagagtgagactctgtctcaaggaaaaaaaaaaatgtccaggcgcagtggctcatgcctgtaatcctaccactttgggaggccgaggtgagtggatcacctgagatctggagttcaagaccagctaaccaacatggtgaaaccccatctctaccaaaaatacaaaaaattagcccggcgtggtggcaggtgcctgtaatcccagctacttgggagggtgaggtaggagaattgcttgaacccgggaggcaaggttgcagtgagctgagattgcatcactgcactccagcctgggcaaaaagagcaaaactacgtctcaaaaaaaagaaaagaaaatcattgctaaaacatttaaccctattactttatgaaaaagcttattttattttatttttatttttttaaatagagacagggttttgctatgttgtctaccttggtcttctactcctggcgtcaagcaatcctcctgcctcagcctcccaaaagtgctggaattataggtgtgtgcccagctaggaatgactgtcttttacggaaaagtttttttttaaattggtaagttgtcttatttttcaattcctgtgtcattaatatatgaagattatattattggaaaaactgagaaagatcctaatgaaatataaaaatgaatttctaagaggcaatatccaatattggttaatgccaagattctgaatacttctggtctttatcacagaaatagcaactgacttctaccaaaccaaaatttggaaatgttccaagaatttggatccagtctcagatggagggctttttattttttatttgttgattatttatcaagaaaaactatttcttagcccacatatgtatgcttcatactttaggaacataggtcagtgacaaacttctacataattcaactcaaagaaattctctctctctttttgaaacagggtcttgctctggcgcccaggctggagtgcagaatggcatggtcatggctcactgcagccttgacctccaaggcttaagcaatccgcctatctcagcctcctgagtagctaggactacaggtatgtatcaccatacctggctaacttttgtatttttaacagacatggggtttctccatgttgcccaggctggtctcaaacaactgggctcaagagatctgtttgccttggactcccaaagtgctaaaattacaggcatgaactaccgtgcccagccccaaagaaattctatatattccaaaatcactttcaattctgaaagataccagtcttcctcatttcctcaaaatctgttttgttttgttttttttttgagacggagtttcactcttgttgcccaggctggagtgcaatggtgcgatcttggctcaccacaacctctgcctcccaggttcaagtgactgtcctgcctctgcctccctagtagctgggattacaggcatgtgccaccacgcccggctaattttgtatttttagtagcgacgggctttctccatgttggtcaggctggtctcgaactcctgacctcaggtgatccacctgcctcggcctcccaaagtgctgggattacaagcataagccaccgcccccggccatcatttcctcaaaatcttttatggaatcataatttctatagaaatctaataataaaaaaaattagctaggtgtagtggcatatacctgtagtcccagctactcagaagggcaaggcaagaggatcacttgaccccaggaggttgaggcttaagtgaggtaccatgccactgcactccagcctgggcaacatattgagaccctgtctctacaaaaaataaaaaattagccgggtgtagtaggggtgcgtgcctgtagcctcagctactcgggaggctgaggtgggaggactgattgagccagggaggcaaggctgaggctgcagtgggctgtgatcatgccactgcattccaacctgggtgagagagaccccatttttaaaaaaatatatagggccgggcgcagtggctcacacctgtaatcccagcactttgggatgccaaggcaggcagataacctgaggtcaggagtttgagaccagcctggccaacatggtgaaaccc

SEQ ID NO: 37225 - DNA, 2300 bp, Homo sapien
tttcagtaatgtaatccacaaattaatgtgttaggttgtttatagctactggctttaagccatattgaattttaattgcattttaagagggagatccctgattaaaatttggtagagcaagcataacttgacggggttggtactactatgcttcatttagtaattatttgttatagtgattcagagcctttactctttgaagtttgtattatttcatggagaacttatttctgctctttcaatgattgtttaatggataaaatatactccagatgtaatgattgggggaaaaatataattccaaatattttttctgagcagaaatccccctttgtaggtgtacaacgttctctcgtaagaaaatagaatgtgtcacactgaaaaaatagttacataaactaagcattaaataagatgataaataatatttagtatataattgatgtatgagtttttaaataatttaacaagtggaaatgtgatttgtacatcttaccatcggattgtctttcattccatgtctccaaattgaagtgaaaatgaataattgtggccttgaattatttcaaaattgtactatttagaaatatatctaatttagttcattttttttggtatcattaagattcagccaggctgggcgtggttgctcatgcttgtaatcccagcactttgggaggccgaggcaggcagatcacttgaggtcaggagttcaataccagcctggccaacacagtgaaaccccgtctctactaaaaatacaaaaactagccaggcatggtggcacgtgcctatagaccccgctactcaggaggctgaggcaggagaatcacttgaacctgggagccagagtttgcaggagaatcacttgaacctgggaggcagagtttgcaggagaatcacttgaacctgggaggcagagtttgcagtgagctaagatcgtgccattgcactccagcctgggcaacaagaacaaaactctgtctcaaataaaaaaaagattcagccagtagctccagccactaagttgacacttagttaccatataaaacatgtttcttggctgagcatggtgactcatgcctgtaatcccaacattttggaaggattatctgcggtgagaagtttgagaccagctagggcaacacagtgagaccccatctctaccaaaatttcttaaaatagcctggcacggtagcatgtgcctgtagtcctagctacttgggaggctgaggcaaaaggctcttttgagcccagcttgcagcaagctgtagataggccattgcactgtagcctgggtgacaagacaagaccctgtctctcttttttttttttttctttgagacagagtcttactctgtcacccaggctggagtgcagtggcatgatcttggctcactgcaacttctgcctactgggttcaggcgattctcatgcctcagcctcccaagtagctggaactacaggcatgtgccaccatgcctggctagtttttgtatttttagtagagatggggtttcgccattttggcctggttggtcttgaacctcaagtcatccacctgccttggcctcccaaagtgctgggattacaggtgtgagccactgagcctggtctcttaaaaaataaacaaaaaaaaacaggctgggcacggttaccagtcatcccagcactttggaaggccagggtggctagatcactggagcctgggagtttgagaccaacctgggcaacatggagaaaccccatctctacaaaaatacaaaaagttaaccaggcatgatggtacacacatgtactcccagcaactcaggaggctgaggtgggaggatacctgagcccagggagtttgagcctacagtaagcaatgattgcagcgctgcattccagcctgggtaagtgaggccttgtctcaaaacaaacaaaaaacgtgtttcctgtgttacacaaagataaattatactttatttgattttgacgtcattgttatctcccacaaaaggactggtgaccgagtgccactccactgtgttgatagacatcccaaccaacagcatgttgtagctactggtggccaagatggaatgttgagtatttgggatgttagacaaggtactatgcctgtatctctgctgaaggctcatgaagctgaaagtaagtattgtgaagatacagaaagtttatattgggtgagttatatgacatataataagcacctttccataatgatacatgtggatcattttacatcatagcttttaatggctgaattgtgtaaatttaaatagttatgtaatttc

SEQ ID NO: 37226 - DNA, 2300 bp, Homo sapien
gcagaaaaaggactgggaaaggggatgtagatttaatcatacttttttattaattgactgtcgactatgtgctaaataccgtttggggagctttacaaaaattaattattgttgcatgccagtgaatcaagtatcgttactttgttttactaatgagaaaattgagactaatatatcttgagcatgtactatgtgacagatactgtgcagggggataacatcattttgttttttgaattctcataacaactccctaagtagagattagtgctcccgttttaaagatttaccacgatttagtgaacttaacttggccaaagtctcaaaaccagtaatgagtggtggggatgaaattgagttttcttttttttttttttttccaagatggagtctcgctctgtcacccaggctggagtacagtggcatgatctgagctcactacaacctccgcttcccgggttcaagcgattctcctgcctcagcctcccgggtagctgggactacaggcgcaggccaccatacccggctaattttttgtatttttaatagagacggggtttcaccatattagccacgatggtctctatttcctgacctggtgatttgcctgcctcggcctcccaaagtgctgggattacaggagtgagccatggcgcccggccgaaattaagttttcaaatcctggtgtggagagcccctgcattttccatagaaagctacctagccctggtgcgcgcttgtaatcccagctactctggagtctgaggcaggagaatcgcttgaacccgggcgcagaggttgcagtgagccgagagtgcgccagcttgggcaacaagagcgaaactctgtctcaaaaaataataataataaataaataaataaataaataaataaaataaaaaagaaagctatctagctctaggaaagatacattttttttttttggagacgaagtcttatactgtcacccgagctggagtgcagtggcgagagctcagcttactgcaacttctgcctcctgggttcaagcaattctcctgcctcagcctcccgagtagctgggacaacaggcacatgccaccatgcctggctaatttttgtatttttagtagagatggagtttcaccatgttggccaggctggtcttgaactcgtgacctcgtggtccacccggcttggcctcccaaagtgctgggattacaggtgtgagccaccatgcccagacgatattttcctttccttttttttttttcttttttatgacgagtcttgctctgtcacccaggctggagtgcagtggctcgatctcggctcactgcaaccccacctcgtgggttcaagtgattcttctgcctcagcctcctgagtagctgggagtacaggcacatgccagcacgcccagctaatttttgtatttttagtagagatgaggtttcaacgtattggccaggctggtctcgaactcctgacctcgtgatccgcttgcctcagcctcccaaagtgctgggattacaggcgtcagccaccgtgcctggcttttcttttttaaaatttttattctttttttgaaactgagtcttgctctgtcaactaggctggaatgcaggggctcaatcttggctcactgcaacctccacttccctacaaccccaactcatttttgtatttttgtagagacgaggcctcgccatcttgcgcaggctggtcttgaactcctgagctcaagtgatccgtccacctaggcctcccaaaatgctgggattacaggcgtgagccactgcacccagccaggaataatattttcctaaggttttattgtgttggtcccaaattaaatcaattgtgggtgaatgtgtctaggaaaaaatattgtttattcatgaaaatactttgtatggcagtttggcctttcagcttcattaacacattttatttccttagcactcatggctctttgctttttaaaattgttataagatttgctactaattgagttaaataaacaaatggacttcctccctgctaatatttctgaatctttaacaagcagaaattttctctttagttttttgaccaggaaagaattgtcgctgcttcatcaacaggatgtgtaacagttttccttcaccatccaaataaccaggtaaagaactttagtttgagaagtgattttttttttttttgaaatggagttttgctcttgttgcccgcgcactggagtgcagtggcgcagtctcggctcaccgcagcctccaccttctgagttcaagtgattctcctgcctcagcctcccaagtagc

SEQ ID NO: 37227 - DNA, 2300 bp, Homo sapien
tatttttagtagagacagggtttcaccgtgttagccaggatggtctcgatctcctgaccttatgatccgcccgcctcggcctcccaaagtgctgggattacaggcatgagccacagcgcccggcctccagtaatcttttagaaggaaacaaagctaagacatctgtgccactatatcagcacaattttcaaattctagttcttatccgattttgtaaaatgtgacactggcctgcttccaatccaaaatcaacattacctattttctgggattatgtgaccataaatgaaactacaggcaaaactggtttctttttgtttttttgcttttgattgagacggagtctcactctgtagcccaggctggaatgcagtggcatgatcttggctcattgcaacctccacctcccaggtcccggttcaagcaattctgccgcagcctcccgagtagctggaattacaggcacgcaccaccatgcccagctaatatttttgtatttttagtagagacagggtttcaccatgttgaccaggctggtcttgaactcctgacctcgtgatctgcctgccttggcctcccaaagtgctgggattacaggcgtgagccaccgtgcctggccaaaacagtgttctttacttcaatattaaacatgaataaaattgttgatttgggactgtaacccacttaatattttccatttcatctttctacagtttcttgatgatcttccatttggagaaaagaaaaaagtcaaatccttgataggaaactggtaactctaaagctgacccagatggattgcatttacatgcagtgcttccgtaaactgtccctgtgaagtaggactaccaatatcacataaaaacaacagtagcataatggccctttttaaagaaataaccaacatacagttatgaatacctatagtgtaaaagagcttcattttttagttgaataagtcatatctcttgtattcagtaggatttacattctaatgggggaggaatatgcatctaaagaaaactaacataagatatatccaaaatatatgtcattagtggtctagatatcaaatgctagctcacgcctgtaatcccagcactttgggaggacaaggcagttggatcacctgaggtcaagagttcgagaccagcctggccaatatggtgaaatcccgtctctccaaaaaaaaaaaaaaaaaattagccaggcatggtggcgcacacctgtagtcccagctaccctggaagctgaggtgggagaatcacttgaacctgggaggcggaggcagaggttgcagtgagctgagattgtaccactgcactccagcttgggccacagagaccctgtcttaaaaaagaaaaaaaatggtgttgatttagatcaacattggctggggtcgtcaggaaatggtaaaggaaagaacagatccttgaaggataggcaggattctgaggagtaaagaggaagggaagaatattataggtgtaaccaaaagcacagaaggaacctagaaaactgattcctgggccgttgacaataggtatcacaaacttcattcttaatcatgcacgtaattgaattgatcaaagctaggcaattggcatcaaaactaaaactggagtctttcagaattccaactccaggctctgacagtgtgtattaactttgaagcaaagtatttgtttgggagacaagagggagaggtttgggatagtaggttggcactttattcgaggtacttccacgagtatttaaggatttttgaatcgttttctatgcgcagtgacctgcaactgcttaggtgtggtttcaaggtggtttctactgcattgtttttgttctgtttttgcacttaaattttacactgcacaattattgaacacaagaaaatactgacattgcagattaggagcaagtcctactgctcaaaggccaaagcgctcttgcctttgctcagagctgctctgtgagatgggtgggcctctcagtctaggtactgactgtgcccacactggctatcgacgagaattgactctctgcagccaccgtctccgtcctaaagtcccatccaatcagggttccgcgggaagaggcggtgctgagaggcgcgtactgtgcttgctttttgcagtacctgctgcggccgctttcggcatggaggaaatttatgcgaagtttgtgtcccagaaaatcagcaaaacccgctggcgaccgctgcctccgggaagtttacagaccgcggagacgttcgctacaggatcttgggacaatgaggtatcgccgctgatagggacgag

SEQ ID NO: 37228 - DNA, 2300 bp, Homo sapien
ggatatatcttatgttagttttctttagatgcatattcctcccccattagaatgtaaatcctactgaatacaagagatatgacttattcaactaaaaaatgaagctcttttacactataggtattcataactgtatgttggttatttctttaaaaagggccattatgctactgttgtttttatgtgatattggtagtcctacttcacagggacagtttacggaagcactgcatgtaaatgcaatccatctgggtcagctttagagttaccagtttcctatcaaggatttgacttttttcttttctccaaatggaagatcatcaagaaactgtagaaagatgaaatggaaaatattaagtgggttacagtcccaaatcaacaattttattcatgtttaatattgaagtaaagaacactgttttggccaggcacggtggctcacgcctgtaatcccagcactttgggaggccaaggcaggcagatcacgaggtcaggagttcaagaccagcctggtcaacatggtgaaaccctgtctctactaaaaatacaaaaatattagctgggcatggtggtgcgtgcctgtaattccagctactcgggaggctgcggcagaattgcttgaaccgggacctgggaggtggaggttgcaatgagccaagatcatgccactgcattccagcctgggctacagagtgagactccgtctcaatcaaaagcaaaaaaacaaaaagaaaccagttttgcctgtagtttcatttatggtcacataatcccagaaaataggtaatgttgattttggattggaagcaggccagtgtcacattttacaaaatcggataagaactagaatttgaaaattgtgctgatatagtggcacagatgtcttagctttgtttccttctaaaagattactggaggccgggcgctgtggctcatgcctgtaatcccagcactttgggaggccgaggcgggcggatcataaggtcaggagatcgagaccatcctggctaacacggtgaaaccctgtctctactaaaaatacaaaaaattagccgggcgtggtggcgggtgcctgtagtcccagctactcgggaggctgaggcaggagaatggcctgaacctgggaggcggagcttgcagtgagccgagatcgcgccactgcactccagtctgggcgacagagcgagactccgtctcaaaaaaaaaaaaaaaaaaaaaaaaaaaagttactggactagatgatggctggattctgtcagtctcaggtctaattaggagtcagcgatttggacgcgacaagcaatgttctcagtgagcttctcactcatggtcttgcagagctgagagcaataaagccacggtggaatttgtgaggcttaattaggtggaaatgcacacttacgtcgggagaataacacgttcaccaaaggacacagtggtattttttaaccaatcgcaactctgtacgttggtattattctaagggagcaaagctttgccccaacccccacccccatgtcctggtactcttccactctgagagctttagaaccggggttccaaagtctctgcttagcctaacagtgacgtgcttgtcacaaagccagaggccggtgtactcgggttagagagggcctttgtcgttgggttttattcttattgtattattcgggctccaccgacccaaatattagtcaactgggttgggcgaggtaggacggatgaagcccaccgtctaacaatctggacatctataggagcagatccgccgctcgaaacagctgacccagcgacgactgcggaaccactagcagcgtctgcacagatcgaccccgccatcccgccgtcccgctcggtgaccggagacacagccgggaacgcgactgatcaggctaccgagccgggccgcagggcgaaagcggtgcggtccgaggcctcagaaagggacacgcagcagcggaagtggcgctgactcagcccggcctccctgcagtcccctggcagcggtagcagccacaggggcgggcggctgggccacacgcctcccccgccctcggccccacccggccgcaccctaagccgcgcggcgtcacagagcgcatgcgtgccgcgggggatgccgggagcgcgcagtggcggcagcggcggcgacggcagtaacagcggcagctacagcggggacgcgagcggggcggtgacggtgtgggaggtggtctcactcttgggaaaactgctgggcaccgtcgtcgcgctgaaggtggttctgtacctgctccgagtgtgcttagcgatggcctgga

SEQ ID NO: 37229 - DNA, 2300 bp, Homo sapien
tgatttgagaaatatcgtgcctggaggacagattggaatattctgatctagttaaattgggagttgtggatccaccttggactagaatccatgtaacttgctataaatgtataatcagcagacttactagaatgtaagctccagggagttggaaattttgtctgctcttttttatcatgatggtatcctaaacatctaaaacaatgcctggcacataataaggactcatattttctcagatgttttgctcattttgtagaggttaagtcctcattaatggatatcagtgattttttttaaggttagaaatgccatttaataaatgactcattctctatacttgacatgtttatagttttagaggatgtattcattttaaaaaatcatttggtttctgagttgtttttcataaaatggcattaatgtttttcacacatttaccatgtgtgaaagtactttgtgttttaagcactagagcctgtgttctaagtgctaccccatttttatgatggggtttatgcctttttcctccccattttgtactgaggaacctgattcatacaaggaatgataggccgggtgtggtggctcacgcctgtaatcccagcactttgggaggccgaggcaggtggatcacctgaggtctggagttcgagaccagcctggccaacatggtgaaaccccgtctccactaaaaatacaaaaattagctgggtgtggtggcacacgcctgtaatcccagctatttgggaggctgaggcaggagaattgcttgagcccgggagacagaggttgcagtgagctgagatcacgccactgtactccagcctggccaacaaagcgagactttatctcaaaaaaaaaagaaggaacggttaacttgccaaggtatgtatgtatgtaagtgatgacacttagacaagaacccagatagtttgacttcaaagcctttatgtgttaattttttaaatttttatattttttcttgaaacatttatacttaatattttaatttacaaataaatatgcaaagaagggatttttgttgttgttgctttttgtttgttttctgagacagggtctcagtctgtcatccaggctggagtgcagtggcacgatctcaactcactgcagcctctgcctcccaggctcaagtgatcctcacaccacatcagcctcctaagtagctgggacttaggaggcacatgctaccacacctggctagtttttgtattcttttgtagagatggggttttgccatgttgctcaggctggtctcaaactcctgggctcaagcagtctacctgcctctgcctcccaaagtgctgggattataggtgtgagccactgtatatattttcatgttttctactaaaagcagtagaaacaagtgtagaaattccttcccatcaggcgggaggcagggtgtgtggtggctcagtcctgtaatcccagcactctgggaggccaaggcgggcagatcacgaggtcaggaatttgagaccagcctgaccaacgtggtgaaaccctgtctctactaaaaatacaaaaaaattagctgggcatggtggcgggggcctgtagtcccagctactcaggaggctgaggcaggagaattgcttgaacctgggaggcagaggttgcagtgagctgagatcgtgccactgtactccagcctgggtgacagagcgagactctctctcaaaaaaaaaaaaaaagaaattcctccctgtcaaattctttatgtaacattttaatatttaaagttatactttagatggaatttaaataaaaaattattgtactactattaaatattggtaattttcttcaaagttctagatttaatctaagaaagatataatttttcttagtattacaagttttattcaatgagagtgatagttgagaaagttgtatatatggtaaataatttatgataaactgagtgtttagcaatctatagaagccttaagctatttttgttttctctttgtagaatatgactttcgataaggaaaaacttcaataatactttagaaaaacaaatttagcccaatgagctactgaattgttttctcttttccaggttggatgtactggaaaagtcataggaattgatcacattaaagagctagtagatgactcagtaaataatgtcaggaaggacgatccaacacttctgtcttcagggagagtacagcttgttggtaagtatcagaaaactttaaaaatttcttcagaggatttttattttcagaagatccaatgcaagctaaataatactcagaggtaattat

SEQ ID NO: 37230 - DNA, 2300 bp, Homo sapien
tattttcatcccaaacatctacaaaacaattcctagacaaactcccctggggaaaggaagggcaacgaagcaagcaagaggaaaaacaacccagaaacttctcatagtaacctgaagtttttgtttctgtttctgaggcagtgtctccctctgttgcccaggctggagtgcagtggcgcaatctgtactcactgcgacctccaccaccacagttcaagcgattctcctgcctcagccgcccgaggagctgggatcatagacaggcgccaccatgccaggataatttttgtgtttatttctttttagcaaagacgggttttgtcatgttggccaggctggtctctaactcttggcctcaagtgattcacccgccttggcctcccaaagtcctggggttagttatgagccaccgtgcctggcgtctccaagtaatctaaactttaaaatttttgttctatggcatattctttccttgtttattttccttttcaaaggtttcctctgggtttataggaaagctcactttggcaatgtcagtttcttccaggtaagtagtgagaacacagagaaaagactttgtttctttgctgctgggatattttggtctgtgtttgggcagagaggatgtgtgtgcaacagccgtggtgggcctcagagatgctgatggggggtccaagtgaaagtgctgcctgcctccacttcagaaggaaagctatggagtccttcccagtgtttgcctcaaggccaagcagtcgcagggtgaccctttgatatctgctcccctgacaaggattctgagcctcatctaaggtagaggtggggagggaggcaggatgtgatggacacagatttccagactctttcaatggatccacaggttttggagaatccacacttccaaaggggctgagctccgcccccatcttgctgatatcattcgtgctattataaatcaaacagcaacagggcatgattaaacacacggagcctgaccacacgtgggcacaatcaaggtctcttattccctccgtgacattcatgtccaaccactaccatttttgtgcctcctgtatgtgtcctgattctctcattcagagcatctacaaaaagtcaaaccgtcgaatcagcatcatttttagtccttaagaaacacgctttaaagtttcctattttcttttcctttttttttttttttttttaagatggagtttcgctcttgttgcccaggctggagtgcaatggcgcgatctcggctcactgcaacctccgcctcctaggttcaagcgattctcctgcctcagcctcccgaatagctgggattacaggcgcatgccaccagctctggctaatttttgtatttttagtagagatggggtttcatcacattggtcaggcaggtctcaaactcctgacctcaggtgatccgccctcctcggcctcccaaagtgctgggattacaggcataagccaccacgcccggccttaaagtttcttattttcaacgaaaatcaagtcccctcttttcactttttataaaagggaccagaagttttcctcccatttttgtatgatgaaagccaccgcaggcaaagtcaggagagccacgtcaagaaaaaggagtgggtgttacgagaagcccggcatctaattagattttgctcttgcaattacttaacacaaaccatgccttatacaacccatgagactaaaacaaacttttttctctcagcatttctccccttttaagtcatatttccacgaatcctctcagatcagcctttctcttcaagcctagaaaaattccagtagcacgtcaccgcgcccgcccgcccgcttctgccaaactactgggcttcctcttccctaagacagagaaacccatgccagaaactcttctgggtgcccgcggctaaaataacttggcacgagtgtgtttcgcttccaacttggcgagggcgctgcgggtctcgagcgctctggccaaggccggcccctcagtcgcgcgcttaccctgccggggcgaggcgcgcgcggtggccagggcggcgccgtccggcgcgcggctgaggctgtagctgctgtagccgctgtgcagcgcgaacttgcagacgttgcggccgcgcgccgtgcagttgaagaggtagcagccgagcacggctgccgggggcgcggggcgccggggcagctccaccacggccacggagcagcgcggctcggagcagcaggccgccacgcattgccgccagccccgcacggccgccggcgcccgcaggaagctggcacccgccgccagggagtcc

SEQ ID NO: 37231 - DNA, 2300 bp, Homo sapien
gatttttcatttcaggtcacagagtaagtccagtccttgttgctccctcctggctgaagcagatgtcaacacttatttttaaaaaatagaaaatcatttacaacaagctcattgcaaaaaaaaaattcaacaaagtcttataaattataaaagtcagtatttccccttcagtacttgcaactcacagcccagaaataaccactgctcacggtaaacacaacattaaataatttccacttctcccaaaaagacctattgtaaagttgcagatgcaggaaaatctttgatggtgctggagggatttagaaatgaatgcccctgagaaatgctgtcctctcccctgtccacttccctaccacggaacatgtgagctagggctcactctatactgacttctctttcacggtcccaaaggcaggagtgaggtggtcaaagtctctgtgaaggcacataaaatcatgtatgtgaaagtgtttggcaaactttgaaatcatgtacaattcttagttaatattatatattatcatgttatttttaatattaataacttatataacaactagtccttggagggtttgatgataccctcagtcagcattttcatcactagtgaaagtttctcctcataacaatcctgctcaagctctccaaggtctatggcaaaaaataaaaataaaaaataaaaagcattatgttgcttcaaggtcatcttacaatgactgcagttgtgtgggatgagtatgccatatgaggaagaatctccaggccgaagtggtacagtccagacacagcctttagagctaagaggccatttcttttagcctcaaaaatcactcaaatatacccctgcaaaaactttataatttctccctttgatggaatggcaagtaacattgagcttttttctttcttttctattgctaccttttaattttacctcctactctgatctggatctgcaagcaatgggttcctaaatgtcaactctggagataataaacacatagcagagactgatattttcccaccaattatttattctttcaatcctaaaaaatacagacacttaacagtgttctatttacaatgtgcgcatccaggcaaaaatttccggacaggctaaaaagcaagaaaatgcgatccacaatcaggagaaaaatgaatcaacagaaactgattcagaaacaaacaagatgcagatgctgctcacagaagtctagaacgccaaggtgaagcccccactgggttggacattttcttattccttatgtcatttaaagcacaactcccgagattttacgtgatataaccgctagaggcctctctgtcacaggctgtattactcccaggtccccatgttggctgtgttcagattttttgttatatttgtggaaatctgagtgcatgtgacgactgctatttatgggttttgtttttatttttaaagacagggtcttgttctgtcccccaggctggagtacagtggtgtgatcacagctcattgcagtctcgaactcctgggtccaagccatcctcccaactcagcctcaggacttacaggcgagtaccacctcaccaggcttgatttttgtgtttttaaacagactgaacatctttcagtacttcccatccccacccctcccggccctgactccgccaccccaaccccgccccactttgtactacccaagcacatcttgggaacatgatgcggaaagtcagggacgctggaggtgaaggactgatgacgcgctacggtggtcctaggtgcgcgtgccccctctctggagtagtcccgggggtcacgaggatttgaagacaggccctcccttcccactgcccccattcccccgaatgccaagcccctgtgggcaggcgccctgggcaggtgtggttggttgctaaagcctgctgggcccagacatgaaccctgccctagctgggcagcggcgcgggagcaaagttgttctgaggctgccctccccggggcctgctctcccagccctggaggagccggcgcgagacgcgcgggggcggggccgcgcgggggggcggggctcaccaaggctccaccccgccgcggccactgttcgcacacacctggtgctgatcaacgccgaggccgactcgtcgccacccagcgcgccgcaggccggggcggagaggcgcagggcgctgggcagtctccggcgagggcaaggagcggtgcccggctgggccggctatgtctcccgctactgcggttcccgccggcgcccgcgacctcgggggagcagccgggttcgggggcgccgcgctgt

SEQ ID NO: 37232 - DNA, 2300 bp, Homo sapien
gaccaatggaacagaatggaggcctcagaaataacaccacacagctacaaccatctgatctttgacaaacctgacacacacaagcaatggggaaaagatcccctgtttaataaatggtgttgggaaaactggctagccatatgcagaaaactgaaactggaccccttccttacaccttatacaaaaatcaactcaagatggatcaaagacttaaacataagacataggaccataaaaatcctagaagaaaacccgggcaataccattcgggatataggcatgggcaaagacttcctttctaaaacaccaaaagcactggcaacaaaagccaaaattggcaaatgggatctaattaaactaaagagcttctgcacagcaaaagaaactatcatcagagtgaacaggccacctacagaatgggagaagatttttgcaatctatccatctgacaaggggctaatatccagaatctacaaagaacttaaacaaatttactagaaaaaaaacaaccccatcaaaaaatgggcaaagtatatgaacagacccttctccaaagaagatatttatgcagccaacagacatatgaaaaaatgctcatcatcactggtcgttagagaaatgcaaatcaaaaccacaatgagataccatctcacgccagttagaatgacgttcattaaaaagtcaggaaataacagatgttggagaggttgtggaaaaatagaaacacttttacactgttggtgggagtgtagattagttcaaacattgtggaagacagtgtggcaattccttacggatctagaacgagaaataccatttgactcagtgatcccattactgggtatatacccaaaggattataaatcatgctgctataaagacacacgcacacgtatgtttattgtggcactattcacaatagcaaaacttgtccatcaatgatagattaagaaaatgtggcacgtatacaccatggaacactatgcagccataaaaagggatgagtttatgccctttgcagggacgtggataaagctggaaaccaacattctcagcaagctatcacaagatcagaaaaccaaataccacatgttctcactcataggtgagagttgaccaatgagaacacatggacacagggaggggaacatcacacaccagggcctgtcacggggtggggggctaggagaggggtaacattaggagaaatacctaatgtaggtgatgggttgatgggtgcagcaaactaccagggcacgtatatacctatgtaacaaaactacacgttctgcacatgtaacccaaaacttaaagtataataaaaaaaaatttttttttgtagagatggagtcttactatgttgcccaggctggtcttgaactcccggcctcaagtgatcctcctgcctcatcctcccaaagtgctgggattataggcatgagccactgtgagggcctggccatttcagtttcgttaattagcatctatgatagtgcctgatacatgtagtagacactctgtgtttattgagtgactcaatatgttttattacaattacacacacacacacacacacaaaacccatctgtcatggtagaccacttgctgcctgtttgcagctagtttaattaatactggggtgtgcttggtgagagaaaatctcaaccatttaagaggaaagagtttgaacgggttagggacagtgggagaggggagaatggcgatgggagaaaatacaggaatgggcagggggtaccaggaagaaagggaaaagcaaaagaggcagggaggagaagggaagaggaaactggaggaaaggagaaggagctcacataacctccaaccatcctgctcacaccagagggggttttttttgcaggggcagcagggacaggagaggagagagagtttattcaaagttaattttgtttttaaatgtcttcttttatttttcaataaatgattatattctgaatacttggaaaacactctcttcacaaaattgttctttaattgggtctctacaggcctgacctcagttgttccagggtaaagaatttgggcagtgcccacacccacgctgttggataacatttcttcaccataccagtgagggtgaatgtgtacacgcccagcttcctgcctgttactctccacagtatgcgaagaatatccctgacttctagccctgtgcgccttcttttgtttctgctgttgctactaatagccttggagatcatggttggtgagtgtcctgagcacaagaactggctgaggacaaggaggagggagaaaggtag

SEQ ID NO: 37233 - DNA, 2300 bp, Homo sapien
gccggcctctccacacccagagagactgaactggtttctgctcctcagagagtttgcacagagactctgaggaagcagtcacctcaggcctctccatcctagagacggcagaaggacaaacatctcctgctggcacaaggtagggggtgggggatggctggtgttccaaacacccgtgcagagggaacgtgtgcatgtttgggagtgaaggaggaaagcaggggctcgagtggtgagagaaccaggggcagataatgaagtaaaagtggggttgggggagatgctgggggtgtggcggcggggacgctggataaggcagggaggacggggtggctctgcgggtcctctgcctccacaccaagcactcagggatccgtgcctccttccagtctggagtcccaatcgcccctctctccaatttgggggacagggatttctccttgttctcctgccctaactccttctttccgacttctcttgtcccattctccctcagatcctcccttccgcttatgccaaggcttccacagcctcgctctgccgggccttggcattcctagcctgagtgttgaaaccattggccgggacctcaaggcagctggggcagggagaggacggttagaagcccagggcacactgccacaaaaaggctgtgactcattttcagggattgaaaactgcagtccaattcattttaaaattttcgtctctctttggacttcaggctgaaagttctttatagcaacgggcttccagggactatgtgaaattattggtttcactttccttatcacccgcttcttacttcaattaaaattccatttcagccgggtgtggtggctcactcctgtaatcccaacactttgggaggctgaggggggaggattgtttgagcccaggagttcgagatcagcctgggcaacgtgatgagaccccatctccacaccaaaaatttaaaaattagctgggtgtggtggctcatgcctgtagtgccagctattctggaggctgaagtggaaggactgattgagcctgggagttcaaggctgcagtgagccgtgctcatgccactgcactccacctggatgacagagcaagacctggtctcaaaaaacaaaacaaacaaaaatctacttcatatgtaaccattacttcagttttgaaaccattgcctgaagctgacattttgcagttggaaaatggctattccttcccatcttcaggttggctcaggccaagctgagattcaggaccacagagggcaacaaaggtggaagggcccctttcccctttctgtatatttttcccagcctgtctgcagctctttctttttcttcagtgttaggttggcatcccagatgtcaggacccaagtataggcctggtgtgctccttcctgtgagtcatcagacttgtagaaaatattggccctgctaaggagctactcagtggtcatatcacacatatgcacgcacacacacacaagcacccatgcacacacacacacacacacacaaacacacacatacactctgttcttggcccacccccgctggtgtccccacagcagcagtattggcagggcggtagcagtgagttcctctctgtgtactctcagggcctggatgtgtacagaacaggctccactcaggacagatttgagaccccttctccagaccaagaggtggaagtgcaccctcaaaattgaggttctttaaccttagcagacagagaaccacataggggacatgtaaaaaatgtgcattcctcggctccttcaaacgcttgacccactgtcctctgagcagacaaccccttatcccccagccccagagatagagccctgccgatagtccatggttactttctttgaagtctgttccatctagttaagaaaggacagtggtaaagacccacttaccttaccaggcatcataagggccctagcatctgagtcacaggatgtcaccctctgggtctgacatgcacttgaattaactggcatactgcccggcacacagagggaacctagatgtggaacggatatgggtggtgttacaggccgcatgtttgcctgccttccaaattcatatgcagaaatcctaattctcaaggtgatgctatttaggaagtcataactcatgtgagtggagccatgtgggattaagaagtgataggagagcttgctgtctgtctctgctctccactgtgtgaggatacaacaggaagacagccatctggtgaggaagagagggccctcgccagataccggacctgctgacaccttgatcttggacttcc

SEQ ID NO: 37234 - DNA, 2300 bp, Homo sapien
ctgccatccggcctcctgcacactccagattctggccctgcctggagcagagctgactcggagacaggggtactgagctgctcctggagttccaaggtcactgctgagctggaccaggagtggatggggcggggcagggacagtctcattcagagctttgggtacagccctagggtgagaagaggctgagagagaaggggaaaagaggatattgcctgagtggctgggggcagaatgggacccaggggctctgtccagtcctcaccctaagctaagcccttcacagctgccaggaaccactgggaccctcacctgtctctggcttctgccaccacttccagatgccctcatgataattaagacaaggatacaattggggtttccttttgaggatggccgcagggaccgtccagggactgagcagaggtgtgggtgcagccatggatccaggcatcaatggttggccacagatgggtgtactgcaaagtgagctccacgcacgcacagacccctcccttgcctcctgctcccatgggaaacacaattgatcacattccaattgagcaacagtaggccactagggcttttttccctcaaaagctgtacacagatctagtatagtctcaaagacctcatgcttctagtagagaagcaaagaaatgtgtgagcatttgtcacacagggagatccggatacgctccatcactgtggatccaggcctcagggagcaggagggtgttccttcatgtgggaagatgagggacacacatgggagggggtatttgtgcgcggcttggaaggatggctggtccttgcccagggggaacaggcccaaagcaagcgctggcagttagtagctatggggagctttcatttgaacctgctctgctgagtcccctgggccatccccacacctggtggggcactgttctaaggggagctcagggtcaatctctctgatgtgctttctaaatcagcaaggtgcctcacaggttgtgattttagagacaaggttttcaatgctttgcattaaaatgcaaagattttaatgagcagagtctttttgccaatccgaattgggcagatcccagcaagacacatatttttaagataatttttaaagctgtttaattttggtaaaaaagtagaacataaaatttactatcttaaccaattgtttagtgtacaatatcttctttgaagcttctgaagacctggtgcttctgtaataaaatctagccccgggccaggcgtggtggctcacccttgtgatctcagcactttgagaggccgtgtcgggccgatcacttgagcccaggagtccaaagccagcctgggcaacatggtgaaaccccgtccccactgaaatacaaaacttaaccgggcttggtggcgcgcacctgtggtcccagctacttgggaggctgaagcaggagaatcgtttgaattcgcgaggcagaggttgcagcgaacccagatcgcgccgctgcactccagcctgggcggcagagcgagactctgtcacgaagaaaaaaaagaaaagaaagaaaaaccaaccaaccaaacaaacaaacctagcccaggctataaccacgtccactcgggatttgggatgaggccgcggggatgggactgggcttggatctgcgcacaggacggtgggttgggagcactctgcaacgcagggagagggaaggcgggtgtcgcaggtacaggcgaggacagggagaccctgtcgcggctgaacacttctgtgcattttcttcacctttctgtgcatcggtatccacattggattaatacaaaatgaaaaaattgcggtgatgattacatgagggggtcatggaaagaagcctttggcaggactggtcccgggcaggcagccagcaaagtctgactggctgaagcagggggaagtgcgcgagcgctgcagtagaaagtggggtagacttggatgagcaacttggctgagagacacctgattggctagcggctcagcaaagggggtgtgtttcctccgaggggcggggcagaaggagtgctagagtttagggcttactggagtttagggctgcattcagacgggctgcattcagacagcctgcgagccgccaggtgatccacgggctgggcttcgcttctgctgtcccctgcgatccaactccccaatggcagcggccgccagccccgcgttccttctacgcctcccgcttctgctcctgctgtccagctggtgcaggaccgggctggccggtgagttcggggatggagcctaagcggggcggaggccaaccgtgggg

SEQ ID NO: 37235 - DNA, 2300 bp, Homo sapien
tgcattccagcctgggtgacagagtggtgagactccatctcaaaaaaaaaaaaaaaaaaaaaaaaaagaatgagttcatgtcctttgcagggacatgaatgaagctggaaaccatcattctcagcaaactaacacaggaacagaaaaccgaatgttctcactcataagcgggagttgaccaatgagaacacatggacacagggaggagaacatcacacaccggggcctgtcagggggttgggggcaaggggagagagagcattaggacaaatacctaatgcatgtggggcttaaaacctaggtgatggattgataggtgcagtaaaccaccatggcagatgtatacctatgtaacaaacctgcgcattctgcacatgtatccaataacttaaagtaaaatttaaaaataaaaatgaataaacaaattgacacgaggcaaaaaaaagtgggtttaactgacacaggcaagagagaactctgcactataaactctaaccctgccctagaaaaataaactctagtcatttaaaataattataaggtgtatgatcataattttataaaaattgaagatgattctactaaaaccctaacattaaactgtgcataatggaatttcagatgatttccaccttgttctttattccttttttgttccattttcaagtgaccttttttgtttatcctcaggaactcattgctcccagctgtccccttctgtacccaccctctccttttccagggtccgccccagcccttcctctgacctgaaactatggcttccttggcactgaaggcacaggagctgcattcagcctcgggagagagtaggacaagggcaggtagtggaggtggtcttggcgcaaacgaatctaacagcgcccagtctccattgcagatggctgcatttctccacatgttatctacaagcaaaccaaacttacccctttcctgattggtttctcactctgcccaactcctacttgaaaattcatattcttccacctaacatttctttctacttcttgtcttcacaatatattctgatttattgtgcccaggaaacactggtctacaccacatcctaagttaccatctaaagtgtagtgaacaaatggacaggaaagaggccgctgccccactcactgcctctcatttattcactcacagggtaagtacagcctcagaaccaacagtgagctgtgctgtggatacttctctgaggaaaacagacaaaatccgtgctccagtggggacagcaggtgaacgtaatgagcaggtgcattgcatcaggtgtaggaaagtgacagatgattcaggtggtggggagcaaggtaatggagaggaagagtgggaagggagtctccaggtcctcaacaggctaaacaggaaggactcccaaaaaagtaacatgtgtgtcctggcttcatgccttcctgcaggaggcagagcccatgaaatgtactggagtggtccagggaaaatccagaaggtgcctttgtaacattttcaagacaaccctataaaaaaagagtacccaagaatgtattcgttaagtagtcaggagcaaacaataaatatttatgacctagcaattttattgccatttaagaaaatatttcacataaattgaaaaagtagtatgtttatttctttcttaaataagcacaaatgtttactaatggacatgtgtacctactgggcactgaacaacttctcaaactttggaagcagattggacacagccaccctgatttcctatttcatacctatttttgcagggattcttggttttttatcacagcaactgttgaaatcacagattgtaaaactacaatgtcatctaaagcaatggtgcatagtctgatgttgaaactataaaatactttggatcagtacttcctgcggtgtccagcagatggcaccactaatctttcaaatatttcaataagcccagagggtttgctcacagtgagtttgtgacatcatggcggatgagacaattgtgacatcatggtggatgagacaattgtgacatcatggtggatgagagatcaataaagagtttatttcaggggattggggcagttcctctcaccctgcagatcaagatgccctgagggcaaagagcagaggggtgctctctggtggcccagcagttctgccccaggggagaggtttctcttttactaccgcgaaaacccacaggacgctgcttcatcccagagccaaggataccaggaaggaaggtcagagtgaggaggtgtctgagtgtttcagatcacacagtgacatactgc

SEQ ID NO: 37236 - DNA, 2300 bp, Homo sapien
cattttaggaaaaatcgatatacttgaaaagccacggtggcaggaattggtcatcacccaccaggattctacactgccctacaggtgatcccaactgaggttgccagaggaacaggatgtggaatgcagtcgcgtttcagagaggaacctaaagtcagaatggaccaggggtcttgccctgacctctgcctcttcacccaacccccacctggtcaggcagtgaccctggaggggctgggatgatcctgggagagcagtgaaatggggagccaatggtgggagcatggtgaacatggagagcccagaccccacaccatctggggaggagctcatgtgatgctgggagcactgggaagacagggagcctggacacagcactcactgctcctcccatctgggacaggattggggtgggtgatgagaaaagtttcctgagtaacacagttcccaatcctggcagaataactcaccccagttgcactcacagccaagacccactcagcccctggaccagtctaacacagggcttggtaaatccaggagtgaatactactgaggcatctgccagggcataggaaacagtaacaagaggacggctcagctagtggctcagactatcttgccccacactctccaatattgagtagggagtaagccttgagcccaggaggttgaggattcagtgaattatgatcgtgccactgcactccagactggtgacagagtaagagtctgtcacacatgcttacacacacaaattaaattgtgtgagcagttgtcacacagggagatctggatgcactcactgtggacccaggtctcagcgagcaggagggtgttctgtattgtgggaacatgagggacacgcatgggaccgggcatttgtgcctagctttgaagggtggctggccctttgcccagggcgaagaggccagcagaatgcactaacagtggggaaccaccaggaactttcacttgaacctgctctgctgagccccctgtgccatccgtggacctgggcgagggaggctgctgaactgggagctcagggcccatctctctgaggagctttctaaatcagcaagtgtgtcacaggttgagattttaggaacggggtcctccatgttgtcctcgattttaataagtagactcttttggccaatctgcattgggcagagcaggaacaagacataattttttaatatatatttttaaagctgtttaattttggtaaaaacatagaagataaaatttaccatcttgaccagttgtttagtgcacaatatgttgttttaaacctctggaaccctgcctgctgctcctgtaataaaacctagcccgggccaggcgcggtggctaacgcctgtaatcccagcactttgggaggccgagacgggtggatcacctaaggtcatgagtttgagaccagcctggccaacaagatgaaaccccatctctaccaaaaatacaaacaattcgccgggcgtggtggagggcgtctgtaatcccagctactccggaagctgaggccagagaatcccttgaacccgggaagcggcgattgcggtgagccgagatcacgccactgcactccagcctgggcaacaagagcgaaactccgtctctaaataaataaataaataaataaataaataataaaacctagcccggactgtaatcacgtccactgggaactggcgcagtagtggaggggacgcgatcaggcccgtggctgcgcccagagcatgataagccagggacctcgcggcgcaggcggagggagggagagcgtcgcggacccaggcggggacagggagacgccgccgccgctgaatattcctctgcaagtttcttcaccttcaataaaaaaatgttgtgatgattaaatgagtctgtcgtggaaggaaccgtgtcttggcaggagccgggcggacacccagacaccaacccgaagggggttgggacaaaggggagggacgcccgggaaggggagggacaccgtcagggcagccaatcatatttctagccgcgtgacgctatgacccgcttgacgctatgacagcgggaaacggggggcgcgcccgtacatagggaggctttaaaaccttgaggtgattcatcttccaggctctccttccatcaagtctctcatccctagcgctctgggtccttaatggcagcagccgccgctaccaagatccttctgtgcctcccgcttctgctcctgctgtccggctggtcccgggctgggcgagccggtgagttcgtggatggagcctaagccgggcggggaccaagcc

SEQ ID NO: 37237 - DNA, 2300 bp, Homo sapien
agctcccctctgaacctgtgcttttcctctgagccccattcactcccacaactgtctcattcattcactggttcactcagcctccaaccacccttaaatcatgtcaggctcaccagctgacggagagaaaaatcatcctttgtaggtctgaaaaacgtgtctgaatcctgatggtgggtcttgttttcatttccaccccctcacagcacactcagggccatgaagaggccatggcctgggctcagagctccagctctcctcagggtgggcctggcatttgctgacttcagggagggtggcagggctcacaactgaaataggagacctgccctgggtccttagcatgtgcaaggatagggttctttgtagaatctgctcatttcatctgtgttcatagcatctgtcattttccacatgcggacatccacacccagaaagctgaagaagcttgcacaggaatattcagccacaatatgagctgacttccatatctgaatgcatgatctctagatcccggccattacaataacctttgggccacttctatgcccatcctgggcaggcctgagtctagtggccggatgcctgcagcaggggtgaggcaggagggcccaggtgtgcacacaggcccctcctcctgtcacctggctgtcctgcttggggctctcctgccagcctccttctgccttcctcctgttcccgcagtcactggcccaggtcacccggcctcaggggtggtgctgccagggacttcccagtggcctcctcctaggactaacctgagctcctgcccccagccctgtacatgggaggcttttctcacacacagatccctgggcccaccaagctattcccctcccaaatctgagaactgcccacccccgtgtgactgttgtcctgccgaccacccttcatgtagcccctcctggacagaggctctagtgcatcaggccagaaccttttggctcctgtgtccctgctcagtcacagagatggctgccatcccatgtccctgtcctgaagcatagtcaggccctgggcttggtccaggcctcctcccctttcccacagcctcaggaccctggtgattgatggtcaccaggtgaaggtctccccacatgaagactgtgtggagtgggaggtctgtgcctatttttctcattcattggggaatgggctgagtggctgggggcaaagtgggactcaggggctctgcccagtccttactgcaggctaagccctcccttgcggccaagagccactgggccctccacctccctctggcttctacccgcagatctagatggtttcatggtgactcagaggaggatgcactcgggcgtcccttttgaggatggctgcagggaccatccagggactgagccgaggtgcagatacagccacggatttgggtgttgttagacacagaagggtgtgtagcaaagtgagccccacgcatgcgtagactcttccctcggcttctgctctccatggaaacacaactgatcacatcatgattgatcacggtagccctctagggctttctttcttttctttttttttttttccagaagtcataaagggatatagaatatactcaaagaccacctcatgcttttagtggagaggcaaaaaaggttcgctccggaatggggaagcggctgcgccctggacggagaggggcggggacttcgcgactgcaggcggagggagggcgggtgtcgctggcgcaggcggtgacagggagacaccgccgccactgagtattcctatgcaagtttcttcatcttcctgtgcatcagtgtttacactggggtaatgataaatgctgtgttgaaaaattatttgatggggccatggaaggaacggaaggaacggcgtcctggcccgctcggggcccgcgcacgccgccaccaagccgcgggggcgggtcggaggggagagttgcgtcagccaggccgctgtcagatgacgagcccggggcgtgacggggtggagcatccccaaaaaagtgcatgcctaggatcccgcccagtgtatccctgcgcgcggcgggccgggctgggcagctttataaacagccgtggtgtgagcctcgaagggaaccatcagcgcctcctgtccacggagctccaggtctacaatggcagcggccgccagccccgcgttccttctgtgcctcccgcttctgcacctgctgtctggctggtcccgggcaggatgggtcggtgagttcggggatgtagcctaagcagggcgggggccaaacctgggaggttgtggactgcagcgggtttcag

SEQ ID NO: 37238 - DNA, 2300 bp, Homo sapien
tcactcccacaactgtctcattcattcactggttcactcagcctccaaccacacttacatcatgtcaggctcaccaggtgatggagaaaaaaatcatcctctgtgggtctgaaaaacatgcctgagtcctgattgcgggtctcgctttcatttccaccccctcacagcacactcagggccatgaagaggccgcggcctgggttcagagctccagctctcctcagggtgggcctggcagttgctgacttcagggagggcggcagggctcacaactgaaataggagacctgccctgggtccttagcatgtgcaaggacagggttccttgtagaatctgctcatttcatctgtgttcatagcatttgtcattttccacatgcggacatccatgcccagaaagctgaagaaccttgcacaggaatattcagctgcaatatcagctgacttccatgtctgaatgcatgatctctaaatcacagccattacagtcacttttgggccacttctatgcccatcctgggctggcctgagtgtggtggccaaatgccggcagcaggggtgaggcaggagggcccaggtgtgcacagaggccccttctcctctcacctggctatcctgctggaggctctcctgctggcctccttctgccttcctcctgttcccccagtcactggcccaggtcacccagcctcacgagtggtgctgccagggtcttcccagtggcctacttccaggactaacccgggttccttgtccccagccctatgcatgggaggctcttctcacaacacagatccccagacccaccaagctatgcccctccgaagtctgagaactgctcacccccgtgtgtctgttggcctgcagaccgctctccatgtggcccttcctggacagtggctttagtgcatcaggcgagaaccttctaggctcctgtgtccctgctcagtcacagaggtggctgccctcccatgaccctgtcctgaagcagagacaggccctgggcttggtccaggcctcctcctctttcccacagcctcaggaccctagggattgctggtcaccaggtgaagttctccccacatgaagactcattcaatggagaacgggctgagtggccgggggtagagtgggctcagctctgcccactcctcaccccaggctaagccctcccttgccaccagaggccactgggctccccacctccctctggcttctgtccatagatctagatggttccatggtgactcagaggaggacgcactcgagtgtcccctttgaggatggttacagggaccatccagggactgagccgaggtgcggatacagccatggatttgggtgtggttggacatagatgggagtgcagcaaagtgagccccacccatgcgtagacccctactatcgggttctgctctccatggaaacacaattgatcacatgatggttgatcacagtaggcctctagggctttcttttcttttttttccaaaagtcataaagggatatagaatatactcaaagacctcctcatgcttttagtggagaggcaaagaaggtccgctttggactggggaggcggctgcgcgctggacagagagggtcggggactccgcgacgcaggcggagggagggggtgtgtcgctggcgcaggcggtgacggggtcaccgccgccactgtatattcctgttaagtttcttcaccttcctgtgcatcagtgtttacattggggtaatgataaatgctgtgttgaaaaattaaacgaggcagtcatggaaggcaccgtgtcctgccccgcgcggagcccggtgacgccgccaccaagccgcggggccgaggtggagggggagggttcgcccgccggggccgctgtcacgtgacgagccccggagcagggcggggtggagcatgcccaaacaaggcagccgtcggatcacgccccttggatcccagcctgcggcggggcggaacggggctggacggggcggagcggtccaattcactagcctgaatgtgaggcaccaggcgattcctccgcccatatccgcctcgaccccgactcccgtcccctgtgccccaggtccccaatggcagcggccgcttgccccgcgtttcttctgtgcttcccgcttctgctactgctgtccggctggtccgggtcagggcgggccggtgagttcggggatggagcctaatcgggggctggagcctaatcgggggctggggccaaacttggcgggctgtggactgcagcgtgtttcagaggaaggaaagcttctagaaggaccggcgcgatctcc

SEQ ID NO: 37239 - DNA, 2300 bp, Homo sapien
gacagaggctctagtgcatcaggccagaaacttctaggctcctgtgtccctgcacagtcacagaggggctgctatcccatccccctgtgcagaagcagagacagtccctgggcttggtctaggcctcctcccctttcccgcagcctcagggctctggggattgctggtcaccaggtgtgcatcctccccacatgacaactgtgtggagaagaaggtctgtgtctattttactcatttaatagggagaaggctgagtggctgggggcagtgtgggactcaggggctctgcccattccttatcccaacagccagggatcgctgggccccccacctccctctgccttctgcccacaggtctagatgccttcatggtgactaagacaagggggcacttggggttgcccctttgataatgagtccagtgaccatctaggggctgagcagaggtgtgggtgcagccatggattcaggtgtggttggccacggattggtgtgctggaaagtgaaccccacacgtgtgtagactcctccctcggctcctgctcttcgtggaaacacaattgattacatgattgagcaagttgttcactaggtctttttaggaagggatgtagtatattctcaaagacctcatgcttctagcagagaggcaaagaaatgtgtgagcaattgtcacacagggagatctggatgcacccactgtgaacccaggtctcagggagcaggagggtgttctgtattgtgggaacatgcaggacacacatgggagggggtatttgtgcccggctttgaaggatggctggctctttgcccagggggaagaggccagcagaatgcgctgacagttgggaaccactaggaactttcagttgaacctgctctgctgagccccctgtgccatcggtggacctgggccagggcggctgctgaactgggagctcagaggtaatctctctgaggagctttctaaatcagcaagcgtgtcacaggttgagattctagggatgaggtcctcaatgctgtcctcgattttaatgagcagccttttggccagtctgcactgggtgaagcagaagcaagacataaattgttaagataatttttaaagctgcttaattttggtaaaaacatagaacatagaatttaccatcttcaccaattgtttactatacaatatgttgttttgaacctctgaaaccctacctgctgtttctgtaataaaacctagcccaggccgggcacgctgactcatgcctgtaatcccagcactttgggaggccgaggtgggtggatcacctgaggaaaggagtttgagaccagcctggccaacaaggtgaaaccccatctctaccaaaactacaaacaattcgccgggcttggtggtgggcacccgtaatcccagctactccagaagctgaggcaagagaatcgcttgaacccaggagacaaggctgcggcgagccgacatcgggccgttgcactccagcctgtgcaataagagagaaaccccatctccaaatacataaatagataaagaaataaaaaataaaacccagcccggactgtaaccacgcccaccggggactggggaagtagtggaggggacgcgaacaggcccatggctgtgcccagggcggggtgagccagggaccccgcggcgcaagcggaaggagggagagtgccgcggacccaggcggggacaaggagacgccgaggccgctgaatattcctctgcacgtttcttcaccattaataaaaaatgctataatgattaaatgagtctgtcgtggaaggaatcgtgtcctggcaggagtggggcccgggcacgaggccaccaagctgccggagcgggtgaagaagggaagggacactagcatggaaactggatttcgtccagacaatgaaacgaagaggtggaacgcgcccagtgactacgcccagtagcattaaaatctggcttttcagaatcgaggtgactcattccccggtacattccccagtaactaacagtatataagccagcctttcagcacagaggtgatttcatcttccaggatccaccttgattaaatctcttgtccccagccctcctggtccccaatggcagcagccgccatcccagctttgcttctgtgcctcccgcttctgttcctgctgttcggctggtcccgggctaggcgagacggtgagctggtggatggagcctaagcggggcgggggccaaacctgagggactgtggactgcagcgggtttcagaggagggaaggcttctggaaggacaagggagatctccccgaac

SEQ ID NO: 37240 - DNA, 2300 bp, Homo sapien
gctcaccaggtgatggagagaaaaatcatcctctgtgggtctgaaaaacatgcctgagtcttgatggtgggtcttgttttcatttcctccccatcacagcgcccccagggccatgaagaggccatggcctgggctcagagatccagctctcctcagggtgggcctggcagttgctgacttcagggagagctggaggcctcacaactgaaataggagacctgccctgggtccttagcatgtgcaaggacagggttccttgtagaatctgctcatttcatctgtgttcatagcatttgtcattttccacatgcagacatccattcctagaaagctgaagaagcttgcacaggaatattcagccacaatatcagctgacttccatatctgaatgcatgatctctagatcccggccattacaataacatttgggccacttctatccccatcctgggcaggcctgagtctgttggccagatgcctgcagcaggggtgagtcaggagggcccaggtgtgcacaaaagcccctcctcctgtcctgcttggggctctcctgccagcctccttctaccttcctcctgttcccccagtcactggcccaggtcacctggcctcggggtggtgctgccagggccttcccagaggcctcctcccaggactaacctgggctcctgcccccagccctgtacatgggaggctcttctcacacacagatcctgggacccgccaagctctgcccctcccaaatctgagaactgcccacccttgtgtgtctgttgtcctccaaactaccctccacatggcccctcctgcacaggggctctagtgcatcaggccagaatcttctaggctcctgtgtccctgctcagtcacagaggtggctgccctcccatgactctgtcctgaagcagaaacaggccctgggctttgtccaggcctcctcctctttcccacagcctcaggaccctcgggattgatgatcaccaggtgcaggtgatcccaacatgaagactgtacggagtgggaggtctgtgccgatttttctcattcaatagggaatgggctgagtggctggggcctgagtggcactcaagatctctgtccactcctcatcccaggctaaagccctcccttgcggccaagggccactgggcccatcacctccctctggcttctgcccacagatctagatgtttccatggtgactgagacgaggatacactcgggttgccgctttgaggatggctgcagtcaccatccagggacagggcagagatgcgcgtgcagccatggatttgcgtgtagctggccacagatgggtgtacagcaaagtgagccccacgcatgcgtagaccctccctcggcttctgctctccatggaaacacaattgatcatttgatcactgatcacggtaggccactagggctttcttttctttcttttttttcccagaagtcataaagggatatagaatatactttattctatatatattctatatattcctcatgcttttagtggagaggcaaagaaggtctgctccggactgggaagcagctgcgccctggacggagaggggcggggactccttggcgcaggctgaaggagggcaggtgtcgctggcggaggcagtgacggggggacacagccgccactggatatccctgtgcaagtttcttcgctttcctgtgcatcagtgcttacattggggtaataataaatggtgtgttaaaaaattaaatgaggcggtcaagaaggaatcgtgtcctggcccgcgcggagcctggggtggagggtaagggttggccagagggggccgctgtcaggccacgagcccggggcgggacgaagcggagccacagcaggcataggctccccgggtcccagcctggggtggggcggggaagggcgggacggggcgggatagggcggagcatccctccaaacgtgggcaggcgtaggctcccctggatcccggggcgggacgggaccggacggggccgagcacactcaatcactagctggcatgcgagggccgaagtgattcatacgctggtctccacatcgactgcgccttgtgtcccgggcgctcctggtctacaatggcagcggccgccagccccgcgatccttccgcgcctcgcgattcttccgtacctgctattcgactggtccgggacggggcgggccggtgagttcggggatggagcctaagcggggcgggggccaaacctggggggctgtggactgcagcgggtttcagaggagggaagccttctagaaggaccggcgcgatctccccg

SEQ ID NO: 37241 - DNA, 2300 bp, Homo sapien
ttgaggtggtcactctcttggctgtgtgttcggggtttacagtgacccaccctaaaggcagaggggcagaggtggtgcagagactggtcatcggtctctaggggcaatcaaggtaattcatctcccttgtccctgataggctcggtgcaaaacccatcttctaaagggcagctggcctcttctagcggggcagagatcgttcagctttgacccctttgtaattatggcaggagtccagggccccacaccagccaccctatttcaatctccgcagatccttccccttcacattgtgaggcttgacatgtccctgtgaagagccgcaggcatggaacactttgggaaaatccctattcaggctctcactggaaaaccccagactgagggtacaaaggcaatggatcctaagcctgggtagagcagagctgggcgctggtggatcgcagagcctgaagcgccaggagaaacctgctggttacttttattttgtctttgtagtgtcagtctagaaccccacacaggatcttctccatcataggaaagtgttccgaggaatttgacttggtatctattttatctctgagaaacttctttgagtagctgccagtaacctttagggctcttttatttaaaaacaacaacaacaacaaacaaacaaaaaaagttcatggccaggcgcggtggctcacacctgtaatcccagcactttgggaggcccaggcgggcggatcatgaggtcaggagttcgagaccagaatgaccaacatggtgaaaccctgtctctactaaaaatacaaaaattagcttggtgtggtggcgaaagcctgtaatcccagctcttcaggagggtgaggcaggagaatcgcttgaaccccgaagtcagaggttgcagtgagccgagatctcgccactgctccccagcctgggcaacagagagactccgtctcaaaaaacaaaacaaaacaaaaccgttactaaaagccgcttacttgtattcattcggacgtctctgtggtttctatcagttcctgaacaggaatgtattgttgtgtacaagaagaatatgttagtgtctccctaattttacacatgcagttttctgtttacaacttccctccccaccttattgtcctaacccttctgagaagctccttcatgtgtaactactaggctgtgatgttttgcagtagagtcaggcagtgctgttgccctcctgggtggaaggggctgtttggaatgggatggagagaaagctggcagtgcacgggacgcaacactagaaatgtgaaaccaggaccctgtcgccgaccctcttagagaaatgtttactgtctggatgcccccagacgccttgcctgagcgccgtcacgctttctgccctttggatacgaagatatccgaatgctgtgcccatgattaagcagacgcttagtaaggaaagaaaacattggtctggaaataatttctcaagcgccgtgactgccttattgcacaaacatcgcctcttcgatgtttctcacaatccagagaggaagtggcatccatcgtggcatgaataggaatgtgtgtttggagccgtggggcggggctggaggggaggggacgctacccagccaacagaggagacggtggggctaggaaaacctcctgggggagcctgcggcgcggtcctttcctgtgtccccttcgctgcgggtcctgcccggggccgcgccaggtggaggccccgagaggcggcgcgtttcctgcgctccgggattgcgggagaagcgtgagtccctgtctccgagactagaggccacggacacccgcgcaggagcatcccctggcaccccgccccacgcccgtccttccggagtctacacatcggcgacctcccgtgtctaggcgcacacatttcccgccccgcggagactcccacgccccgggccctctctgccgcaggcgccagatcccgcctctgggggctggaccgagagggtcctcggcggcttctttaaggctgcggtccccgccccgtcgtcctccccgccctcctccctctcgccgcggctcctcccgccctcccagagcagccgggcggctgggcgcgcgcggcgcagagcaggtgccggggagcccttcgcatgcggctgccgggccggaggtggtagcggcgccgggcgcgctccgcccgcccctcctccgggccgcactgaggctcgggcgcgcggggacatgtcggtggcgacgggcagcagcgagacggccggcggggccagcggcggcggcgcacgggttttcttccaaagcccccgggg

SEQ ID NO: 37242 - DNA, 2300 bp, Homo sapien
aggagcagaggcagttgccacccatggccctcaccttgtccttcccctgagctgtgaggcattgctgccttgcaggccttgcttctctctgcacatttgtcttgctcttctcttgctatggagtggtttctttattctgtgtttttagtgggatgtaaagagaagctgggccccaacacaggctctgccattttcagctgcctgcgtggggttggatcacatggactggacatgtcccctctgacaccctttcagcaggcacagggagggcactttcctgtacaaaagctgtcggcatggcaggcagcaccaccaaattcaatggtctgtggaggccagtgcttccataataaactttgtttattatcttctacagagttctctggagttagagaaccaatatgatatacatcttaaaaaacaactgtctatcacaaaaaggagtattacaatatatgatacaataaaaccatcaaaatgagtattgaaataaataacacatattcaattttttaaatagataatatatttacaacagctcaaaatacttaaattatggaatagtattcagtagaaattctctcacccttgtcccccatctatccagtttccacactccctccaaaacaagtaaccactgtttttttcactgtttattttgaaataatatagactcacaagaaattgcaaaattaataaagagaattcctgatataaccgctccttagagtatgcttttccaggaaatacatatataagtttgtataaatgtatcatattttccactctgttttattcaaatggcatcatgttatacatacgtttgcaccttgatgctaaagactgaatatgtcttggcaaaattcatgtgttggagccctaagccccagtacaatggtatttggaggttgggcctttgggaggtgaacaggtgatgagagtggagccctcattaatgagattagtggccttataagaaaaaagatgatagagatgatctgtttccaccatccactgtgtgaggttacagcaagaaggcacctgttggcaaaccaggaggggagccctcaccaggagctgatttgccagcaccttaattatggacttctcaacctccagaactatgataaataaatgataaataaatttctttctttctttctttctttctttctttctttctttctttctttctttcttttcttttctttttcttcttcttcttctttctttctttttttttttttagaggaactttcactcttgtcgcccaggctggagtgcaatggcacaatttcggctcactgcaacctccacctcctgggtggagctattttcctgcctcagcctcctgagtagctgtgtttgcaggcatgtaccaccaggcccaactaatttttgtatttttagtagagatggggtttcatcatgttggccaggctggtctcgaactcctgacctcaagtgatctgcccctctcagcctcccaaagtgccgggattataggcatgagccaccatacctggctgagaaataaatttatattgtttaagccacccggtccatagtatttttgttatttcagccataactgactaaggcactttctaaaacagacagacaaactaacacataaaaagccctactgaagtaattacataatcaagttgtcactttaattttttgtgtcacttttcctggatcaaagtttttctctgatgcaaaacatgatattctctttactccatatattggctcaggtatcataaaaaaaaaatcaaaaccctagggctgttttcacaaatatgccatttaaaatgcatggtgccaaacctctttcctgaacattttcttccagcagatctgagttggtgtgtggaaatctatttaaaaaaaacaaaaacaaaaacaagttcttcaggtgatctagctagatctagcacatgcaagttcttactcagattctggcaattgttgtctaagaatatatcgacagagtacatacttttaaaaagttaatggactggtgtataaccaaagccacaacaccccacacatgtgactgtgatctttgctcctttgcaaagtcctcacagagttgaagagttctgcactttgttccttccctggcacacctgtgtctgcattccttctatctcccggcattctccactcctgtctctgtgtgtttaaaaaccggtgtgggaagtgtgcacgcctgtgacgtcagactccagaccatgtatttcctgactcccatcttggtagccattctctgcattttggttgtgtggatcttt

SEQ ID NO: 37243 - DNA, 2300 bp, Homo sapien
tttgttttggggtgtgtgtgtgtgtgtgtgtgtgtgtgtgtgtgtacttatatatatgtcatccagtacccaaattgtacccttctaacagttatttaaatcacctagtgtaatcccttaacatgtagttatattttattttgtcataaataaaaaacataagcaaaagctgttggggaaataataaccccgaagataaccaccaataacaaacagactttctaaatctatctagaacctggcagtctccataatgggtcaacttccgacttgttccttgttgcctcagggctgttctgaaccctgaagttcccccactctgtagctgatgacctgctgcgttcattccttacgaggaagcagccacttcctcccgtgggctagcagcctcgcacttctgcatctttagtggcatagctgagtggtaccaatgcttctcattttattcctacaaaacaaaaaacctcagcaaggcctgtgttttcatctccatcattctccctttatctgcctaggcctttagatgaaaaaatggccaaggtacttggagagatacaagctgtcagggaggcaggggagtcagacccaggttttagcctcataataaagaaaatcatgaaatcccttcccacttctctccttcctaactccttcttgtaagtttatcaaaatgaaagcagatgaggatgtacagattgcccatcaagggttcttagattctgacttgcttaatacttaaaatataattttattcagtccgttagaaaagctcttgtctggctgggcatggtggcctgtaatcccagcactttgggagactgaggcaggcagatcgcttgagctcaggagttaaagaccagcctggccaacatggtgaaaccccatctctactaaaaatacaaaaattagccaggcgtggtggcacatgcctgtaatcctagctactcgtgaggctgaggcaggagaatcgcttgaatccaggaagtggaggttacagtgagccaagattgcgccactgcactcttgcctgggcgacagagcaagactccatcttaaaaaaaaaaaaaacaaaacaacttttttctacttgaagagctacttcctacagtattaaaaaaaatcagtctagaatatattctgcttttctgttaaattgtaccttaatttggaagcatggaacattcttgtgtcacagcagtgtctctctaccctggcaatacatatgaatcacaggaaaaaatactctggtcttgccctccagtgaatatgctgttttaaaatagtgtttgattgctgtttagcaccttgatttttgaaaacttgcagaatttcatgtggcatttttacatagttgaacgtacttggtgactttgaatttgtttatatattattatccctgacaatggaactaattttaagtcttttcagtttgacatagtagagcctttcactctggtgaagatcaggacttacaaaaagattcaaagtgcaacaattgcaaataacaactttatcggtgctgagtttcggagttgaaagtatcctcaatggttgatggtccgactgacctgttagcatgttgagaatgaatcttagttggttctttggagtgaggggggcgatgtttgctggtgctgtcctctgagggcagggaatagtcagcataaacgcactcttcattaaccttgggcttcagacataaaccttcctctggtcttcttcccatggagtttggcagcatttcacacaggtctcaagggcccctcttgtcccttctgaacaagccccctctgaactcagagacaaaaggggcttttcctataacacacctcaccctggaccccagcatgattcctgcctagttctattcacaatcctttatttctcctttggagagtctaatccttgaagtctgtcatccttgaccccatcaaagcgtttttcattgggatgatggactaggggaaggctgaggcaggtggagtaaggggctgcaggcagccttgagctctccgtggagcactggttctcaaccttacatcacccaaagagttcaggtacctttgcccattcctgggccctgtccctgaaaattctgatgttgtgctcttgggcagggcccagcaatctggttgcttgttgaaaatcttgctgatgatgattgttagccagcttggactgccataacaataacacagactggtggcttaaatgacagacatttattttctcatagtcctggtggttgtaagtccaagatcaaggtgctagtggggttggtgtccagtgaggcctttctt

SEQ ID NO: 37244 - DNA, 2300 bp, Homo sapien
tttgtagatgcagtttaggtgctttcacttatttgcaagttataggagaggtctttacttacacaagttgatgattttgctaaagcagaaaccgcggatgaactaataaatgactgtcccataggacccaatatggcccccgctgtcacttcaaagctgtccttcaggactgtcacttttctggtgggtaagcttagcaaactgcccaccatccacacacacagcaactttgctgtctttgtttacgtttaacatacatggaatctctcagaaatagcactttagaaacatgtttcttggcaaaaagcaaaaaaaaaaatccaagtacaatgtaattttattggaagttaaaagtagctgtgttgtgatctgaggctgtgcacgatggatgagtcattaggaagcctagaacctctgtgtattttatcccatctaagagtttagagctttgtgtctgcctcgagaatatcaaatctatggtataggaaggttccctgcccccaacagctaccatgcagggtaggagtgagacacttagaaaacgattaaatatgagaccacatgatccttactctaagtgtaataaacagctgttaaagtaatggaaagagctgtgggttggagtggttgtagcagatcaaacgggagcttgatgtgagctggctcttcgttgagcaggagggaagagcccagcttaggcactggtatgggagacacagacatgatgtgggaagccacaggggttgctgtggaggccagaatagaggatgaagagtctccacagcccagggaggaccctgcctctcaaactgccttctcagcatgctggatttactgatttccatcaaactggtgaattttgtgagaaattccaacaagttgtcttctgaactatttcctttaaaaatcacttatttaaatagccatgtgtaggttcagcctgatttgaaaggaaatcagcattaaaacaaattatcctattatgttgttagtttaaaatcacttaataggcatgacagaaatagctatgttaagaatgatctgctagtggtgttttccataaccacaaatgaatgctttaaatggaacttctatttaaagggttttcatcctttgaaatagttcagttttagatgtctatgcaaagacataatccatattttgaatttgagttccacagtgcagtggtatcagttttcaatagcatttttgtgcttctggagaccttcgtttaaagaactcaagatctttgtcaaatatacgccttctgaatctttctataaaaatagatatagcattttaagaaggactggtggtcttagagaaatcaaaaacccaaaataattggaaggtctcacttactaaagtattgtatgaatactagatcattctgtctttactacttagtatttatgaatatataatcacagaacttaactgttctccaaagaaatgcatgtacataccaattttaggtatttgtcttcagatacgctttttaaatgttttttaaatgtcagccttaaatgttttctccttaaactttgttcacctaaaattctatcaagtgtcttgttaacagaaactaattatccaaactgccttccactggctgttattcacaccccacccccaccccaacctgcattttaaaacttcagtttaaagatgtgtccgtttactttgaaagtgaaaagatgtgtccctttactttgaaacaagcccatgattcaggaagtgaacttaaaaatttcagagctccaaagatcttgcttattttatggagtttaatgagaactgtggccagagccaggaaggtgaaacccagcagctttgggcgagtgtgggttgtatttgatgttcacaaaagaatggaagtggtagggtgttgctcagtgaagtgtgcattttcgagttacccacagtggtgtctattgtcctgtttctcaattgaatgatgtcatgtttcatttaaggctcttagtgatgctgaagtctgtggtctgcacactagggggaaaaaggcagtgagaaagttgcaaatcaggtttttgtaaagcctttgtgtgttgggtttgggagataaaagctgactcatgcaatatttctacggaaggcgctgcacagactagcaaaggctgtttcttttacctgactgaggtcactgcatcagctgaaggcagacgatgtgcttaagcctgagtggagcagaggtaggtgctaatgtgagtgtccccaaagaaaggatgcaggaacaaacgctccttccctctgggagcagccagagaggtccaccgagg

SEQ ID NO: 37245 - DNA, 2300 bp, Homo sapien
ctaaaccagtacgagtataatggacagggcatattaaatgaaaccaggccaggcgtggtggctcatgcctgcaatcccagcactttgggatgccaaggtgggtggatcacttgaggtcaggaattcaagaccagcctggccaacatggtgaaaccccatctccactaaaaatgcaaaaattagccaggcatggtgacgcatgcctgtaatccctgctacttgagaggctaaggcaggagaatcacttgaacctgggaggcagagactgcagtgaaccaagatcgtgccactgcactccagcctgggcaacagagcgagaatccatctcaaaaaaataaaacagaaactctagagatgtcattggtaatagtggaactggggctgtgccgcacagtgtggtttcttcaactcacttgcaaaaggaagaaaaataggggagaacttaaagatgaaaagagactactaaagagatatcaaccatttgctctgtgtgattgttatttgcaaatcaaacaggcaaaagattttaaaaagaaaaaaaggaaatatgaatagtgactggtgaaacttcatgatgttattgaattatttaagtgtaacaatggtattatgtttaatgtccttattttagtctgggcatggtggctcatgcctataatcccaacactttgagaggccaaggccggtggatcacttgaggccaggagttcgagaccagcctgaccaacatggcgaaaccctatctctactaaaaatacaaaaaattagctgggtgtgatagcgtacacctgtagtcccagctactcaggaggctgaggcaggagaattgcttgaacccaggaggcagaggttgcagtgagccgaggttgcgccactgcactgcagcctgggcaacagagtgaggctccgtctcaaaaaaataaagtccttattttagagatacatgttaaaatatttacaaggaaaatgatgtctagaatttaattcagaatgatggggaagcaggggaatggggggtggggcagagacgaggagttaatgattattgaggttggacgatggaaacttggggatttattataccatcctctctacttttatatatgcttgaaactttccattttaaaaaaaagtttaacctaattccagttgaggttaacaggaaggattctaagtagagattttagaatttaaaaaaattaaagctacctgaaaaataggcacttagagtcacatgtgaatcttagaccacattaagtggtctaaaaagtaaaagtaaaagttaaaaaaaaattggagaatgtgaaaccccaccaaaataatctgtggctctttttcaaaatataatttcaaggccaggcatagtggctcatgcctgtaatcccagcactttgagaggctgaggcaggcggataacttgagaccaggaattggagacaagcctggccaacatagcaaaaccccatctttactaaaaatacaaaaaactagctgggcgcggtgacgcatgcctgtaatcccagctactcagcaggctgaagcacaagaattgcttgaaccggggaggcagaggcagaggctacagtgagcagagattgtgccactgcactccagcctaggcgacagagcgagattccatctcaaaaaaaaaaaaagtaattttattttagattttgcaaaagctagtaatttattggccttgaattaattattctgactgaaagccttatcaaaagttctggccacttcccctccctgtctacatacctcgtttctttggcagtctaggaaaacattgtgaaagacattgaaatccaccaaagccgggcatggtggcgcattcctgtaatcccagctactcgggaggctgaggcaggataatcgcttgaaccggggaggcggaggttgcagtgagccgagatcatgccattgtactccagcctggccaacaagagcaaaactccgcctaaaaaaaaaaacaaaaaacatatatatatatatataaatgtcaaggcccgaatgctatttctttttattgttttcaaatgaatgtttatgtttgtgctttgttgcctataaaaatttcttttgtttccttgcagagtgaagagttccacatttatacccagtattgcactaactatccaaggtatggatcgagaatgggccaagagtacttttgttcactttcacattgtttcaagtcagctggtgcagtacacatggttgttaggcattctgtgcctggccttgtgctgaatactatgggaagaatgcaaaacgtgctgagaacagattac

SEQ ID NO: 37246 - DNA, 2300 bp, Homo sapien
aagctagattccatctcaaaaaaaaaaaaaaaatgcaatgcaatggtttcgtgacctgccacaacgtggccctgcccagctcttcttacttgccattgctactcattttcccctgccctccccactcgactgaacagctctcagtatctcaaattcatcatgctctcttctactccagacttttgctcatgttgttccttcatttccaacattcccacttttccaacactgaccttcccttagctcatttccttcccttagctgaccttcccttagctcaactgctaaggtcttgcctccagctgccacctctttcactttcttcaggaagcctttttttttttttttttttttttttgagacagggtctcactctgttgcccaggttggagtgcagtgacacgctcacagctcattgcagcctcaatctcccagctctgccagtaaacagatgggcctctctggaccccagtttccaaaggttgaaggtcaagacaatagctctcaattccctacttttgttaggattgtatgaagggtccttccagcactgtcccagtatggtgctcggctaatggaaaaccaatctctgtaacttggactagttttattcccaccttatctgggaattataagggtataaggttgtaaaaatataaagttaacaatctgaccctcacttgggaatcataaaattacaatctgatatccactttacttggaacttatggtcagccctctgtatcctcaatcaacctgggactgaaagtatttgaaaaaattacaataacaaaaaataataaaaaatcatagaaataaaaaagtacagtgtaatatctatttacatagcatttacattgtattaggtattataagtacagcaggtcctggaataacatcatttcatcattttgctcagtggttttcttataatgatgagaaaaaaatagatttctggctgggtccactgtcacgttttatccatgtctgtgtggattttctctgtcttctggtgtcctgtcacatcccaaagccgtgcagtgcactttaggtaaattggtgcatctacacgatccgagtgtgagtgtgggtgtgtgtgagcacaccctgtgaggtgccctgagttggaataagccggtaaaaatgatctcacttttattaatctttatttttctctaagcgagagggatagggggtgtttaaaaaaaactttttctttgagacagagctgtgctctgtcgcccaggctagagtacagtgacatgatctcggctcactgcaacctctggctcctgggttcaagcgattctcctgcctcagcctcccgagtagctgagaatacaggcacgcgccaccacacccagccaattttctgtatttttagtagagatggggtttcgccatgttggccaagctggtcttgaacttctggcctcacgtgatctgcccacctcagcctcccaaagtgttgggattataggcgtgagctaaaaatcttccttaaatatatgcatggctcacacttatttcaatgtttaatattagaagtgttttggtctttatttcgaagtttaggggcgattttgtgaccacagatatgttgtaggaacttcactcatatcaattagcctgtggtcaaactgttttccttacagtcatttggcttaaagtttcagtttccaagaacccctccacgatgttaggtgaggacttagggaatgtggagatgacctaaagtttatgatgggaagatgtgtgtaggtgatatgcaaacacttttttttttttttttttttaccaaggacttgagcatttgtggacgtgggtcccctggaggggccctggaaccaatcaggactataaaatccttttaaggttttaagaagagcattgttatctctgtggtactgacgaagaccccgcaagctcaccgagattaagtgcccctgcctaaggttacaaagcctcttatcctcaggccacctccagtacagcaaatccaagccctcccgtctaaacttggcgccctgagtaccaagggtcacctcggcctttcaggctgaagggagggaggctgagtctcagggcagagtctgagtcccactccgcaccccaccctctgtctggtacagcttaccaaaccaaagtgcccaaagccgtgacatcccggccggcggctcgcaggcccccgccctccgcacgtcacggccgccgggtgcagtgccccctaggggcccctgggacgaggaggaagcgccaggtccttcccgccgccgccgccgccgccgccgcctgctccc

SEQ ID NO: 37247 - DNA, 2300 bp, Homo sapien
tgtctctactaaaaatacaaaaattagtgggacgtggtggcatgcaccagtagtcccagctactcaggagactgaggcaggagaatcgcttgaacctgggagatggaggttgcagtgagccgagatcgtgccactgccctccagcctggaaacaaagtgagactccgtctcaaaaaaataaaaagaagtgttcctttcatcaactatgaatggatcaagactatgaatgtttctgagaaaattattgctgttagtaagaatgtttttagtgtttaagggtagctttggggcacagaaaaaaacaaacgtacatttataagaaaaaggggaaagagccactgtagtatacctgttttacagatgaggaatctgagactcttagagacttgtccacgctagtaaatgaaatgcccagtaccaatcctgggccgtatttccacttagtgtctcagaattacctggactctgttaaaaatgcacatttctgggctccactgagacacgttgaatcagactttctagggctggaactgttattttttttgagacagagtctcgctctgtcacccagctggagtgcagtggcatgattttggctcactgcagcctctgcctcctgggttcaagtgattctcctgcctcagcctcctgagtagctctgggattacaggtgtgcaccaccatgcctggctaatttttgtatttttactagagatggggtttcaccatgttggccaggatggtctcaaactcctgacctcaagtgatccatttcaccttggcctcccgaagtactgggattataggtgtgagccactgcacctggcctggaacctttacttttaccaaactctccagtgatccttataccatgaaccgcttgggtcccacactccggtgctttcctggacccagacaaaaataagaacccagcatagccaaattaacagtcacgacaggctggaaagagtgcggtatatgggcctcagtcacccattattggatggatggattttagtgcttatttataaggtgatttgtaaactttcccatatggtcacatttattcagcacaataatacaattaattccctgggaatgaagtagctttatcccaagtgtttccaaacaaaactaactgaaatgttcccaggttatagacagttgcctgcacccagtccatctgttccggcccagctggcagtagaaagactggtcctggttgtgaatctgagcagctctctcccctaaagccccgcctgggaactgcagtgcctctggttccatttgtcagctgtgtctctctgaaaactggggaaagcttcccgatgcctttctgctcttggcagtgtaccgttgatggcattggctggaacttcttcaccccgcatttttgttaggtgcagtgcaagaccctgtcggagactgaaaacaaaatgtaaaggtggtcttagcactgaagcctgggggctcctgtggctgcgcctttggtctattgtgagagggggaaaagccagctcccagtgctcatgtgctgctgagaacatatcatagggtggtggcgaaggtagcctctgcagtcactcatcccagaaggttccataaagagctgagctcctaacacttttttttttttttgagacggagtcttgctgtgttgcccaggctggagtgcggtggcacaatctcggctcactgcaacctctgcctcccaggttcaagagattctcccgagtagctcagattataggcgcctgccaccacacccagctaatttttgtatttctggtagagacggggtttcaccatattggccacggtggtcttgaactcctgaccttgtgatccacccgcctcagcttcccaaagtgctgggattacaggcgtgagccaccgctcctggactttttttttttttctttttttaaaaagaaattgagtcttgctctgccacccaggctggagtgcagtggtgcagtcatagcttactacagcctcaaactcatgggctcaagcggtcctccagcttcagcctcccaagtatctgggactacagtcacgtgccatcacgcccagctaaattgtttatagagatgggatctcgttatgttacccaggctggtctcaaactcctggtctcaagcagtcctaccgccttggcctctcaaagtgctgggactacaggtgcatgccaccatgccaggccttctaccacttttacctaggcctgctcaccccaggctggcacctccctcagaggtgggaggtgaaggtggctgctgctgggcatttaggaggta

SEQ ID NO: 37248 - DNA, 2300 bp, Homo sapien
aaatacttttcttaatgacacaaggttttatttgaaatttggaggggaacatcataactattgggtgctgtaatgttggcctgtgattcatgtcatggagtgacataagcttcatagaacaaaggataccggccgtctccagtgggggataagcatgcttcctggggattaaaaccccattttcctccatggaaatataggaagtgttttgtactgtggccaaaaagaacacaatgtgttaatggttataggttgtaagcagatttataaagttagattccagatccggtagaccctgcaggggctggatggggaggctaccaccttcctgagacacccagcaatcttccattctagccttttattgtgacttgagtagacccaaacacaggctgaaaaggtgtcatgaacacctccagtcctggctgggcacagtggctcacacctgtaatcctagcactttgggaggccaaggcaggaggatctcttgatctcaggaggtcaagaccagcctggacaacatagtgagacctcatctctattttttttttttttttttgagacagagtctcactctgttgcccaggctggagtgcagtgacacgatctcggctcactgcaagctctgcctcctgggttcacaccattctcctgcctcagcctcccgagtagctgggactacaggtgcccaccaccacacctggctaatttttgtacttttagtagagacgaggtttcaccgtgttagccaggatggtctcgatctcctgacctcgtgacccgcctgcctcggcctcccaaagtgctgggattacaggagtgagccaccgcgcctggccccttgtctctatttttaagtaaataattaaacatttttttaaaaaacgacaatctccagtcctgtcgtagactaactgtaaaaggagaagaagcactaatccatgagaaaactttcagaacttgaaggtcctagggcatagtttcaagtctttcataaaaggaggggaattcatgctgaggcccagccaggaaaaaccaaccaaacaaaaacaacagagagtaaaaggagaaattacgaaaatggttctaaatgtctccattctgttactgagattgacgtgctcagtttaggctagatagctgtggaatgttttgtcctagatttgaacagggaaaggcacagaacccttcagaagtgtgtggtcactcattttttccactgccccccaccccgacttctcaaggagataaatatcgaggtcaagttgaaatcagacctgtgacctgtgcctcaatcccaggtcttactgggtcactccagatttataggattggttctgggttttgagtggactgcaggaccatgcttctgtgtaactctagggatgctagtccattggggtccattgaaaggagctccctggagttgcgaagtgaagccctgtatggctttaggctgtgtcctggtatattggcagaaccggaacacccaatgtcagggccagggtgaagtttcctaaggtactgccttagaattttctaagacctttattgaatggcctttattgcctgctttctctttaattcattttttatgggtttttttttttttttgagatggagtctcgctctgttgcccaggctggagtgcagtggcatgatctcaactcactgcaacctctgcctcccaggttcaagcgatcctcctgcctcagccccctagtagctgggattacaggcacgtgccatcacgcccagctaccttttgtatttttagtggagttgaggtttcgccatgttggccaggctagtctcgagctcctgacctcatgtgatccacccgcctcagcctcccaaaatgctgggattacaggcgtgagccaccatgcctggtcctctttaattcatttttatgtattctgtctatcaaacattgacttggatgttatttggggttaatatatgtacattacacgtgagtgatttttttggctgggctttgacttaacctacttctttattttctgattcagagtaacagacataaacctggggaagctggtgcgaggggatgcccatgaatgttttgtttcacctgttgccaaagctgtaattgaacttcttgaaaaatcaggtaggatgctccttgagaaatgccgctgatttctatttattggtatttacattatttttaataaggatttgtttggggaagaattaaaaatttttttaaattattattctgatatccttttaggatgtttctagaagattctaattgaacatagaagtgatatttc

SEQ ID NO: 37249 - DNA, 2300 bp, Homo sapien
ggatcacttgagtccaggaatctgagaccaacctgtgcaacatagtgagactgtgtctctacagaaaaaaaaagaaaaaaaagaaaagaaagagagctcatttaacctagtaactacctcctgaaaatatattactcattagcaattaatttttttaataaaaggaaaagctatttgtgtatattctttataactgtggcctttcttgtaaaagtgaacatttggtagtagcgtatatatccagcctgaaacttttggtacatctaccgtatacagcttctataaactatacaaaagattattatagaaaaagttttgtgaaaaacgaaacttggaagtttgtaggaagatgattctacaaatgataatcgagtgtgctcatgagactggaaggaaaataacagaatgagtagagtcatgagggtaaaatactctatttctccaaagttctgtaatatttcatattattttattgttactgtttattttatgccctgcctcactccaaagtatatttgatatgatactgttttctagataataaaacaatgaataaacgtagtgagtgactataaggagattcattattaaatgcatcagaatgttttgccttaacctgaggatggaagaatttatgatctgagtaattgctcaaaggttctttgttgtcacgtggaaggctttgaccttgattttctgatttaggcattcctatagactcagctcattataaggatatgtaatttgcatgctattttatttattcagtccttaaattccatagttgtttaaaacaaataggaagatgtcttagccgagcacagtggcccaagagctcataaccagcctaggcaacatagcaagacccccatctccacagaaaattcaaaaattagccaggcacaatggtgtgcacctatagtcccagcctactcagtaggcttaggtgagaggattgcttgagcccaagagtttgagaatacagtgagctatgatcatgccactgcactccagcctgggcaacaaagcgagaccctatttctgaaaataaataaatagaaagatatcttatttctctagttcaaccttcacttgactggagacatccacgccatcaccgctgccaataacttgctggctgccgccatcgacacgaggattcttcatgaaaacacgcaaacagataaggtgagaaggatgccttgctagccattttgggtattgtatcctggaattcctggattcttaaggagtttgtggaaagaattctggtgtctgcaaactctgaaatgttattcaattcaattttgtgatttttacatatgtccctgtttcccaaggagaaggagccatcctttgatcagattctcaaatgggtttatgagcactgccaagttattgggagaattgtagtatgttgtaaaagccaaatattctctaagatgagtctttagttttaaagatggtaggtagaccagttctcttcattctggtcataggtccaatctctgatctgttctaaggggattggacagatgtcgttttaagactaatgttatgtggagctattttagatgtgctgaaaagatgtcagagacccttattgggcttcatgtgcttgtaggttaagagttaaaccacacccccaaaggggacagcccaccagaagctaattcctcacagatataggacatagataaaaggggtaccttctggcacattttacaacaagggtcctcactttctttaattaaagtagttccttagtgagtctttgctacataatccagatacatcttcatatggtagttgtagcgatatagatcaagaaatatatttatgcaaactctttgcaatgtgtattatttcagatcttgtcagttttatgaaaatgacagaatttaagtcaacattgtttatattagcccacaaattttaatagggtcttttatctaaatagttcggttataaatgcaatgaatttttgtcatatcctgtgaattgtccaagttcatggacaactaacttttgtgtggtctcatttttgttttgtgtttttaggctctgtataatcggctggttcctttagtgaatggtgtcagagaattttcagaaattcagcttgctcggctaaaagtaagtttccagttagcaattctttaaaaagaaaatatcgtagaaacgcatcagaaagattgtcaaagcctgaaattttcaacttggtttgattttggttttcagatatccttttgggtattaaactctatagagaccgaacactggagcagagagagcacagt

SEQ ID NO: 37250 - DNA, 2300 bp, Homo sapien
tttgtatatgctctgcttatagctgaaaaactcataaagaaggtttctgtgtgtttatatgagtgtcagttggtgtttgtgtgagggtgtgagtgtgtctgagagagagggagcttgttataaagactaacaacagccgagtcagggaacagccataggccaagagggcaagctggcctgctggtgctttgcgtatgaaagaaaaggttaactttcttcatcctacggatgcctatagtaccaaatacgtaatttccatcaccattttcataagtgctgtatcgtatacattgagtaaagtggatctaaattgtcaatgtggacagcttgttatttgaagctgcataaattaacaaagtcagtgtactggctttgttttgttgcattggtattcactaaaccaaacctaattttcacaaaatgtaaataactgcaattcttgttttgttttgttttgagacagggtcttggctgggtgcagtggctcacgccagttatcccagcactttgggaggccgaggcaggtggatcacatgaggtcaggagttcaagaccagcctggccaaaatggcaaaaccccatctcttctaaaaatacaaaaaattagccaggcatggtggcaggcgcctgtaatcccagctacttgggaggctgagacaggagaatcgcttgatcccaggaggcgaaggttgtagtgagccaagatcacgccactgcactccagcctgcatgacaaaaaaaaaaagagagacaaggtctcacttccatctcccaaatgggagtgcagagacacaatcatggtcattgcagcctcaacccccaagactcaagcaatcctcccacctcatttttgtattctttgtagagacaaggtctcactgtgttgcccaggctgttctcaaattcctaggtgaccctcccgcctcagcctcccaaagtgctgggaggtgtgtgccaccacacccagccaataactgaaattctaataagccagtgaagaaaataaagagaactggtacttgctctattcaccattcacccccgccaccccccacaattctactttatttacttttgctttttaaaattgtggtaaaatatacataacgaaatatttttccccatttgtaagcacacaattcatggcattaaatacattcacaatgattgcactatcatcactatctatacccagaaccttttcattatccccaacaaaaactccttatccattaaataattactcccctcttctgcccctgcctattctaggtgcctgatataagtggactcatatagtacttgcctttctgtgtctggcatatttcactatgcaccatgttttcaacatccattcatgtatcaacatgaccttcttttatagccgtctaatattccattgcctgtctgtgccacattttgtttatccattcacctgttggtcgcttcctccttttgactattttgaatagtgctgctatgaacatgggtgtacagatatctgagtgtctccttttggttctttcgggtaatgccaagaagggaagttgctggttgggtttttttttttttttttttttttagagggggtctcactctgtcgcccaggctggagtgcagtggtgcaatctcagctcactgcaacctccgcctcccaggttcaagtaattctcctgcctcagcctcctgagtagctgggactacaggcacacacaaccatgcctggcaaatttttatatttttagtagagatggggtttcaccatgttggccaggctggtctggaactcctgacctcaaacgatccacccacctcagcctcccaaagtgctgggattacaggcgtgagccactgtgcttggcctctagtggatttttttgtttgtttgttgtttatttgattctttctctatgtctacccactagatggtcagcttgggggagcctgaccttttctctttcaccctctgcaacttcctgagcatcagaacaatgccagacacacaccaggtggctggtccatatttgtcgactgaatgactaatctgttctctttcagtattggatacaaatgaccgatttctacgaaaaataaccatcgggcagggaaacacagagaagggccattaccggcaggtaggtggtgctttcttcccgggtgtggctctgttcttacgttcatttctactggcctgggagctcactctttgcctttcttgtctcatccccaacctgttgtggccagtggttctctcactgttttgggtgctcagcagggctgggagaggatcagaagacata

SEQ ID NO: 37251 - DNA, 2300 bp, Homo sapien
ctggtctcgaactcgtgggctcaagggatctgcccaccttggcctctcaaagtgctgggattataggcctgagccactgagctcagcctagagcaactttctttaaatatattgtcatccaaaaccttaaaaccatgtagataattaagtgggagtctcttccctcccacccaagccatagtgggattccggaaattgtttggagcaggtaaaaatgtttgggcttggctctcatttgagttctttcttaaagctgcaaatgtttcagtcactgcccatatactacttatttgtcatatattcatcataggagctgctgatctgatttgaagtcccttatctgccccaccctttccagacacccactcctgctcccttctcatgcattctcctcaattcctctgtagccccgggaatctcaggataatggaggcagttcgctgcgaggaaacttgccccagggcttccttggtcttcctggagcctctagcagcctaagttatgtgtcctggaacccctagacccttggagaaactggcacaattattcatccctttgtggggtgggggtgaggggggcctgcctgggaacaggccccaagaacaatgaagttactctcttgataaactggacgtattttaaaccagtgcattgtcttttttgttttgtttgtttgtttcggtggggcaaggggttggccacaaaataggaaaactaatcaatgtgatttaaaccagatagggtggcgcacgcctctagtagtcctagctactcgagggctgaagcaggaagattgcttgagccctggagttcaagaccagcctgagcagcattgttacccagaggggtcctgatccagaccccaagagaggattcttggaccttgcacaagaaagaatttggggcgagtccatatcagacagtgaaagcaagtttattaggaaagtaaaggaataaaagaatagctagtccacagacagagcagcagcatgggctcctcgttggctatgtcatttcttgattatctgcttaacaaggagtggattattcatgcgtttttctgggaaaggtgtgggcagttccaggaactgagggttcttccccttttagaccatatagggtaacttcctgacattgccatggcatttgaaagctgtcatggtgctggtgggagtgtctattatcatgctaatgcattatgattaacatataatgagcagtgaggatgaccagaggtcactttcatcgccatcttggttttggtgggttttgaccaggttctttaccacaacctgttttattagcaaggtctttgtgacttgcaccttgtgccaacctcctgtctgatcctgtgacttagaatgcctaacctcctgggaatgcagcccagtagagctcagccttattttacccagctcctattcaaattggagttgctctggttcaaacacctctgacaggatggtgaaaccccatctctacaaaaaaaaaaaaaaaaaaaaaaattagccggaagtagttgtccacacctgtagttccagctgctggggaggctgatgtgggaggatcccttgagcctgagaggttgaggctgcagtgagccatgatagcaccactgcactccagcctggtaaacagaaggagactctgtctaaaaaaaacacagcaaaaacaaacaaacaaaaacaataacaacaactacgaaaaaccaacattaaacaatgtaatctatctcactggtcattgtggaatcaaaagcttccaccaattcaaagtgcgagttttgtctgtgaatcaatagctgatgaacaagagatgagatcaattaacatgacagacttagccacttggggaacttattttctagaggacaaattgatggaaacaacaggaattacaacccattaatctgtccttaggacctagaaaatgaggaaaactatttatcttgaaaataatcattgggtatgatcattaaagcccccttaattcagattctctcttctggttgcactctaagcctatcatgatttcccaagaatgcaagaatcctgagactgagattctctagaattttccatgagcaacaattctaagtaatgacaaaggtgctgcacacagggccatgcccaaccagcaggctctcagaggactcttgaggtggaaatgaaaacaggtaacttccatttatatgtgtttcatctcattctattttaattactaatttgagtacagtctgcaccaggtaagatggtgcacaatgaagggccacatatatgatggtggtcccataagatgat

SEQ ID NO: 37252 - DNA, 2300 bp, Homo sapien
gtatttgtgctacttactgatacattttcaaatgtgctgacgttaatcattctcaaatagttttttttttcttcttctttttttttttttgggacggagtcttaatctgtcatccaggctggcgtgcaatggcatgatctcagctcactgcaacctccacctcccaggttcaagcagttctcgtgtcttggcctcctgagtagctgggattacagacacgcgccaccatgcctggctaatttttgtacttttagtagagacggggtttcaccatgttgcccaggctggtcttgaactactgtcctcaggtgatccacccacctcggcctcccaaagtgctgggattacaggtgtaagccaccacacctggcctcaagtaggttttaacagtgctttttgctcttaaaatcctaagtgaggtccaaatgccacgtttcagtaacacctctgagaggagagaacacagttgattgaaagggaaggggagtgccatgcggtggtgaagcgtggaccctgaaagcagatgccagttggacttcctgctcttccaactcctggctgtgaaacctgaagcacacaatttaatttctccgggcctactcctccccctcctgccaatggtaaaatgagaataatactatctatcccatggggttattgtaaagattattatgtaaagtgcattgaacagtgcctggtacagagtaagaattctaatgtttcctaaatagtcaaaatttaagtcaaaatgggggaaatgtgtataaattcctaaaactaagcattttgcaaatatactgtttcttaagagataaactccagagaaattggccttcgtgtagtcctttaaataaaaataattaattcagaaaacaggcccagtgtggtggttcacacctataatcccagcactttgagaggccaaggcaggaggatcgcttgagctcaggagttcaacactagcctgggcaacacagcgagaccttgtctcaaaaaaagaaaaagaaaaaaaattaattcagaaaacaaatttgatggtgagtaactaacctatggttcccagggtaccattcgattcatgcaattcattaggcatgaaacatcctagtgctgaactactgcttacaccctttctacaaaattgtactaaatctgagtatgagatatttatctggaatttggtgtgaatattccgaaagtttcttccttctttctttcttttttttttttgacagaatcttgctctgtcgactaggatggagtgcagaggcacagtcatagctcactgcagcctcgaattcctgggctgaagtcatccttctaccccagcgtccccagcctcctgagtagctaggactacaggtgcaccactgcgcctggctaatttttttattttttgtagagacaaggtctcgctatgttaaccaggctggtttcttcattcttaatggagattcaaagtatttgtgaaaactggggcactcggttgctagttacaactggaataaattttgtctttcagccccaaagccttaatgctttgcgccaagcaatccagctacaaatttaatttagttcaaatacttattgattggctgccatgctcatgtaatacatattatattcaagggtcggaaatgaaaggatgcaagccacttgtgctggtattatttaaagtcttcatcttttgagaaaggctgacggcaaaggaacagatctatgctgtcatgtgtcggcatcgcgcggagcagaggtggcctggatgggtaacttccagcacaggccctcaaagaaggacgggcacatttccggtaacagcctcatttccccccgttccccgggggaaggggggcggctagcactgctgatggcatcgcctgacatcacttgttccggaggataggagagcgtgggcctgcgtggcccacctcatccgtggcctgactgcgttaacctctcggttccctgctcttgccacgtgaggtgcccaaatatggtcggactcaggaggagccagggagcgcttgcctttctcctgctaatggggaggaggctggaacaaatgtttggagttaaacacaatctgcaggaaagcaaatggggactcggactcgctcctgggcgagctgaaagtcggctgcagcagaagctcctgccttgggtgatccatcatttaataaaccccagagaatccagtgtccccggcaggctttttgctcccctgctctcttgccttctgaggccctgggtcgtccccgcagctctagtcgccctgttagaaacgggaggcgcccgagggc

SEQ ID NO: 37253 - DNA, 2300 bp, Homo sapien
ttggacttcctgctcttccaactcctggctgtgaaacctgaagcacacaatttaatttctccgggcctactcctccccctcctgccaatggtaaaatgagaataatactatctatcccatggggttattgtaaagattattatgtaaagtgcattgaacagtgcctggtacagagtaagaattctaatgtttcctaaatagtcaaaatttaagtcaaaatgggggaaatgtgtataaattcctaaaactaagcattttgcaaatatactgtttcttaagagataaactccagagaaattggccttcgtgtagtcctttaaataaaaataattaattcagaaaacaggcccagtgtggtggttcacacctataatcccagcactttgagaggccaaggcaggaggatcgcttgagctcaggagttcaacactagcctgggcaacacagcgagaccttgtctcaaaaaaagaaaaagaaaaaaaattaattcagaaaacaaatttgatggtgagtaactaacctatggttcccagggtaccattcgattcatgcaattcattaggcatgaaacatcctagtgctgaactactgcttacaccctttctacaaaattgtactaaatctgagtatgagatatttatctggaatttggtgtgaatattccgaaagtttcttccttctttctttcttttttttttttgacagaatcttgctctgtcgactaggatggagtgcagaggcacagtcatagctcactgcagcctcgaattcctgggctgaagtcatccttctaccccagcgtccccagcctcctgagtagctaggactacaggtgcaccactgcgcctggctaatttttttattttttgtagagacaaggtctcgctatgttaaccaggctggtttcttcattcttaatggagattcaaagtatttgtgaaaactggggcactcggttgctagttacaactggaataaattttgtctttcagccccaaagccttaatgctttgcgccaagcaatccagctacaaatttaatttagttcaaatacttattgattggctgccatgctcatgtaatacatattatattcaagggtcggaaatgaaaggatgcaagccacttgtgctggtattatttaaagtcttcatcttttgagaaaggctgacggcaaaggaacagatctatgctgtcatgtgtcggcatcgcgcggagcagaggtggcctggatgggtaacttccagcacaggccctcaaagaaggacgggcacatttccggtaacagcctcatttccccccgttccccgggggaaggggggcggctagcactgctgatggcatcgcctgacatcacttgttccggaggataggagagcgtgggcctgcgtggcccacctcatccgtggcctgactgcgttaacctctcggttccctgctcttgccacgtgaggtgcccaaatatggtcggactcaggaggagccagggagcgcttgcctttctcctgctaatggggaggaggctggaacaaatgtttggagttaaacacaatctgcaggaaagcaaatggggactcggactcgctcctgggcgagctgaaagtcggctgcagcagaagctcctgccttgggtgatccatcatttaataaaccccagagaatccagtgtccccggcaggctttttgctcccctgctctcttgccttctgaggccctgggtcgtccccgcagctctagtcgccctgttagaaacgggaggcgcccgagggccgggtgggcggctgcctggacctgggctggcgcgtcgcagcgcctctggtcccggcagcctgggggcagatgctgctgcagggcgtgtctggggctgtgctcatgtgatgaagcgagggaaaaaccggggggaggggggcggaggctaagaggtggcctttttttttttttccttttcttttaaggagtttgccgcgagcgcgtctccttcattcgcaggctgggcgcgttcgcagtcggctggcggcgaaggaaggcgctctcgggacctcgcgggcgcgcgtcttttggctcttgcccctgtccctgcggcttggggaaggcgtaacccggcggctaggcgcgggagaagtgcggaggagccatgggcgccgggagctccaccgagcagcgcagcccggagcagccgcccgaggggagctccacgccggctgagcccgagcccagcggcggcggcccctcggccgaggcggcgccagacaccaccgcggaccccgccatcgctgcctcggaccccgccaccaaggtac

SEQ ID NO: 37254 - DNA, 2300 bp, Homo sapien
gatgtgttagcgtcttcatgaatgtcataaaaagaaatgtttcagtgccaaaactgaacagcagtacagtgacctttgaaaatgttgtttagggtattaaatgtgtaactagtgacattttgtgtgtttttctttttcttcctatccagctcagtggaatagctgttgcttgtcccagtgttagaatttggactgatagaaaggagaggagctggagattcattctgctctgcaagggcagactcgatttcagaagtggcaccagatgatagccttgtgttgtccccaaccactggtgctgagaaatgatgcagaaccaagccctcagatcccagatcacccacggctcctgggacatctctggggaagggacttattaatgtagaccctgatgcaacatcccaagtcgtctttatccatgatttgcacagccaggacactctggggctgggattgggaggagaggaatggccaagttgccctgcccccttggctctgtggactccagaaggatggtcagtaccagcagcatttcacacacaccagcctcattattaaaattggagcaatttgtgaaatagagttgagacttctctagagaaaaaaggttgggaagcagctcagtggctgggtctgggagtcagcttccaggcaatatctcactgagtcaggacaaggcccatcattccctgttcccgccaggccgggtatttgccaggatgtgaaacggaagccaggcttttggagaggctgaagctgatttttgtaacaaggtctggttaccagcaaggaagcggttttcacgttgctcactctgggcccgagtgtggtgcatcgcgccccctggtgcccaaaaagtgcaactacgtgccatgccagccagctctcctggacttccatttttccctgattctcctgttcctcgcccacccttctctttgctgtgcccactgtggtctacgccgaggctcccctccctcctccctgccccaagcaataatgaacaagatcttcattctctgaagagaagtgcaatagtaaaactttcctttttgtttgtgtaggggaagagctggtgttaatgggtcaggcaggcaaggcatgaagtgataaatagggaaaggatgaaagaagggaacaaacccaggggacctaacggacccaccctaacaaaaaattggagtacaaaaaaagtgtattaaaattgtgagaccacaccaactcattcgtcactcgtgtctttacaaagaacaaacctgaagcttcaatgagaaagaattgaagtattctagggctgcctgaaatcttctgaacttttaacataggctttgatttccgagttgtgtgcttgcatgttagagatatgatagtgtctaaaaattggaacatggcatagtttgatctaaaaagttagctaacttctgccatttagaaaaagaccccatgctcaagtctgcttttgaaaagttgccttggtcaagtgttgaagacagcacttgttagaaggaacaagttcacttctgagagcccttctcaaagagtttaggaaacagcactactgagagttgccagtcttcagagcagtgcaacgtgtgtgtatgcgtaagacacagatggtgaaaatatcaaatgctacagatgccaagaagggaggtgttggcaccacaccaacctttaaacaaacataaggatgcagaatgcagtctttaaaatggagggagaatttactgtctgtgtggctatttccttgaaatgacttaaaaagctgagatacagaagtattagtaaatcggtgccaggaatgaagtaaccgtttagatccaatgcgccggctccagcatcgaactcatgcccagcaccctttaaaccctcccgggactctgcagaacccgctgaccactcacagagcccagctcgggggagggctttaaggtgaagcacgtgaccccctgcttgtgcggcccgggcggggaagtttgcgctcccgaagtcctggagctcagcaagggaggggccagcgccagcccgcgtgtgggtggctgggtgggggcgtgggtgggggtccgcctataattatctggggaaatgcatccgcgctctgcttttcgctgcggcagctccgagggcacctccggttctcccccatcctccgggagtgtctgggcgctcagtccgctctgatcccgccgaaaccacctgcggttggcaggcaggagactaggcgtctgccggggagggcagggacccgctaagctgatctcctgtacagtagtgctacttaaaatatgctggggaccatc

SEQ ID NO: 37255 - DNA, 2300 bp, Homo sapien
tggttatcacccaaagtccatagtttacattagggctcactcttggtggtgtacattctgtggatttgggccaatacataatgatgtgtacccaccattacagtgtcatgcaaaatggcttcactgccataaaaatcatctgtgcttcatgtattcatcccttcctcccccaacccctggcagccactgctctttttactgtctccaaagttttgtctttttcagaatgtcatatagttggaatcatacattgtgtatcttcctcagagcgtcttcttttgcttagctatatacatttaagttccctccgtgtattttcatggcctgataactaatttttctttttttttttcttttttgagacagagtctcgctctgttgcccaggctggagtgcagtggcgcgatctcagctcactgcgagccccgtctcccgggttcaagcaattctctgcctcagcctcccgagtagctgggattacaggtgcccaccacaatgcccggctaatttttgtttgtttgtttgttttagtagagacggggtttcaccatcttggccaggctggtcttgaactcatgatctcatgatccacccacctcggcctcccaaagtgctgggttacagtcatgagccaccgcgcccagcggtggtttttttttttttttttagtgctgaatagtattatgttgtctggatataccatactttatccactcacttattgaaggacatctgattgcttccaagttttggcaattatgcataaagttgctgtaaacatctgtgtgcagatgttttgtgtggacataaattttcaactcatttgggtgaataccaaggagcatgattgccagatcatatggtaagagtatgttcagtatgaaaacaaaccgcagactgtcctcccaagtggctgtccatttgcgttctcacagatgactatttttgaagtcccagttggagggagcaggtgagctccaccttctagcccataaggctctgtaagtgatggctttgtgatgggaacttgactgatagcctcatgggcgaatgtgatgggaacttgactgatagcctcatgggcgaatactcaagaacttaaagctctttacaaccaagccaaacccacgagcaggttccaccatgccttggccattgccagacaaaaccccattgtgtttttgcttgattttcgtcctgtgacactgacatttcaggccaggctagttgttttgcagaacgtccttcattgtggattcatctgattgtttcctcgtgattagatgccgttaaacattttgatcagcagagctgcaaagatgaattcttgtccttctgagtgcctcacatcaggaagcgcgatgacatctgttccattatcgaggataagtctgatcacttggttaaagtggtgcctgccagatttctccattgtcgaggtcctttttgtttgtttttgtttcttttttttcttttttttttttttgacacagtcttgccctgtctcccaggctggaatgcagtggcacgatctcggctcactgcaacctccgcctccctggttcaaccgattctcctgcctcagcctcccgagtagctgggattacagacatgtgccaccacgcccggctaatttgtttgtatttttagtagagatgaggtttcaccatgttggccaggctggtctctaactcctgatctcaggtgatccgcccgctttggcctcccaaagtgctgggattacaggcgtgagccaccgcgccaggcctcgaggccctttttcttttaaattaagtgtcagggaagttcagcggcggcttggcagttggttagcaggatggttttcggcctcagcaggcttgggtttgaagagaccccactggggcggtccgcaggacccccgggggtttcctgggaggtcgagggctggcgccgggcgcggggaggctgcgtcttttgtgatgttcgcggctggcttcccgggcccaggctttcgcgagctatggcagccggcaggggcgcgctgggcctcacgggcggctgttgggctgcccctgccggcgggctgcgcgcgccatgccctggtggagtaaactctgcagtgagtagcacgtgcacccaagcggcagttcgccccgcagcgatggcggacacggaatcccgagggccaccaactgtcccttaggaccggcccgagatgggtgtgtgtgggttttccagcctccttccttcccgtcccaggcttgggaaagcctctctactggccaaggcgcgcagggacaggtcgggaagggcctgcg

SEQ ID NO: 37256 - DNA, 2300 bp, Homo sapien
gggtcttgctatgttgcccaggctggtctcaaactcctggcctcaagaaatcctcctgcctcaccctcccaaagtgctaggattacagtcgtgagccactgtgctcaacccatcttcgttttcttttgttttgttttgtttttgagacagagtctcactctgtcaccccgactggagtgcagtggcgcaatctcagctcactgcaacctcagtctcccaggttcaagcgatcctcctgcctcagcctcctgagtagctgggattacagataacacaccaccatgcccagcttagttttgtatttttagtagagacggagtttcccccaggatggtcttgaactcctgacctcaagtgatctgcccgcctcggcctcctaaagtgctgggattacaggcatgagccaccgcacccagccctatctttgttttttgtttgtttgtttgtttttgagacagaatctcgctctgtcgccaggctggagtgcagtggcacaatctcagcttactgcaacctccacctcctgggttcaagcgattctcctgcctcagcctcccgaatagcagggactataggtgcatgccaccatgcccagcttatttttgtatttttagtggagacagggtttcaacatgttggccaggatggtctcgatctctttacctcatgatctgccctcctcagcttcacaaagtgctgggattacaggcatgaggcaccgcgcccggccccatctttgtttttttaatggagttaaactatggtattattaggtcactttgacaactatcctgttgttaataaatgagagagaaaaaggagattttatttacgctgattcttcctcctcctacagttaaactcattgtctgtttggaagaccagaatgtgaagacaagtagtagaagaaaatgaatgctgctgctgagactgaagaccagtatttcagaactttgagaattggagagcaggcacatcaactgatctcatttctagagagcccctgacaatcctgaggcttcatcaggagctagagccatttaacatttcctctttccaagaccaacctacaattttcccttgataaccatataaattctgatttaaggtcctaaattcttaacctggaactggagttggcaatacctagttctgcttctgaaactggagtatcattctttacatatttatatgtatgttttaagtagtcctcctgtatctattgtatatttttttcttaatgtttaaggaaatgtgcaggatactacatgctttttgtatcacacagtatatgatggggcatgtgccatagtgcaggcttggggagctttaagcctcagttatataacccacgaaaaacagagcctcctagatgtaacattcctgatcaaggtacaattctttaaaattcactaatgattgaggtccatatttagtggtactctgaaattggtcactttcctattacacggagtgtgctaaaactaaaaagcattttgaaacatacagaatgttctattgtcattgggaaatttttctttctaacccagtggaggttagaaagaagttatattctggtagcaaattaactttacatcctttttcctacttgttatggttgtttggaccgataagtgtgcttaatcctgaggcaaagtagtgaatatgttttatatgttatgaagaaaagaattgttgtaagtttttgattctactcttatatgctggactgcattcacacatggcatgaaataagtcaggttctttacaaatggtattttgatagatactggattgtgtttgtgccatatttgtgccattcttttaagaacaatgttgcaacacattcatttggataagttgtgatttgacgactgatttaaataaaatatttgcttcacttagatttgctggttttattagataccaggaagcctgggacatatgtgtaccacattagaattctaaagataatgattgataagctagaactttctgatgtagtcattacatgaaaccccttgtcactggtttgtgtgttcagaggaagccatggccgagatagctttcctgaaataaaccagtagcttttcagattgacgttcttgctacaattgtaccatctggtaattcctgaaaatgtcaatttttttgtgttaatatttttggtttcaaacaataacaaatgtctctagaaagaaattttaagaaagcttaattaatagtaaaaatgcctttcctgaaataatcttggaaaattttttaaatgtcaaaatgatgagtcatgctaatacattgag

SEQ ID NO: 37257 - DNA, 2300 bp, Homo sapien
gcggggagcgagagccgggttatatccccaaggcataattaggagttcacgtattcgggtggaagttcctgcagtaaaaggcgtagctgcagcttctcccggcccaggcactcgcctgctctgctaccctcgcttctttattgcctcttttactaccagctaaaagcggcaaaacccagcttcctttgcagcttctggctaaaaagttctctcttgcggctttgtttaaacaagaagggtttagaggtttcgctacaccgagaaaacgacgccggccccgggaagcagcctccccgccttggagtccggttggggcgtgagggccgcgcgggtcccacgccccaaggctaagcagccgaaagcacagcgcgctcggggccaaaccgggctgtatcgcaggcgcagatggcgcgtcgggcggaagctggaggccgccggctcaacacgctccgtacccgggactggggcccggcctgcagcctcagcgagcaggcgacaagggcggcgccacagaggccgacgcgtcccccgcccgcctgagcgcgccgcaacagccacctcgtcccacccgccccggggcggggccgggggcgcggcgccggggccctctggccccctccggtctcgccggccccgccccctccctgtccccgtccccgaggggctgagggggagggaggggcgacgcactccggccgcgttgcacgctcgccgcttccctcagtcccgcgtgcgcgcgcgcgctcgccccaagtcccgcggagtttaacacaatgccgacgcctacgccgtgcgcaacgccccggccggcgcaacagccccggcgccgggggcgggggtggcccagacagggagagagggagagggatgagcgcgcgcgagagccggagacagcgcgagacccgaggaggccggaagcgcgcgtgcgcgcccccgcccgcgagcgggaggcggagccgcagcagtagcggcagcagctgtaggagccgctgcagctgggagaagcgccagagaggccgggcctgctccggtcggaccggatccctcccctccccctccctcctccctcccctcccccaaacccacttccgcagctcgcggccttgccgccgaagcagcagcggcggcagcagcaggaggcggcggcgaggcgtcggaaggattacgcacctgacgggcccgcctctgagggctccagcgcgggacgctcaccggccgccgccgcccagggcgcacttcgcggtggcggcgggaagggagggaccggccacggggaaccgaacgcgaatcgcccccctccccttcctccctcccaccctccctccgatccgccgcccgccctctcggcttccgtcccctccccctcccacaaaaccccggatggaggcgccgccgactcgccgccgcctggctccgggggatggttttgtcaagcggccagagccccggcgccaggcgcagccgccgccgcccccgcgaggcgcccctgccctcgcttcccagaaccgggtccccgagtggcccgggccttccgcctgcctgcacccgtagccctggtacgagggtcattcgtcgtctttgttgccaccgcctctgccggaaccgtttgcgagctccggtggcccccgcccccccaccgccttcccggaccctgggctgggggtggcacgtgggcaccggccccgggaggcggaggcggtgcgcgcttacctgtcgccggtgctgctgcggcggggggtgtggaggaggcgcctctgggcagcctcggccgtgctgtcctccccgccgccgccgcctctgcctctcgctgctgctgctgctgctgccgccgcggtcggtgtctccggcgcggcggcggcggcggcggcggggcttttcctgtccggttacgttaaggtcacatgaccgagagagcggagagactagtgcaaagaggctgcgagcggctcccgccgggggggagaggcggcgagagagcagtggcggcaagagccccctccgccccccccccagccgctcccctccccccgcccgcctccgcctcctgctgctctgccgccgccgccgccgcctgcagcactccactgccgctcccacccaggctccgcgctctgctccagccaaacttctgcagaccatgtgcagccgaggcgaggaaacttctctccacctattggggctggaggcctgagtcacaagccccttgtttacataaagtgtttaggtagcacaagtccttgagatgctcggggtagagatggagagccactgctcgtatccttctgccggcttctgcttga

SEQ ID NO: 37258 - DNA, 2300 bp, Homo sapien
acctgatgatcctgactacaagttggaattatctgcatacttggcaaaattcaagtgtggctgcctatgcctcgagagaatgagcagcaaaccagcccagtcctaaattcgaatagcagctcttaaagagaataggatgctcttgataggctttctttaggactgatattcaatttctgggcttacccctgggtttatttctacaagcctatatagagtgtaacgctagaaaatattcagtgatgttaaaaataagcatagttactttgactcaagaccaattactctacacacacaggcaaatttctgcccaatggtctcaagtttagcattagttttgcccactttttcttttattcttaagtcagtttcactcttcacatgagcactccaccaacaccataaggttgaaaattttcagaatggaattccaaaagaattaagaacctacagatctctaattacaattctctacaaaacaatcaacatcattttagttccctagtaagatgagacagacctcaatactcaagccaatccaaggaaccaggcaccagtctgaaggccaactttgatattccagtgacagcggtgcagtagaatacttagatcagggtcagaatttggttttggaggcagacatttacccactaaagtcatttatctagctgatcaaaaaacaggaaagttcaaagcgagtatacactgaatctattatccatttgagagccactgaagctacacagctgcttattttgtcttcaaagaaggaattagtcatcagtacctgcaggtataactggatttctaaatcaaactcagatttttaggagggacacttctatgtattaaattgtcttaagatggtaagcttgccttaaatgatttgtaaactatgtgccaggcattgtgctagtggtcagactgtgtaaaccaaaatgggttagacatcacaaccaagttagcatgccttgaaaccagagtatcctagaaactgctgcctccacttccttaggaataaagccatatcctttctaaatctcaaaaaatcctagatgtgtaaagaaatcattaaattctagtcctcaaaggactgtatttccccaaaaaagacacggattctagaaaaatggcaacaaccaaaaagtaaactttaaaatgttaaaaatgaccatcaggaaattctaacttccctgccatgtttccgtgtttcaggatctccccgttaaaagattttccacacctctaaatctaacagaatagccaactctggaatccatacctcaaagaccaaaacctaacaggagaataaactgttctcttaacaaacatgcgttgcagactttcatttttgggggggccaaaacttcaaaaacgaaaatcgttgctgaaataaccatgaaattcaaccctaacagaaacatcttacgccgctcaactcatctgcaaggtaaaggaagcacctctgcctctgtgcacgctacaggaatctgtacttcagcatgactttcagttaccattggtgacacaaagatactgctggtttacagtatctccccggttctaaaggccactccatttcaagtcttaaagattaaaacaaacacgaaaagtcaagggacaagggtaaaggccaagagatctcaagcagaagccggcagaaggatacgagcagtggctctccatctctaccccgagcatctcaaggacttgtgctacctaaacactttatgtaaacaaggggcttgtgactcaggcctccagccccaataggtggagagaagtttcctcgcctcggctgcacatggtctgcagaagtttggctggagcagagcgcggagcctgggtgggagcggcagtggagtgctgcaggcggcggcggcggcggcagagcagcaggaggcggaggcgggcggggggaggggagcggctggggggggggcggagggggctcttgccgccactgctctctcgccgcctctcccccccggcgggagccgctcgcagcctctttgcactagtctctccgctctctcggtcatgtgaccttaacgtaaccggacaggaaaagccccgccgccgccgccgccgccgcgccggagacaccgaccgcggcggcagcagcagcagcagcagcgagaggcagaggcggcggcggcggggaggacagcacggccgaggctgcccagaggcgcctcctccacaccccccgccgcagcagcaccggcgacaggtaagcgcgcaccgcctccgcctcccggggccggtgcccacgtgccacccccagcccagggtccggg

SEQ ID NO: 37259 - DNA, 2300 bp, Homo sapien
tcctgttttttgatcagctagataaatgactttagtgggtaaatgtctgcctccaaaaccaaattctgaccctgatctaagtattctactgcaccgctgtcactggaatatcaaagttggccttcagactggtgcctggttccttggattggcttgagtattgaggtctgtctcatcttactagggaactaaaatgatgttgattgttttgtagagaattgtaattagagatctgtaggttcttaattcttttggaattccattctgaaaattttcaaccttatggtgttggtggagtgctcatgtgaagagtgaaactgacttaagaataaaagaaaaagtgggcaaaactaatgctaaacttgagaccattgggcagaaatttgcctgtgtgtgtagagtaattggtcttgagtcaaagtaactatgcttatttttaacatcactgaatattttctagcgttacactctatataggcttgtagaaataaacccaggggtaagcccagaaattgaatatcagtcctaaagaaagcctatcaagagcatcctattctctttaagagctgctattcgaatttaggactgggctggtttgctgctcattctctcgaggcataggcagccacacttgaattttgccaagtatgcagataattccaacttgtagtcaggatcatcaggtaatagcattataaggggagctgtacagactgtatactttctacagtttgttgaaatagaaacatttatatggatacatacatctgcaaaggttagggagaaaacggtagccctggcagagaagagctagttagtgtatttcaggatagggccaagggaagctgtcatttctctactaagtctcattgtggaaaagccacaaatgtccctagtacagtaataaggaaaaaaaggctgagcgtggtggctcacacctgtagtcccaggactttcggaaggattgcttgagcccaggagttgcagatcggccaggacaatgtaagaaaaccccatgtattagaaaaaaagaattagccaggcgtgatggtgtgggtctatagtctcagcttgggaggctgaggtggcaggatcgcatatagcccaggagttcgaggctgcagtgagccatgatcgcatcactgcaccctagtctgggcaacagagtctctaaaaaggaaaaaaaaaaaaaaagttaaatcgctgtttaattatgtgccaatttattttggtattttgagaatctggtaaattaggaattcaaaaatagttttaacactttttacttcaaagaaaatcacagtgcaagcaatctgagtggattcatcaaaagttatacatgaatattctgcagagtctggtgttgctgaaagttttgatttgtgttctgctgagacacaaccatgaaaatatgcacttgcttgtattccgaagaggatagttccagtgagacttggacaatgagcagaaaaaatttttttttgagacgaggtgtcgctgtgtcgcccaggctggagtgcagcggcgcgatatctgctcactgcaacctctgcctcctgggttcaagcgattctcatgcctcagcctcccaagtagctgggactacaggtgcccgccaccacacccggctaattttttgtatttttttttttttagtagagacggggtttcgcagtgttagccaggatggtctcgatctcctgacctcgtgatccacccgcctcggccttccaaagtgctgggattacaggtgtgagccattgtgcccagctcagaaaatttaatagtactagatctcgtgtgtgtgtgtgtgtgtgtgtgcgcgcgcttaggttgaaggtggaatttaacattgatttaaaaaaaataatagtaggaaaaaataaatgcggtttgagtccaaagcagcatttttcactaattttatgaaggaagtccttttgagtaatgtcttaaattaggaaaatggcgtacttttacatgttagacattaaactctagggcagataaccatgccctgtgtgttgtgtatcaagcttagcatatacataggaaaagatgtattgtgagagtgtcttacatttcgttggtttggtcataaagtttatagaaaatgcttgttttatagttggttgttattgagatgagagtccctcaaggaactccctatgctttagggagctttttgttttaaacctactggttagacttgtgggttttaatgttttcagctgtggttgtaagaaacacattttaaattgcacctagtatagacatacatgtaaaacaaacaaaatttt

SEQ ID NO: 37260 - DNA, 2300 bp, Homo sapien
gccatgttggccaggctggttttgaactcctggcctcaagtgatccccccagcctttagcctcccagagtgctgggattacaggcgtgagccaccatgtgtggcctactataggctaactttaaaataacacatttcatactgtaaataagggggaaattctgtttaccttgtctggaatgttcatgtgtgtatctgacatgcctcgcactcccatgcccagccccaagctgaaaagcaccttcgccttctagaatcagcttagatctttctgggaacctttcctgattttttttttttttttcctgagacagaaaaagggctggaatgcagtggtacaatcatgactcactgcagcctcagtcttctgggctcaagtgatcctcccacctcagcctgtgagtagctgggactacaggcatgagctgccatcacacccagctaatttttaaatttttgtcatttttgtagagatgaggtttcaccatgttgcctcagctggtctggaactcttggactcaagcgatccacctgcctcagcctcccagtgtgctgggattacaagtgtgagctacagtgcctggccagcacagatttttatatacttgatatgctaatgaagtaaatgaagtggtcccatcactattttttttaaggttcttgttatgtcagtagctttataatcttgtaatcttccaggaagaaggccaaatgttgctaaaggcaaagtggcagaaacactgtacttatatttttaaccttgttcttttactagaattaacttagaatgtatctgttttacaaatttttctaacagaaatatgcctgctacctagggaaatattatatatgttttaaacattaatttaaaaacttgaactttgaattccttttcttttagcttgggatgtggtaatgccagccacactcctcagagccgtggccagatctcatcatatattatcaaaagcacatcagtgccgaagaatcggtcatctaatgttaaaaccacttaaggaatttgaaaatacaacatgcagcacactgacaatacgtcaaagcttggatttgttccttcctgataaaacagctagtggtttgaataagtctcagatcctggaaatgaaccaaaaaaagtcagataccagcatgctgtctccattaaatgctgctcgttgccaagatgaaaaggcacaccttccaaccatgaaatcctttggtactcacaggagagtgacccacaaaccaaatctgttgggttctaaatggtttataaaaatattaaagaggcatttctcatctgtatcaacggaaacatttgttccaaaacaagacttcccacaggtgaagagaccactaaaagcatccaggaccagacagccatccaggaccaaccttccagttctgtctgtgaacgaggtaaagtaggggtggccgtggctctcgtgcttagtgatcattgctcatgctaaaccagtgtgcgttgcaccccagccttaccgccaacgtaagagaactagcagtcactcagacttcttcatcaaggtctttgaagcctaataaatatccaaagggattcagaatcttaatttttaacaattaatgatacatataaaaacaaaatacaggtgataacacatgaaaatagagtttataaaagatttggttattggtctaaggaaactgaaaaagaggaccaatattaagtccagtctaagaatgggactgtaaaaaaaaataaaataaaaaaaaacaaactagaaattcttcatcaagttaaaaaaaattgtaactctgcagacagataagcctttattaggctgtggcagttgcatggggcggtgaaatgacacggtagggtggactccaaaagcagcaggagaggagggcccagcttttttatcctcttaaggtttaagggggtattttttattcatccttaaggggtttctgggaatttttctgctacaatttgcatttctccttcagtaacaacttaagggtcaagatcaagcccttgataacctttgtatcttgcataatacctagaactgtaccttgtacttaaatgtttataagaggatctttaatgccgatagtcatcaactttaaagatattttaaacttgatgaagacttctgaatctatcagaaaacaggttagaatgtctgtcttcaagtcttgattctgaaaagtagcccctgagcctgtttcattttggctgtgtttttattactgtgcagctgacaccccttggaaaggtatacatacatacctttactcatcctctgattctgaatc

SEQ ID NO: 37261 - DNA, 2300 bp, Homo sapien
tgcagtggtgccacctcagctcactgcaacctccgcctccccggttcaagcgattctcctgcctcagcctcccgagtagctgggattacaggtgtctgccaccatgcctagttaatttttttgtatttttagtagagacggggtttcattatgttggccaggctggtcttgaaatcctgacctcaggtgatccacctgccttggcctcctaaagtgttgggattacaggcgtgagccaccggacccagcccatttttatcactgcaccttctagaaagcctaagattacatttgtgccttacactgtttttctatcagacagggccctattgtcattatcaatacatcggacctcctcatctcagtttcatccattttactctctaagcaccacctcctatctttgcatctcactccttctattacccaattccaataattcttcaaccccaacaggacccacaagtcaatgatccaaccaccttttcactgtctctcactccccatgacttcacttcctccatatccagtttacactccatggtctaccattctaacctctcccttatacccctagaatcccttgcatccctttcttcccagtctttcccattcatgagcagtaataagtatctttataactgctaagccaaaaacgtggggtccagcttgactctttattctccatatccaacttctcagtaaatcccaagggccttctagggaccactgctcatcatcagtaataatactacctgatccaaactgctatccttcccatggattattataatagcttcttaaccagttttcctgattctgttttgggccccctacagtttcttctcaacacagcaaccaaagtgatcctttgaagttgaatctcaacgcgaaatctagctgtggcttcacggttcacttaataaaagccaaagccctccaaccaggcatggcggctcacgcctgtaatctcagcactttgggagggatcacttggggtcaggagttccagaccagcctggccaacacggcgaaaccccgtgtctactaaaaatacaaaaatcagccgggcatggtggcatgggcctataatcccagttacttgggaggctgaggcacgagaatggcttgaatctgggaggcggagattgcgccactgcactccagaatgagcaacaaagcgagactctgtctcaaaaaaaaaaaaaaaaaaaaaaaaaaagcctggcgcggtggctcacgcctgtaaccccagcattttgggaggccgaggcgggtgattcacaaggtcagatgttcgaggccagcctggccaacatggtgaaacctcgtctctactaaaaatacaaaaaaattagctgagcgtggcggcgggtgcctgtaatcccagttactcgggaggccaaggcaggagaatcgcctgaacccgggaggtggaggttgcagtgagccgagatcgcgccactgcactaaagtctgggcgacagagtgagattctgtaacgaaaaaaaaaaaaaaaagctaaacccctcagaatggcctgcatggcactacattatctgtcctttatcaccactttgacagcactctcctttgcttattttgctcctcattctggtctctggatctgtgcacttgctgttccttacgctcttctcccagggatctgaaaggctcacaccctcacctccttcagatgtttgctaaaatgtcttctacccagtgaagccttccccaaccactacattaaaaacacacaaccagccctctccctctccctcctctccctctccccacggtccccctctccccacggtctccctctgatgccgagccgaagctggactgtactgctgccatctcggctcactgcaacctccctgcctgattctcctgcctcagcctgccgagtgcctgcgattacaggcgcatgccgccacgcctgactggttttcgtacttttttggtggagacggggtttcgctgtgttggccgggctggtctgcagctcctaaccgcgagtgatctgccagcctcggcctcccgaggtgccgggtttgcagacggagtctggttcactcagtgctcaatggtgcacaggctggagtgcagtggcgtgatcgaggctcgctacaacctccacctcccagccgcctgccttggcctcccaaagtgccgagattgcagcctctgcctggccccccatcgtctgggacgtgaggagcccctctgcctggctgcccagtctggaaagtgaggagcgtctctgcccggccgccatcccatctaggaagtgagga

SEQ ID NO: 37262 - DNA, 2300 bp, Homo sapien
cccatctaggaagtgaggggagtctctgcccggccgcccatcgtctgagatgtggggagcacctctgccccgccgccccgtctgggatgtgaggagcgcctctgcccggccgccccatctgagaagtgaggagaccctccgcccggcagccaccccatccgggagggaggtgggggtcagcccccgccaggccagccaccccatccgggagggaggtgggggtcagccccccgcccggccagccaccccgtctgggagggaggtgggggggccagcccccgtccgggaggaaggtggggtgtcagccccccgcccggccagccgccccgtccgggagggaggtggggggtcagccccccgcccggccagccgccccgtccgggagggaggtgggggggtcagccccccgcccggccagccgccccgtccgggaggtgaggggcgcctctgcccggccgcccctactgggatgtgaggagcccctctgcccggccaccaccccgtctgggaggtgtactcaacagctcattgagaacgggacgggatgacaatggcggttttgtgtaatagaaaggggggaaagggggggaaaagattgagaaatcggatggttgccgtgtctgtgtagaaagaagtagacatgggagacttttcattttgttccatactaagaaaaattcttctgccttgggatcctgctaatcggtgaccttacccccaaccctgtgctctctgaaacatgtgctgtgtccactcagagttgaatggattaagggcggtgcaagatgtgctttgttaaacagatgcttgaaggcagcgtgctggttaagagtcatcaccactccctaatctcaagtacccagggacacaaacactgcggaaggccgcagggtcctctgcctaggaaaaccagagacctttgtgcacttgtttatctgctgaccttccctccactattgtcctatgaccctgccaaatccccctctgcgagaaacacccaagaatgatcaataaaaaaaaaaaaaaaaaaaaacacaaccagcatccattctcttatcttcctccactttgcatttctccattgtttaacatcacttgcacacctttaatttttagtttattaattcatactgcaaacgaactcagttcttatcatgtgccaggtattgtcctagttgctgacaatacagctgaaaataaaatagacaaaaatcctatcttttgaatcttttgaaccttgcattgggagtgacagacaaaacgaggtaaatcagtaaaatacgtgagacacaaagctaaaggaaaaaaataagaggaaagggcagatttttgtgtcttccttccagaatggaagctccctgaggatacggatttgtgttttttcctattatatctcctgacaatagcgcccagcacatagtaggcattcgatcgaatttttaaaatgaaatacaaggcagttactcagttcccgggcacatttcaacttttagagaacaattacaccaattaagaaaatcgattacagctaggctacgattcgagagctaagtggcgctcatctttgggagtatgccgttcaattcctcaaactcaaaattattttatcgatttctacagttaccgcggtgcactggctcaaaaaaagggttcattaattgagtgctttttactcccagctaagctgaccaaagatcacggtaagaggcaaagggtcacagccgcactggcgtaacccgtaactgtacacgttccgggcggccaggagccagggcgcagacctccaagccggaccactcgagctgctaaagaaaaggcaatacactaacctctccgccggaagagaagaaggaagcgccagggacgcacgcttcctcggcaggactgcagggaaagagccgcacccccagcctctcactactgcagccaacccatctcctggaagggcgctcccgcccacccccgctactgcgcagccgcactgaactctggtcccacttagcgggagaaactcgggccacgtgactgtctgaccacgtgagccgcgtcgccgcgacctcttccgctccctaggccctgggacctcccggtcccttgcctgcttccggctttcgctcgcttccatatccgctcctctagtcgccctccgctggccccgccttcgtccccggaagattgggtcttctggcgagccactgtttgccgtttgatcgggcaccaaataaagtttctttattcaaaagcactttttttttaaagccacaccacccccattctcagctcctccttcgcggcggtac

SEQ ID NO: 37263 - DNA, 2300 bp, Homo sapien
ttagcttagaaatcaaacaggctcttgtcccaggtctactatctgctaagtcacctgcttagaaagatgaatgaagcaatgcatctaaaaccacctaaagggtctaatgtgcttgaacaacataaagaattaaaggtacttttaagcctgtttctctccattctgtctattttctaagtcaattttaattattttcaaaaattttccccttctctgccttctctatctgcacaatggactccttccatcctattctgcccctaagcaaatgaaggcgtgctactgtctcttcccactcaaaaaatcagagattttatagaagtgttcaagaatgaagcaagctggagatgaagaaaaacttatacctgcattaaaaaattaaagatattcttgattttattcatacaaaacccaagatttacagattatcattttatatcattctaaggaaatacatgatacaggtagaaaaaaagctttatttggtggagaaattctgtgcagttttaaatatagagcacagagcttagctgactagtgtttttatctccagatcacaggagacaattgttaaattactagattgtaacttgggtatttcttcaaaaggtttcctcaaatgatagctatagaactttaagaaaaaaactgcacacactttccgactctgtggtgctttcagtaccacccaaaacagtgattaggttttaatgcgcataataactacgttgatcagaatttaatttttaaaaatcattaataaaagaaatcactaatacctcagagggtgagcaggaacattaaatcaactgtcacttgaattttcccaggcagtaggtatagtaagtccttttttgagattttactttaattggaaagtattactgttttcctaactactacatttcctgcacctctggaacaaagtctctggccaggactggagtgaggccagaagccctagggcgcaaaattgaaggagatactctctatacttgcatgacctgaaacagtgactgcctcaatttggggccattggcgccactttgttggcctcaacctactttctgcccaggtttattttcttcaaagtgttctcgtcttttgcaatattttgaagtaaggacaaatttcaaatataaatttggccattcgatttatgcaaatggatgttatttgcacggtcacccacaactttacccaagaatcagtagcgtgacgactataaagcaaaaaactagacagttcttactgtgagattacgatttgatcaacaacagggagaaacccgtttcttaatagcgctgagatccccaactcttacgcagaattttaacgcccccaaagcgcgtctattaaagtgaataaataaaaagtgaccgccaggaacagaccgcgaagctgacccctgtcctgatccttacgagcagccgccgcgggcaggctccctccccggggccgcctcccttcgcctccgagccagtccgcgaaacccgcaaaggcgccccggaaagccgcgcccggcggcgggactcgaacgcagcccaccggggagcgggcgccctccgcttagtccccacaggctcccggcgaggcccggctttccgcaaaagtggggaggagaaaagctagactaaccccacgtcctgtcctgagagagacgccgggacgacagccatcactttccgcgatcccggccgcaaagctcggctgttcaatcgccgcagaaacagaggcggtaccgccgcgaaggaggagctgagaatgggggtggtgtggctttaaaaaaaaagtgcttttgaataaagaaactttatttggtgcccgatcaaacggcaaacagtggctcgccagaagacccaatcttccggggacgaaggcggggccagcggagggcgactagaggagcggatatggaagcgagcgaaagccggaagcaggcaagggaccgggaggtcccagggcctagggagcggaagaggtcgcggcgacgcggctcacgtggtcagacagtcacgtggcccgagtttctcccgctaagtgggaccagagttcagtgcggctgcgcagtagcgggggtgggcgggagcgcccttccaggagatgggttggctgcagtagtgagaggctgggggtgcggctctttccctgcagtcctgccgaggaagcgtgcgtccctggcgcttccttcttctcttccggcggagaggttagtgtattgccttttctttagcagctcgagtggtccggcttggaggtctgcgccctggctcctggccgcccggaacgtgtacagttac

SEQ ID NO: 37264 - DNA, 2300 bp, Homo sapien
aattgtactattaataggagatttctgaaagcctaagttttcattaagaactttttctttaacggtgcatcaagtgaaagccttgagatgattctggattagatatatggcaaagttaccgtgagctcaaaagccattgtccagatgaagaaatcctcagggtcaatatgaatgcacataggatgactgatggaatccaagaaaagctgccatagctctgattttgcctttttgtgttgtctttagagacatgctcttgctctgtcgcccaggctggagtgcagtggtgatcatagctcactgcagccttgacctcctgggctcaaagctatcctcctgctttagctttcttttttttttttttttttaagatggcgtcttgctctgtcacccaggctggagtacagtggtgctatctcagcttattgcaacctccgcctcccaggttcaagcgattctcctgcctcagcctcccaagtagctgggattacaggcatgtgccaccacacctagctaatttttgtatttttagtagagacagggtttcactatgttggccaggctggtctcgaactcctgacctcaggtgatccacctgcctcagcctcccaaagtactgggattataggtatgagccacctcacctggccccgccttagccttctgagtagctaggactacaggtgtgcaccaccatgcctggctaatttaaaaaaaaaaaaaaaaaacttgtagagatagagtcttgctgtattgcccaggctggtctcaaactcctggcctcaagcaatcctcccacctgtttgatttcatgtgtctcaaacagcataggagtctactaaaggcttttttctttttttttttttttttttttgaggcagattcttgctctgtcacccaggctggagtgcagtggctcaatcttggctcactgcaacctctgcctcccaggttcaaatgattttccctgcctcagcctctcaaatagctgtattacaggtgtccgctaccacgcccggctaatttttgtatttttagtagagacagggtttcaccttcttggccaggctggtctcaaactcctgacctcaagtgatccacccatctcagcctcccaaaagtgttgggattacaggagtgagccaccgcgcctggcccaccaaaagctttaaagtgaggtgaatgcagattccattttcagattctgctacaaattgtgggaccttaaacaagttactcatcttctctgtgctttagtgttatgatctggagcctgatcttcattctaccacttaccctgtacatcttggaaattttattttatttccctgtgactgttgccttgtcttgcagatggattattctaacatccacttcataatcttgtttcatttaaggagattgatcatacgtgggaagcacttagaacagtgcatggacgagcacgagtatttcataatgagcagctgtggctgttactaacactggtattactagtacccgtacttccaggcagggttgttgagaaggtgaaatgaaagaacgcacaccagggcaggctacataatttgtggaccccggtacagaatgaaaatgcaggacaccttgttcaaaacttcctaaaaacgtcaagactgggacagctgagtattaaaccaagcgcaggacccggacctgcacaggttgcacgctcgcagacacatttgcacacagtgtgtgctaaataaatgctccgttcacccttgtgaagtttcctatgcctcactcgcgccagcaccgttcacagtgcccactggctgtatttatcgctgacataaggatgaggcctggaattgcattcactgcagagtcccaccgggaggaccgaccgttatccccgccgactccccccaggtcgccctggcagtttcggccgctcagttgcaggccctcgccacggaggccacgctcgggggttcggggtccaccccggcctcctgcggccgggccaccctactcgcgcgcagccgcgcgccgccgcgtccccgcggtgtttacccgttgcccgaggagacacccgcgccacccgccggctcccggcgccgccgcttcctcagggccggttccgggtccgagcgcgcccccgggctcgggtcgtcatgagcctggactgcaccagccatatcgcgctgggtgccgcttcgccagcgcccgaggtacggtcccagccgccggccgcgcgcgggggtggccctggggatagacgacccaggaggggccgaggcgcccctgatttgcacccttttcctcccggaggcgtg

SEQ ID NO: 37265 - DNA, 2300 bp, Homo sapien
gtgtgaccttgaacagattatatacctctctgtctctgtttcctcatatttaagatggggatgctatataccccaaggagttgttagtttttaataaataacattttcaaacccttggctcacagaatatgctgtattcatgtttggcttcttctccactaccatatcttgaggaatattttataaaagatagcatacaaaccctattaccattagagacattaaattcagctaccattctttccaaagttctgctcagataattgattctttttctcagtgtccaacaccattacttcttaataattatataattattaaacttaccagtttatagaatttaccagtgtaaaattgcaatggagtggaattttcttttcttttcttttttttttttgagacagagtttcactcttgtcgcccaggctggagtgcaatggtgcgatctcggctcactgcaacctctgcctcccgggttcaggtgattctcctgcctcagcctcccaagtatctgggattacaggcacctgcaaccatgcctggctaattttgtatttttagtagagacagggtttctccatattggtcaggctggtcttgaactcctgacctcaggtgatccacccgccttggcctcccaaagtgctggaattacaggcatgagccaccatgcccagcctggagtggaatttgacatgaagaagcttaagaaagggaatttgattagataaatattaaaaaggtcttgttcaaaaatgatctgggtatggacacagctgtcactgttaggcaggatactcaaagcagcatttcagtaagtctttccacctgttaccactttacaagtgcagagtagataattaggggaactttgatggtcttcagcttgaacacttgataatatatgattctgattctgatgtttatagcagatgacagaggtttctgtacttaatattccatctactaattgtgacatgtggagcctaggaagcttcttccccctctagagtccatagtcattttcttaaatatcactctaatttccttttttaggtttggttaccaatgataaatgatgtttgaggagctatcctctgcttagtttgtggaccttacaggccagacatataataaagaccaagaaaccttcttacagtcccttttatttctaagattttatatgtataagcaaagctttaaagcaaagcttacttaaaaatctccttggtatatcttactttaaaaatatatcaactctcagccaggtgtggtggcttacacctgtaatcccagcacttttggaggctgaggcaggtggacctcttgaacccaggagttcaaggccagccaaggcaacatgatgaaaccctgtctttacaaaaaaatacaaaaatcagctgggtgtggtggcatgcatcacaagtcccagctacttgggcggctgagaggtggaaggattgcttgagcctgaaagggagaggctgcagtgagctgtgatcatgccactacaccccagcctgcacaatagaatgagaccctgtctcaaaaaaaaaagttgatatatatccactctcatgttgggggccacgtgttccagttctaagggattgaaatgagccagtctaggtttacagtactcacttgcattgtatcttatttcagaaaatgccagtgcagatattgtggccgttagatgttggacaggattttgtctctctgtcttattacattctgctctgataaactcatctgaggagttttttaaaagtaattttacatttttatgatgatgcacataatgttagagagcatcagatgtggaaagctgactcctgcacattttctggggctcttttgtctcagattttaggtatgcaattaattcttggaaagggtatgagtaaaaaatgcaatcaggaaaaggaatccaatgacttttttgatggtttacaaattactcttattgaggtgtagatagagatcaacattatctgggtaactcatttatatttactattgttcaattattaaaaaaaaaatccctgtttgcatcaaaccagctaaagacacagaaagagagactggagagcaaagaattacacatgagcctcctccggcagaaaatagcccagctggaggaggagaagcaggcacgcacggccttggtggttgagagggacaacgcgcatcttaccatcaggaacttgcagaagaaggtggagaggctgcagaaagagctgaacacgtgtcgagacttgcacaccgagctcaaagccaaactggccgacaccaatgaa

SEQ ID NO: 37266 - DNA, 2300 bp, Homo sapien
ggctgcagcttggggcagaggcctcaggtgtggctgtggagtgatcagatagagtttttggagttcggcttttgccccaggacacttggtgcctgcccccagagctgcagcccagaaggccgttctcagaggtgaagtccaggcagtgaggagctgtctgccagtaggcagttgaagaaaaaaaatgagctagaggaaaaaaacaaaaaaacaaaatctccttctaatgctgccaggctgccgggagctggaaatgaagcactgacaggagtgggtatttcatggtgaagggaataatcaactggtttttttggtacccaagactttccaccttcacacacacacatgagatgctttgaaataaagatagtcacttgacttagtaaagtttgttgacataaaaatatgagaaataccaaagaatacaaaaaggaaaacttcgttaatattattcagacttaaaattccagattgtatcaacattaagggggttgatgaaaacatgggagaaagccaagggacgtgagatcgggctcaattcttgacttgctgggggaaggtatcaacacagaacttttaagaattagaaggcattaaaaagaaatagaaatcctgaatcaaattgaaacagtaaaataaaatagtccaaagatgtgtaaatatatcactatcacaataactataaataggttaaatttgccagttgaaagaaaggaactattaaatgagattttaaaaatttggatatatgcttttcatgtgaacatacctaaagcatatacacaaaaccagaaaataaaaagatggaaatatccacagagtgacaaaggaaagctggtgcatttgtattagtatcagataaagctcacatttagataaaaaacattatagtaatagagaaagtcacaaggttaaagtttcaattcaccaagaaatatccattctaaacatgtatacatacccaattaagctgcctcaaaatatatatgacaaaaattgggagaactataaagtcagatataaggattgaaaagaaagaaatgaaactaattattttcagatgatatacacgtttacatgaaaaaactccaaagaatcttcaggcaaattattagaaattgtaggagagctccgcaagagggctggatataaaattaatatacaaaagtcaatgtcatttcactataccagaaaaaagacaataacattagaaaataaatctaacataagatgtagaaaaacttcttagaggaaaaattttcttgggaaatattaaagaagatctaaataagtagaattacataatattcatgcataagaaggcaacattttgaagacgtcttgttatacataggcctaggaataatatagttttaagctatattattttgaactgtagatgaagaaaagctctttttttccttgagtattttaagattttgaataaagtcatattgctctaggaatattttatacttctgccagcagtgtttgagaatgcctacttcctacattatcaccaccataaatgtttaaaacctgatagcacacagtttaaaaaatttgtaattctccaattaacagtgacctttaaaaattatgtttactgatctctattattttgtcctttgtaaatcttttattagtttttatgttcacatgttccgttttaaaatagacttttaagagctctttgtattaagaatattaaggctttgtccatataattagtatttttcagaataccctttctaggtacagtttttcagttccagtgcacagaatggaaacttgctacctgctacaccacattttcactagtatgtgatgtattcatcacaaacaacagtattggccaacattttccctcactgtgaagtgcacatttgacatcctttagaaaaattactgacggttttgagacgattgttctgtgctttctttcagtcagcataattttcccgaaagcagagatgactcttccagacttgctaccaatgcttgaacaaactgtgtaagcttagtccaaaaaaaatatttgattaatagattttattttggtagattctaaggttccaagcagtcagagaaataatcgcagagcctcaaatatctccaaaatctgataccaatccttttgattgtgaattatattctgtagctaccaaagaaggtaagtttttattttttctactctattaactttcccttggacaactgaatattaagatgactatgtaaggaggttatcagaccaaggcctcacacatcaggataaaagcacatgccatagaaagaac

SEQ ID NO: 37267 - DNA, 2300 bp, Homo sapien
cctcactgggttgctacaaagatacttaaactagtatctgacatctagtacagccagccctccatatctgtgggttccacatctgaggattcaatcaacctctggttggataaaaaatatctaggaaaatagctgcatactaggggaaaaaaaaaagaaaaaaatatccaggaaaaaaattgtgccagtactgaacatgactttgctcttttcattctctaaacaatatagtataacacatatttacttcacatttacattgttttaggtattataagtaatctatggattatttaaagtatacaggaggatgtgcataggatatatgtaaatactatgtgattttatatcagggacttgtcctggaaccaatatcccaaccctaatactaagggatgactatatatgctcagaagacatttgttgtcatttttattctcttgcactcaagaaagcacatattggaatgcaaacgaatatcaataatagttttttaaaggataattaagttaatttataatttacatacaatatacattgtacatttatattttctaatgaaaaggaaataatctataaccttcagttcagaattcattagctgtcctattttgagaactgttgctctatgtaattttcatctctgtattgatgtgtaaaactggttttaacaggtagctaaatgctgtttgaaaagcatacttcacccattctggcaactaaaataattgaaagatttaattaatttagaaaaaatatttcgctttcaaaacacttgaactgttcagagcatgttattcaataatctacctttcaccagaaatcataataaacacaataaaaatgcttacagaacccccacaatgcgttagtatacatgattattccttgtgtaagtgaatcttgttgagattttatgttcagtcaattgcaattaaatactttacatattaactaaaatgtgtcctgctctatgtattctggagaagttactctcagacaaatttacatatttaaattattttatgggctaactgataagtatagagaagactgaagacagttaagatcattgatttcaaaatgttttaaagtgttgattatttattttggttttctttctttcccatgccagttttgagatgcacctcttacttggcaggtgttcctctgtactgggtactgggacagagagaaatacagtagcaagagggagatcctgcctccgccccattctaccattctcactgccagaaagccagccttttttcaaggcttgtagagaagaaaaagagaaaatatttttaaaaattcatttaaagtacctactgcataaaccacaccagacatgatgagatattaaaatgtcaatattattaaaaatttttaatatgattttacagcccctttgctactttaaaatgtttatcttagtgttaaacaaacaatcaataacctcataaacttaaaaattgctgcaggaaataccggacagtttatggaaggatcatatgacagaaggaagggctgaagagtgtgagaagctagacctctgcaggttaccgaagtcaagaacctcattaatcggtaacaagaagtgcagagcgggcttttgagtccatgcctgagtaagaaagtcccaaaaaacactcacagaagatatttccttgcccctgcttttagtttagctgtagctaactttggattaacaaaatttatgtgctgaatgatgttttatttttttttccaactccacatgcctgtctagacttcaagctttattacgaataaagagaaaatcggctggatggcataaaaaatatttcaggcagattaacacatgatttacctcttcttgaacatccatcttaatggaagtgctaagaaagttagattcgggcctggcttggcaaaagcaaggccaccccctcctctattttttcaatgagattttccaatcctagtcaaatggtggtgctagttctttatttttgagttactgcatttcctaatttcatggtcataacagcctcctgtctaccgactcagaacggattttaccaaaactgaaaatgcaggctccatgctcagaagctctttaacaggctcgaaaggtccatgctcctttctcctgcccattctatagcataagaagacagtctctgagtgataatcttctcttcaagtaggtactcctatttcttctcaatttattttttcctttttgatataatgtgctactgtttacaagcatattgtaacttcagagcttacctctcatctttaaaaaatgttcattt

SEQ ID NO: 37268 - DNA, 2300 bp, Homo sapien
tttgtagaatgtacctcaactgagatttgtctcatgtttttctcatgattaacttggtattacaggtgttttgagaggaagaccacagaaatgaaatgccattcttattacatcatatcaagcatatattctaacaatatgatttatgacaactaatgttgaccttggccaactggctggggtagtatttgtctagtttctcctctgtaaagtccttccttaccccctttccacactgtactctttgaaggaagtcactctgcacagctcacaatgaaggagtggggagctatgcttcccctctttgagagttgtgtatgtacacaaattatttggaattcttctgcatgggagatttgtctattctcccctatttatttatttattgaattatttatatcagtatagcttcatggatatttattttagactttgggctaaaaaacaatactactttattttattgttcaaattgttccagcttctagaagttatatttttatagagaagatatgtttttaaatataaaaacactttaaaaaaatgaagtcaacaggataaaatatttttaaattttccttaatgggtgttctttgtaccatgtttccatcaaataacattctgattgaaatctaaaaattagtgtttgtattttaagtgctaagatcagagaaaaagtcacaagtttcccagactgagttaggcaacatgtgactcagagttataaggaatacctttcccattcctgcattgcaaccagtgttacagttacagaagtgactagtgtaacttcccctcctgggttccagctgccaggacttactttagttcttttaacatatccttcccaccaaagataagttttttgaacagtttccccatgagtgctccccccaccccaacttgtgccttttattcatgtctttataatatttattggttggctggtgcaattgcagaggttggcaagtctgaaatttgtagagcaggccagcaggctggaaactcaggcaggagttaatgctacattctagggacatttttttcttctctggaaacttcagtttttgctgacaagcttttcaactgattgggcaaggcccacccatgttatgagggggaactgtacaatcagttgtcatttaagccaatcagtcaactgatggttggtgtcaaccatatcttcagaataccttcactacaacatctagactcatgtttgattaaataactgggtgccataaccttggcaagttgacacctgaaattggccatcacagtgaccaagacagaaagtgtaatgagcaggaaagcaccccagtgacaggacagtgaaagatgagcctggagacggggagtgggaggagtgctttgacagaatggtcaagagagatggcatctgggtggagatatgaaaagatgtaaaagaagggaaggaaccagttctgccaagaatttatacttctacaatttcccagatgatattgatgctgttgccctggagcccatactttgagaaccacagagtaagggtatacctctgttattatccaatgaatcctgagaaagcccattaatatctcagtgtgaccattttttctcaaaattcctacctcacatgctctgaggggctggcagcttttctgggaaggtaaaatctcaagagggaggctttgaatgattccaggacaaagtgaagataacatactaccgcaggtaaagtctaggtttacttggaggtggctcaaaacacaaatcctgtcaattttaatgacacatgaggccatgactctgggtcgtcactctgggcaagccattgaacccattagaacctcagttttcccatctgtacaaaaagaggtgataatgggtaagcaatcctggactgcattgtggtagtgccatcaagcaatgagatttgtcaggaaggaagtgtgattcaagtacaggcactttgttatctgatgcctgtgtgttgagtgtgaaggaggggttaattattcctctattcatgtcctttctattctcaaaatttcttatgtgggaggaaaatcttggtgcggtaaagatcacagccaccctggggtcagacagaggactgtgtcaagcttggtaagcgtcaccattcaggtgagtgggaaagagactgaaccccattaaaccagatgacctccaaggccctgcccgccccaacatctgagggctgcctggcttgtctgcacagggtgctcacagtactcctgactttgacataattttaacattaaagtcacaaggatgccctggatcacaactgctgg

SEQ ID NO: 37269 - DNA, 2300 bp, Homo sapien
ctctgttcagagactgggggctagggccagtaaggcatttgatccacatgtatcccagaaggcttttattgttaaattatattctttcggaaaaaccacccatgtcctattttgtaaacttgatatccatacacttttgactggcattctattttagccgtaagactatgattcacagcaagcctgtttttcctcttgcttggggtggcagcagaaagcatagggtactttccagcctccaagggtaggggcaaaggggctggggtttctcctccccagtacagctttctctggctgtgccacactgctccctgtgagcagacagcaagtctcccctcactccccactgccattcatccagcgctgtgcagtagcccagctgcgtgtctgccgggaggggctgccaagtgccctgcctactggctgcttcccgaatccctgccattccacgcacaaacacatccacacactctctctgcctagttcacacactgagccactcgcacatgcgagcacattccttccttccttctcactctctcggcccttgacttctacaagcccatggaacatttctggaaagacgttcttgatccagcagggtaggcttgttttgatttctctctctgtagctttagcattttgagaaagcaacttacctttctggctagtgtctgtatcctagcagggagatgaggattgctgttctccatgggggtatgtgtgtgtctcctttttctttcaggacttgtaggattctttgtgccatttgcatataatttggcaggttcacattttttaagagccctatgaagtgctttttgcatgtgttttaaaaaggcatttgaaaattgaaagtgtgatttatggaaattaaatcatctgtaaaaaattgctttggaaagtaatgattgctggccataaagggaaatatctgcgatgcacctaatgtgtttttaaccctttatttgctgacaatctatagtcattaatgctaaactcgattttggcttcagctacatttgcatattgtccaacaatggtctatttttgtaagaattagataaaatgtatacttgatataaaatagtcaaaaatgtaactcttagtaacagtaagcttggcatttagatagaccatgaacacttcgtcagatactctgttgggtgtttgggatagcaattaaaacaaagtattgatagttgtatcagagtctattaggctgcagcaaaggaagtttattcaaaagtataaactatccaagattatagacgcatgatatacttcacctattttttgtctccttaatatgtatatatatatatatatatatatatatacacatatatgtgtgtgtgtatgtgcgtgtgcatgtttaacttttaattcagttaaaaacttttttctatttgtttttcatctggatatttgattctgcatatcctagcccaagtgaaccgagaagatcgagttgtaggactaaaggatagacatgcagaaatgcattttaaaaatctgttagctggaccagaccgacaatgtaacataattgccaaagctttggttcgtgacctgaggttatgtttggtatgaaaaggtcacattttatattcagttttctgaagttttggttgcataaccaacctgtggaaggcatgaacacccatgtgcgccctaaccaaaggtttttctgaatcatccttcacatgagaattcctaatgggaccaagtacagtactgtggtccaacataaacacacaagtcaggctgagagaatctcagaaggttgtggaagggtctatctactttgggagcattttgcagaggaagaaactgaggtcctggcaggttgcattctcctgatggcaaaatgcagctcttcctatatgtataccctgaatctccgcccccttcccctcagatgccccctgtcagttcccccagctgctaaatatagctgtctgtggctggctgcgtatgcaaccgcacaccccattctatctgccctatctcggttacagtgtagtcctccccagggtcatcctatgtacacactacgtatttctagccaacgaggagggggaatcaaacagaaagagagacaaacagagatatatcggagtctggcacggggcacataaggcagcacattagagaaagccggcccctggatccgtctttcgcgtttattttaagcccagtcttccctgggccacctttagcagatcctcgtgcgcccccgccccctggccgtgaaactcagcctctatccagcagcgacgacaagtaaagtaaagttc

SEQ ID NO: 37270 - DNA, 2300 bp, Homo sapien
gtggaagggtctatctactttgggagcattttgcagaggaagaaactgaggtcctggcaggttgcattctcctgatggcaaaatgcagctcttcctatatgtataccctgaatctccgcccccttcccctcagatgccccctgtcagttcccccagctgctaaatatagctgtctgtggctggctgcgtatgcaaccgcacaccccattctatctgccctatctcggttacagtgtagtcctccccagggtcatcctatgtacacactacgtatttctagccaacgaggagggggaatcaaacagaaagagagacaaacagagatatatcggagtctggcacggggcacataaggcagcacattagagaaagccggcccctggatccgtctttcgcgtttattttaagcccagtcttccctgggccacctttagcagatcctcgtgcgcccccgccccctggccgtgaaactcagcctctatccagcagcgacgacaagtaaagtaaagttcagggaagctgctctttgggatcgctccaaatcgagttgtgcctggagtgatgtttaagccaatgtcagggcaaggcaacagtccctggccgtcctccagcacctttgtaatgcatatgagctcgggagaccagtacttaaagttggaggcccgggagcccaggagctggcggagggcgttcgtcctgggactgcacttgctcccgtcgggtcgcccggcttcaccggacccgcaggctcccggggcagggccggggccagagctcgcgtgtcggcgggacatgcgctgcgtcgcctctaacctcgggctgtgctctttttccaggtggcccgccggtttctgagccttctgccctgcggggacacggtctgcaccctgcccgcggccacggaccatgaccatgaccctccacaccaaagcatctgggatggccctactgcatcagatccaagggaacgagctggagcccctgaaccgtccgcagctcaagatccccctggagcggcccctgggcgaggtgtacctggacagcagcaagcccgccgtgtacaactaccccgagggcgccgcctacgagttcaacgccgcggccgccgccaacgcgcaggtctacggtcagaccggcctcccctacggccccgggtctgaggctgcggcgttcggctccaacggcctggggggtttccccccactcaacagcgtgtctccgagcccgctgatgctactgcacccgccgccgcagctgtcgcctttcctgcagccccacggccagcaggtgccctactacctggagaacgagcccagcggctacacggtgcgcgaggccggcccgccggcattctacaggtacccgcgcccgcgccgcccgtcggggtggccgccgcgcccggcaggagggagggagggagggagggagaagggagagcctagggagctgcgggagccgcgggacgcgcgacccgagggtgcgcgcagggagcccggggcgcgcggcccagcccgggggttctgcgtgcagcccgcgctgcgttcagagtcaagttctctcgccgggcagctgaaaaaaacgtactctccacccacttaccgtccgtgcgagaggcagacccgaaagcccgggcttcctaacaaaacacacgttggaaaaccagacaaagcagcagttatttgtgggggaaaacacctccaggcaaataaacacggggcgctttgagtcacttgggaaggtctcgctcttggcatttaaagttgggggtgtttggagttagcagagctcagcagagttttatttatccttttaatgtttttgtttaatgtgctccccaaatttcctttcatctagactatttgattggaaatatgtcagctatgatgatgactttctgggaagcgattcctgtcacccgctttcccctcctccccaccccacgtcctggggctttagagagcgattgggagttgaatgggtctgatttcggagttagctggctgagtccgcgctggagcggattgctggcatgtgacttctgacagccggaaatttgtaggtgtcccgcgagtttaaaacaagccatatggaagcacaagtgcttaaaaataatctcctgccagcccagtgacaagcctgtcccacccggggagaatgccccggagtggcgtgcgggtcagccagggtctgcgcctcgcagccactgtggaaggagcgcggccggtccaggacacaggagaccactttgtgacttcaatggcgaaggttgtgtgtcctcattttaatttttttccctacaa

SEQ ID NO: 37271 - DNA, 2300 bp, Homo sapien
agaaaatgcaagggaaaggactgtgtttactataaaacaatgtctatgccagtctcattcttttagaaacctgcagagtattccatagtataaatataccacaacttatctaggattttctgtatcaatgaacattgccatttttgctctttgaataattgtatctttagagctttgccttgtctcatatttagttcattggaatacatatattatgctaacaataataagcatgaaaaaaatttcaaattttttaactccatgaggtaaactaaataaggtaaaagaaattaaactaaggaaattatgacaataaaatgttttgaagacttcaggttttttaaaatgttagtcataatcaagaaaaaaacaaagttgcctatagtggtagattcataaccaatatatttctttaatcaaagtttaaaatattttcatttctgattactaaaaatacattaatataagaagaatgattgttttataaaagaattcacagtacaatatctttaagtactatgttttctagaatttatttcttatataaaatgcagttttctttaattttttatttttttttttgagattgggtttgcgctgtcacccaggctgtagtgcactggtgcagtaatggctcactgcagcctcagcctcctgggctcaagcagtcttcctcccacttcattacctgggactacagatgcatgccactgtgcctggataatcttttgatttttttttttttttttttttgagatgaggtgtcactttgtaacccaggctggcaggtgtatttcctttttttttttttttttttttgagatggagtctcgctctgtcacccaggctggagtgcagtggcgccatctcagctcactgcaagctctgcctcccaggttcacgccattctcctgcctcagcctcccgagtagctgggactacaggtgcccgccaccacgcccagctaattttttgtatttttagtagagacagggtttcacagtgttagccaggatggtcttgatctcctgaccttgtgatccaccaacctcagcctcccaaagtgctgggattacaggcgtgagccaccaatgtatttcttttattaagaaaatgtgtttcctgtagtgttctgttttaaaaacagtcaactcacatgaccagaaccagatgctttgttttattttagttacaaatcatcatgtagtcctttttggaaagaacttagcaaattttcattatttatttaatatttattatttatttgtgtgtagtttttaatcccctaaaggatgtaaagcatccagcattaatcatattttattgaattataggaattaataatttggggacttattttctttaaaagtataaattattaaattatcatctgcttagtgcagaaagtttggaaactcttgaaattcacaaaagaaaaagagttacctgaagaccccctgagcaaatgaatatagttatttttttaattgtcttaaaatgaaaatgttatttttgtcatctacatgattatttttaaaggacaaaagttttgcatatgtaagggagaataatatttcttccttatttttcctccccaaatagtctactcaaagataaagagcatgtactttcccaccttcgcaaacaacccctaaaactcttgcatacactaccgagctggcatactgaacccaaaaaagaaggaagttactccttttgctactaccatttgctgtgtttgtggacattttgtttgtttgcagtgggatgatttgttttctttaaatagctttcccagcataacaaactgcccgcaagaaaagttgactgtccttacagaacagcagagtgtgtgcagccgatgttgtttttgctgtcctttctttagacctgtagcttcctcctccttacagattacactgagctttttccccttcttacactcgtggcctacattccaggagatcaagcctggcacatgttaatgaatgtaggttttatttagaaacatgaccacttgtcactgcccagtgtcatgttatcgggcagagactaccaacatttgtctacagtgagcattttcatacttctatacacagacaaggggaaactttcatccccacgcaggatatagctttttgctctgcagagtctaacttttgcaagtggaagcttcatggtggtggcggaggacctgagtgccctgaggatggcagaggacagctgtgtggatgcagatctcccagattgtaactgcgatgtcacaaggcaggcatcttcttgagtttcttccattgtac

SEQ ID NO: 37272 - DNA, 2300 bp, Homo sapien
atattgtatgattccatgtatatgaaatgtccagaataggcaaatccacagggacagaagggagattagaactgggaggtaagtgaggaggagcagtagagtaactgctgatggctacaaggttttcattgttgtggtggtggtcattgttgtttgaggtggagtcttgctctgtcacccaggctggaacacagtgacacaatctcggctcactgcaacctctgcctcctgggcccaagcgactctcctgcctcaacttcccaagtagctgggattacaggtgtgcgccaccatacctggctaatttttgtatttttaatagagatggggtttcaccatgttggccacgcaggtttcgaactcctgacctctagtgatctgtccgccttggcctcccaaagtgttaggattctgcccgccttggcctcccaaagtgttaggattacagacgtgagccactgcacctggctttttttttttttttggaatgataaaaatatcctaaaattgatgatggtggtgattcacaaatgctgtgaatatacccaaaagcactgaactgtacatttttaaacaggtgattgtatcatatgtgaaatacatcttaataaatctgtcatgcgaaaaaaaaagaaggaaaagaaacaaaattaaataaataaaaatgaaaactgcagagaagtagaggaacttgcctggagtccacgtgtcagtatggagctgagccttggggcacctgcctccatttcaggccgcttcgcttggatgctgcccgcttcctcactctctagatacctgaggctcattcttccatcccttcttttcttccttttcttcttccttccctatttttactcttttctttcatctttctattccttttttctttctttccttttttttcctcccttctttaccatctctctttccttttacttcccttctttcctttcttctttccctactcttttccatttcttctttcttttttacattcactggtcatgtatcctatctatcctgaaccaattgtgtgaagttgcattatccagaacctttaataagctaatgtgtatgtgaatcttcaggaaagaactagaggattcaatgtctcccactttataatagcaaatcctagacttcaggaaacagtgggctaaaaagatgtatgactatcattcattttagtcctagtttatttgctattttccttggagtgtggtcttctctctgataatcattttgcctattctcccattttaaacttttcagctctccttaaggcggcagcaaataggtgaaagattgaatgaatgggcagtcttcagtgaaaagaacaaggaactctgtgagtggttgactcaaatggaaagcaaagtttctcagaatggagacattctcattgaagaaatgatagagaagctcaagaaggtatggaatgcatggctacttaggttttcattcttcataaggcttatgtgtacttttcacaggtacagaaggtggctttactcacaattactttcctgtcaaaggagcagtatattttaaacattttatctttttaatataaaataaacttgcagctgggcgcagtggctcacgcctgtaatcccagcactttgggaggctgaggtgggcagatcatgaggtcaggagatcaagaccatcctggccaacatggtgaaaccctgtctctactaaaatacaaaacattagcctggcgtggtggtgcgcgcctgtagtaccagctactctagaggctgaggcaggggaatcacttgaacccagaaggcggagattgcagtgagccgagatcgtgccactgcactccagcctggtgacagaacgagactctgtctcaaaaaaaaaaaaaaaaaaaaaaaaaaaaaaggatatccagcataaaataaacttgcataaaaaggcctgctttacacataaaatatatagaatacttgcaatttgtgatgaaatagagcatctactattcagttcagtatttgggggtcttaattacctgttcagtaggaaccctttatatgtattatttttctttccttttttttttgttttttgtgtatttttttttgttttaaaaaggtaaagccactagagagaaactgaaagaaaacattcttaagataaattgaattgacattttctctctaaaatatgatttatagaccacagataggaattaagagtttcctgataattttggcttcatattattttaaaggtatgtatatcttatcaaattattttacatattcatttggatccaaaacatttctgat

SEQ ID NO: 37273 - DNA, 2300 bp, Homo sapien
caacctgccaagattgaaccatgaagaaatccaaaagcagaccaatagcaagtaacaagattgaagccataataaaaagtctcccagcaaagaagcccaggacctgatggcttcgctactgaattttaccaaacatttaaagaagaactaataccaatcctactcaatctattctgaaaaatagaggaggagggaatacttccaaactcattctacaaggctactattaccctgctaacaaaaccagacaaagacacatcaaaaaaaaaaaaaaaaggaaaattatagaacaatatctctgatgaacatttatgtaaaaatattcattaaaataatagcaaactgaatttaactgtgcattaaaaagatcattcatcatgaccaagtggaatttatcccagggatgcaatgatggttgaacattctcaaattaatcaatgtgtacatcagatcaacagaatgaaagacaaaagttatatgatcatttctattgatgctgaaaagcatttgataaaattcaacctttcctgataaaaaccctcaaaaaactgagcatagaagaaacatagctcaacataataaaagccatatatggcagatccacaggtagcatcatactgaataaggaaaaactgaaagcctttcctctaagatctggaacacaacaaggatgtccactttcaccactgtcattcaacatgttttcacttatgtgtgggagttaaaaattaaaacagctgaactcatggagatagagagtagaaagatggttaccagagcttgggagggtacatggaggctgcaggggtgatgaggatggttaatggttacaaaaaatagaaaagtatttgatagaacaacaaggcaaatgtagtcagtaagagtttaatcatacatttttaaataaataaaagggtataaatggattgtttgtaacacaaaggataaatgcttcaggtgatgaataccatatttactttgctatcatctattaaaatatctcatataccccatatatatgtacacctactatgtacccacaaaaattaaaaataaattttattttcacaaaagcaacattcatgattcatgggaggaggtcaaaatgtcaacattaacatgtgtttggaagaagttgattccagctgtcgtggatgactttgagggggttcaagacttcagtggtggagggagtagctccagatgaggtggaaacatcaagaggactagagttagagatggagcctgaagatgtgattgagtttctgcaatctcatgttaaaacttgaatggataaggagttgcttcttatggatcaataaaaaaagtggtttcttctgagaccagacaagattgggcatgtttagggtggtatggccgtcaacaagaaagtggcttcttgaaatggaatctacttctggtaaaaattctgtggatattgttgaagtaacaacaaaggatttcaagtattacataaacttagttgataaagtagcagtagggtttgagaggatgactcaaattttgaaaaaagttctgtgagtacaatgctctcaaacagcatcacatgctacaaggaaacttttgtaaaaggaagagtcatcagtgctgcttaaacttcattgtcttattttaagaaattgccagagccaccctagccttcatcaatcaccactggatcagtcaatggcctttcacgttgagccaagaccttccaccagcaagaagattatgacttgctgaggcctcagatgatcattagcatttttaaacaataaagtatttttaaattaaggtatgtacattggtttttttagacatatgctattgcacattttatacacaatagtatagtgtaaacataacttttatatgcactgagaaaccaaaaaatttgtgactcactttattgtgatatatactttatttcagtggtctggaaccaaatctgtaatattgccatgatgtgcctctagatcccaagttagatatttaaattgagggctatacaaaggaaattctatcaagaggggattcaaaaacacttcagaaatcattggcaggagatgtccgtgggtattcaagtttgtttttttatttaggaattagaaaatgcagttgggagctggacagatgacttgacccagttgagcctgctgaaggacaccctctctgcctatatcagtgctgatgatatctccattcttaatgaacgcgtagagcttctgcaaaggcagtgggaagaactatgccaccaggtaagataagttctaaaaatggaattatcttgatgatggaaa

SEQ ID NO: 37274 - DNA, 2300 bp, Homo sapien
tattaatggtagaaagaagtctttctctcctaatttactggtatacttcttttaatggctttttaataattctctttttcactgtagctgccaataacctacttaagggtttaaggaacagctcttctcttgtttcaagcattacatggctcttactatttgtccttatttgtctttatttttaagagcttgttacgaggatctttttataaacttttccaaatcagtttattagaattaggcaagctataaaaactatgtaaataaaagtttaacctattctaatatcttcaacctgaataatcactttaaagctaaagatgggtattttaaaataaagataatacagtgcttttttcatccacataatttgtgtgtacaagaactgtcattttcaatactcctgaattgaaatacaccttgtctgttatctgtgtcaagcgtaaagagccctttgttcttctttctctcacagaagtcactgcctaggcataacatgactgagtgggataccagcaacaggtagaagaagcagtcacttattatctctcaatgataggatagaaagcagaaacagggagtttccattggcttatattttttaacctgtaggagggtcccacagaaagtggaggcaaagagatcccatggaaaagaatgggaatacaggctactctcaccccctgctcaccaaaatcatcactgtgttctgtaccctactgagataggaggttgctgtacttgcaataatgtgaccacacatatagaagacaccacggacaaattcctggtgtgtatgataataatagaaaaaggaaaaatataacattttgttttcaatttgatacaaattacataaagaggcaggaaaaaaactgccaaaatatttccagttattggctctactcttgggtcatgtttgttttttttttttttcttgtttatgtatgtttttctgcatttccccaaggtcctgtaatgaacctacatagcttttactaacaaaagagtaattatatatagccataggttatatgtgtataatgtatgtttaaaatattaacatagcattttaaaaaatggggttcagtgcgtgttcatttttccacaggtgaagtttatttagcctaataatatgatccgtaggaatggtgtgtttctacatgtgtagccctttgccgattgctgtttatgataaggagtatcaacatgcttcagagtgggcatattttcacctcttctaggacctcctcaaaggactgggcacagttaaagattccctcttttttctccatgagctgggagagcaactgaagcaacaagtggatgcttccgcagcatcagctattcaatcggatcaactctctttgagtcaacacttgtgtgccctggagcaagctctctgcaaacagcagacttcattacaggtacagagctcctatttagtatcttctgtatattggctgttctctaatatctgggcacaaacacagaaaaagaattccttgtcatggcaacaatgcctccttcaagactcaagaaaatagcaagtaaacaaacttggaagttctggtggggacgatgaaggtggacgttttgcgctgttctctgccaaggaattttaaaatcggtttaagatgcaagcccctgaaccaatgcctgccaccatggcctgttcaattaataaacactaagcggctttaatataaatattcgtgtttatttaactcagacttttacaagaatcagaagatttttcagacgtgttgtttgatcatgtatttaaagaataatttgaattgttattgacttatggtgcatagaaataattatagtttttagaaaaattacataaagaagatttaaattgttatagctttttttataggaacgtctagagaatggcaatttgatacaagaatatgaaaaataattttaatatccacttgcccttttaccagactttattaaaataccaatttttttttttttaactgaaataccaatttcttttgtggaaaaaaaggctggagttcttgattatgaaacctttgccaagagtttagaagctttggaggcctggatagtggaagctgaagaaatactacaagggcaggaccctagccactcatctgacctctccacaatccaggaaaggatggaagaacttaaggtaagtgtgttcaaatctgagtcccagatcttttaccatctgtcttcaaaaatctttttttttttgagatggagtctcactctgtcgcccaagctggagtgccgtggtgtgatctcggctcactgca

SEQ ID NO: 37275 - DNA, 2300 bp, Homo sapien
tatttataaaatgttgatagcagtctcagtctgcttcactgagcttctcaaattttcagatggcattaaaatagaaattagggttatgatacaggttcagtatgagctccagatcttttcttcattttgcttttcattcttgaacattttatactgacaattatgaatgcatatcccaaataaaatgaggatttgattcatcaaagaagcctgaagcctttcagaatcacatagaattcagagtattttagagagagaggatcatacagatgatcttttcccatctgaagtcagtcttctgatttcccatctgaagaaactgagacccagtagaaatttctcacctacccaaagtgactcagctttgggtaggtgagtagtagaaatgtgactaaatctcagatactagggcccagaataccacattcgatcacatttcttcctatgaggtaggcagcgtaactttttgaataccaacatatatgaacttaataatataaataatattacagtttctgacatgtatttctttcctcacagcctcttgagaaaattacatagtaccatttccttatctggtagaatatcaaattttacttttttaaagttatgctaatttgccatgtgtaaaaagatgactttttttttgcatttgagtgtaggaagaagtacttctgcagcgtgcctcttctgaaagagataagctttttggattagtaaaaggtttttaggacatgaaactataatggcccaatttcagtgcaccccagagttccataatagaacaatttaaagtgactattttttaaatctttcaggatctggaagatttgattaaagcaaaagaaaaagaagtagagaaaattgagcagaatggacttgctttgattcagaacaagaaagaagacgtctctagcattgtcatgagcacactgcgagagctcggccaaacctgggcaaatttagatcacatggtaatattgctcacagaaagccagctccaggaccgtgtttgccagctctgtccaaactctgggttttggttttcctaaagtagcagaggaaataatcaaatctatacattatctccttgtacttttaagtccacttcgttatcctcttttttttttttaaagtctagtttctggtgttttctagaataagcctttattttaaacattactctcttaatgatctcatccattcccatggcaatagatcattctcaaacatctgtctccagcctggcaaaagatatacaaagtggatatctgtatctaagtgatgcaaaccaagctaaacacttttctgacagagataaataattatgaggaaggaatatcttagatgttttgtcttaagatatttatctgagtgtgtgtgtgtgtgtgcgtgtgtgtgtgtgtgtgtgtgtttgcgcatatgtgagatagatatggatattgttatagctatagatagatttcactttctgggacctgactacctgtattcaaattgaaatttctcacattctagcagtataatcttgggtaattttcattacctcttagtgtctcagtttcctcatctataaaatggggataatgatcatacctatctcataaggtgttgtgaggattaaatgagttaatgcatttgaaacactcatttaatacaattcttaaactgttttattaaaagtatcaacctcttataacttaaaaatatatatacatatatgtatatatatatacacatatatatgtgtatacatatgtatatatgtatatatatacatatatatatatatttatcagttacccttttaagcatttccacttagaactgagtgtttaaagtgtggaaggcataaatttcaaagttgatacattttaccttttaaatctttttctttttagttttgtttgtttatgatacctgaaaccctgatgaagttcttagatgttaatattttcccatcaattgaatatatattccatcattctagatattatgaaattataagccatatttgtctttttcaaaaggttggacaattaaagatactgctgaaatcagtgcttgaccaatggagtagtcacaaagtggcctttgacaagataaacagttacctcatggaggccagatactctctttcccgattccgtctgctgactggctccttagaagctgtgcaagttcaggtggacaatcttcaggtaaggaattaatttaacacatccttaacgttcattttaattttagaaaactgaaaaattaccaaatggagacatcatcctgaaatattgccatatgtt

SEQ ID NO: 37276 - DNA, 2300 bp, Homo sapien
tgaaaacccttctatatgagacaaagagaagacatactacaattctaaattgctacatgaaatagaaagtaatatcccattgtacaaactgtaaaactcatacagttgtgctctacttttggaatcttcaatgtatgatgcaaagtgttttaaaaatctcatcaaaatctgatcctactgcatcatgactttgacctaaactactgataaatgctctttactattttaagtatttaattgatatatttggcttttcttcttagacattggaagatctactgggaaggatgacttggcaagttcatggtctttttatatttttgagacagagtctcgctctgtcccccaggctggagtgcagtgaaacaatctcagcttactgcaacctcctgggtttaagcagttctcgtgcctcagcctcccaagtagctgggattccaggcatgcaccaccatacccggctaattttttgtatttttagtaaaaagagacaaggttttgccatgttggccagcctggtctcaaactcctggcctcaagtgagctgcctgcctcagcctcccaaagtgctgggattacaggtgtgcacctctgtgcacagccatggtttttctttgtttgtttgtttgtttttttagttaaaatttaagcttttctctggattaattttcctatcatagccttattcatatgtatttcatttactttgacactcaaaataatgaaggccaaaacacaccattaactctcttttaatggtgtgttttctccctactaaagaggtttttttaaagacctttaactacataaagaaatgtttcttctctttaatgtcttttcttcggcattttattctaagcaacagtgtgaatgtttgttatcaaatcaaaccaaagtcactggaaatttgtaaatgcgaactgtcttttttcaccttcctttccattggatgtacttaatgcttggttggcatactatagagctgtagtcggaaagttacaaaaagagttaacagatcattaagagtcatttattaaaaggtgcttggaaacaaatcagtgtgcttccaactgtttgggaggattttccatcttatgaagaaaaaggcttagaggagtttgtgtgctcaaggtcattacgttagttaatggagaagataggattcaaactcagctgtctacacaaccatctataatgagtattctgtaaatatttaataagtgaatttctctacacacattgcttgtatctttgctggaacacaaggagtgcagtaaatacttaaagatagtgaagtcagggaaagccaggagggcttgtaactaatcgcacatcgctggtgtgaccaggtgtttcaatgccaaagcagttaaaatgtgtcttgtcaacatcatttgagatttttagtatctattattcacttttaaccatggcttgttttgctgttcttactgatttttttagatccaagacaaaataaaagaagttgagcagagcaaggccacgagccaggaactcagccggcaaattcagaagttagctaaagacctcacaactattctaactaagctgaaagcgaagacagataatgtagttcaagctaaaactgaccaaaaggtaagaagtagaattttaaagggtactactgaatgaattaaatagtttttggagtcagttttacttggggatataggataaaaaccttttaggaaccttttttaaaaccaaatagtaacagcaggtggtaaagaaattttgtaactgaagcaacacagatcctcttacataattgatcattataattgaacagtattaataaatatacatgcatgagtgtgtacgaaagaagagcgtcaaaggactaagtgatgatttaggaatacaagtatataaattccaaactgaattgtgtccttggtagctaaatctgtgttcttcctctgttgatgagttcagggactctaatcctttttgggtggggcagaaggaaaatgttagccttctcactcagcctcataggaaataaacaccagcattacaacatatcctgccctgcctttccaaccgaagaaacaaaaatgacctgatcatagtagaattatagtagaattattcattataatatttggctttgacaaaaatcagtctgatctcgggaaacctggagaaatttattttctgtactctaatgttctttcattttggtgaccatcaaggtgctgggagaggaattagatggctgtaattcaaagttaatggaattagatgcagcagtacagaaattcttggaacagaatggc

SEQ ID NO: 37277 - DNA, 2300 bp, Homo sapien
ctaggtttgacaatgaggctgttgggcaaccagtctgagaaacatttgcacagcaagggaaggtgagaaaccaggttacatggatttaggagtaaatggcaagtgaggaagaggagatagcagaaatggactaatgtttcaaaaagttaataaataagagaaagtaagataattctttcacaaaggctgcttcctgggttgacaaatactcttttttattgagaaagcctttataaagtgcttccataaagacaaggaatatgggagaaggaattggcagaaagaaattgggatggagaaagtgaagactatcagaaactgcctctcagaagttcaggtccagcctgaatgtaggttagtgtgtgggtggttttaaaaaccttggaggaaatacataaagcacctcctctgtccttcaacaccatacctatcacatccacaggaataatcactgagaaaaggcaactctaaagcaaaatgtatatgggtgtgagggcgggaatgtacatatgtgtgtatgtgtatatcatatgtttaaaaatgtaaatacaagataagaaaatatatgcaaaagccatttcaaaactcttgacaatgatgatgtccttattcaaattctgaatgactagatttctgattgcaaatattgaagtgttccattttcatgctaaggaaaattgggataaagcataagagagtattttgggaaacttcaaatttgaaattgctcacaaaggcaaaataattacaagtattaaggtctattagttagacatagcactggttaaaaagttagatttttttcttcatcaaataactactatacacactaataaacagtgatggtttttagaatcctgctgctgagaaggttgaatatacatatcatgctgtgtgtaagggttttcatgtcattgtaatttagactactgcacaactgaatactaaatactttcaaatgatctatattaaaatatggctctattgtatataattatgaacagatatatttatttcaagttaatttaatgagatgcaaactatattatatagactagttaagacatactttatgcttaacataatttattaagcatgcttcatacttaacattccaatgtttctttacttgctaattggtcattgattttcttcttgaacatttttgtgcctgattatcttttatttctatttaatccggtagtaaagtcataattttgtaataatattaacaaaatcctgcctttagcaatagatatgtaaatatataaacatcggatgattatttcaccaagaaaaattttagtaagagaatctattctcagaaatgctgcaattatatcaatttaacaatgtgatttaattttatcttgttttcctttacagtatttgtgtgctttaagatcgagctaaattgttaacttggctatagctaaactgttaaatttctagtgacttttttaaggtaaaaaaatactaataaatgtactcagtctagaggttactttaaacttttgagtaagtcagtctatgaatgaattattcattttatatgctacaaaaatgtttacttagtattgaggtatttggaatcgagtagggctcattcttttgctgtgatgagtctgcttgattcctagtagaatggaagtgtgatttaagccaccaccctgttgaagaagatgaattgagtatagagaccgtgagcagaacacagttctgccacgatctttatttacttgagcatccactttgagggaaatatgggtttaatcattcacaggagcaatccaccacaggcaaacacttgagtcactaaacattttcacgtgtgcgaataatgcctgatttcagggtctctgtttagtctgtttcaggatattgaggattctcgggatttttttgccataagccttaggcactcgtgatgacaactcccgctattataatttaagagtggacagatgaattgattctgggtccttgtggcacacttgttaaaacttcctggcaggacagggtccccctgtgtacacagttgaaaacttgcagtccaagtgactcacaggctcttcagttaccatggtgatattccattacaggagctgatagattccagagagattggtgcaagccgtctcagcagagtggagtcgctggctcccgaagtgaaacagaacacaactgccagtgggtgtgagctcatgcacacggagatgcaggccctgcgtgccgactggaagcagtgggaagacagtgtattccaaacgcagagctgtttggagaacctggtcagccag

SEQ ID NO: 37278 - DNA, 2300 bp, Homo sapien
gtgggggtgtgtgtgtgtgtgtgtgactttaagtgctccttgtggagcaggactaactaactcataggcactgtgctcagaattggcacattttgtttttaatttgtatatccctgatgactgacgttgaacatattttgttaagttatttgcaatctgtatgtctttttaaatattcaagttggccgatttgggtgattttttttgttattgaggtctttttatacaatcccaatcaaaacgcccacagactttttgtagaaattgacaagatgattttaaaatgtatacataaaagcacaagacctactagaatagccagtacagttttcaaaaagaattggaggactttgctggcagctctggtacctaaaataaataagtaagtaaataaataaataacaaatgaaaaaggattggaggacttatactagctagtttcagtgtggtacaggctgaaggataaacatataaacgagtggaacacagtccagaaatagacccagacatatacagtcaattgttttgacaaagatataaagaaagttcggtggagaaagaataatattttcaataaatggtactagaacaattggacattcatatgcattttaaaaaatgaccctcaacatatattttacatcatgtacaaagacctattaaacaaaattcggagcacattatataatgtagactatttctgtaggcattttaaattgaatcatgttgtgcaaactttattccatattattaaacattatcctacattgtgatttcttagaggttgcacagtgtcctatcataagaatatatctggatttatttaattattgacctgtttttaacattttggttatttctatattttctcctattacaaataatggtatgaagaatatcactttacctaaatcttagtgcacataattttatttctttggaaaatctctagatgtaaacttgcttgctcaaaggcattttattcttttgttgttgtttcttttatgagatagtctccctctatcgcccaggctggagcacagtggtgtgatcttggctcactgcaacctctaccacccgagttcaagcctttctcatgccttagcctcctaagtaggattacaggcatgcgccaccaagccaggctgatttttgcatttttagtagagacaatattttgccctgttggccaggctggtctcgaactcctggcctcaagtgatcagcctgccttgagcactcgcaaagtgctaggattacaggcatcatccatggcgcccagctgttttttgtttgtgtgtgtgtgtgtgtgtttgtttgtttgtttaaaaaaaaaaaaaagcctacagcttccaatattcccagagggtctcccatccaagtactaaccaggctggaccctgcttaccttcacaagatcaaatgagagaaagtgcattcaggctgataggattgcagactaccttatttttataaacaacagctatcttctccttttgacagtcttcagggtagtcatatccaatgagaatttattacattgagatggaagagaaaatctgatatatactttaattattgagtaatctttttatttgttagttttgggctatgttttgttttattgttgttttctttcacacaacatatgccattatgaaataattaaaacaacatggaaaaagacaattaaaaatatatatatttggatgactcatctatgtaagtttgagttggcaagaacatatattgcttctttgtcattgagttcatagattttgtttcaatggtcattgagttcatagattttgtttcagtggttgcgtgcatacctcattcacggagaatattttagacattggagtaagtaggattaaccagcagcactagtttgaggacagtatgtaggaatccgtctatgagtattaatacctttacgtagtgaaacatcaagtccaattgcaggcaactctcccttttcctgatacatgacaccaaataatatattttctttaatcattacagtcagggtcagtgctgtggacttattgacttaatgagagaatatcagaacctgaaatcagctgtatctaaagtcttagaaaatgccagcagtgtgattgtaaccagaactaccataaaagatcaggaggatcttaaatgggctttttccaaggtaaaattcaaaatgtgtttatgttggtattctgctttagtagatctggtttttactcataaagcagttatctgcactattcttatcagtatacttagatgtgggtaattcatgctaatgagct

SEQ ID NO: 37279 - DNA, 2300 bp, Homo sapien
gctaaaacgccttacctgctggtgtttggaagccaatcattgtcctacttttttacctaatattaattaatattgaaaagagttaattattcccatgatgatgaaatgtcttttttccaagtgctttttaaatgaataataccctctaacaaaatgatcctttcagtaatgagaaagcagcatcacattatgattgtttttcacatcaagagtatggtaaagaaaactggagattggaagaagcatgtggaaaccaacagtcgcttgatgaagaagtttgaggagtctcgagcagagttggagaaggtactgcggattgctcaggagggcctggaggaaaagggggatccagaggagctcctgcggagacacactgtgagtccaccctttaggggacacttgacctgaatacatggacaaacaaccttggaggaaagcttaaaaaaggcatgctgatctgatacagaaggagagcgggcagatgagtcagggaagcagagactttttaggtatgagacccaaagatatggtgagcaaaaagaacttcaagagagttggtgagctgacttgtcattggccattcctaagtccccagaatagtagacagtcatagaataattcaagttatccaaattactaattcattatttagcttgcaaattcttctataactaaagattcttttaaacagataactcgaggtgactagctaagtcctttgtgctcattttatacattcaccatatcatagtatagatactgtgtcacttgaagtctggtggctgatacacaacttgtcccagtatcttcatgtttatcatcttcatgtttatcatgaaaagccatcttcatgtttatcatctcaatatcaatattgggaatattagtcataatgttcatgaatggtatatggaaataaccagcactctgagaacatgtatttgagttatctttcctgacatttcagtggctatttgtataaaccacactctcaaatgatatatgcaatgtatttgtgattctgcagactagatttagggttaatgtctgtgaccacaaaacacaaaatatctcattcagtttattcacctctacagtatggtacttcttgttttgaatcaccgtttttacaaaataattctgcatgtctactcctgagactgtgtgagacttagtcatatgtaatatgtgcatgtgtattgtctttatctacttgactgccagagcaaaatgccatagacgggtggctaaagcaacagaaacttatgttctcacagttctggagaagggaaatctgtgatcaggtgctagtatagtagggttctggggagggccctcttcctggcttgcagatggctaccttttccctgtgccctcacatggcagagagagtgagctagcaagctttctggtgtccctcctcataagcgcactaatcctatcatgaggaccccatccccatgacctcatctgaacctaaccaccttccaaagttcccatctccaaataccatatgagtctgaagaagaacacaatttggtgctagcatgtgtgcctatgtgtgcacatgtgtgcttctgtgtgcacatgtgtgcttctgtgtgcacatgtgtgcttctgtgtgcacatgtgtgaatgtgacaatggctcatgatgaagcatcaggccctgaagcactgtggttggggaatgtggaattatgaagcttagtcctggcttctgttctgttcttctgacttcaccaaaggggaaccgaagctctatcgctacagaatcaaggttttggcatctccccttggaagatgagatattccttttggaatattctaccaaatttgaaaatcacaaagaatttttctaaaaaataaaaaatactagtagaatttcagatatgatggcttctgattcataactataggtgcacatagttcatccttaaaaaacaatagtgggtgcctggaagtctgcaagagggcagcagctggctgagaggcttgtttggaggcttagaggctgattgtgcctggtgctgccttttcgtctgtccaacactcttacccactttccccttccatgtcaggagtttttcagtcagctggatcagagggtgctcaatgctttcctgaaagcttgtgatgaactcaccgacatccttccagagcaggagcagcaggggctgcaggaagctgttcgaaagctccacaaacaatggaaggtgagtcaggacaggacggagacaccgtgcatcctcaatgaagggagaagcttgagcgtgttaaggtccaaatgtaagagaaatt

SEQ ID NO: 37280 - DNA, 2300 bp, Homo sapien
tatgaatactttaaccaaaccactgtcctttttatcttacacattgttgtcaagtattaaattattgacatttttctagcatgataagtttgttgtttctgctggttctcactcatggtggcttgtttcctgtggttcgtggtctctgctttcctcctattgtatttgcatttgctaataacctggccatgttagccctcattgagggttctgactaaatggaggagatctcatttcagtgtcctcatcctgttcacattgtaagactcaatctctctcagcagtggtgtagatatttgcccaggacaatctggatttgtctatttgttttttgcctacaggtctgtgatctagtttttgggtcatgttttactaagaatgggggacctaaaatatttcatttacttcctgtgaacccagcaaggtgaattaaaatcatatattttgcccagcatctagctgctttatagtgagatggcctttcagaggaatcagtgacatcatgccaactgttgaagttcttttttttttttgagacagagtcttaccctgttgcccaggctggagtgcaatggtgtgatcttccctcactgcgacctccacctcctgggttcaagtgattctcctgcctcagccttccaagtagctgggactacaggtgcacgccaccatgcctggctaattttttgtatctttagtagagacggggtttcaccatgttggccaggctgatctcgaactcctgacctcgtgatccaccagtgtccgccacccaaagtgcggggattacagacatgagccaccacacccggcctaagaatttcttttatcatatgtgtgaaaatgtttttgtttgggtagcttgtaaagactttttcaatatagtagatacttaaaaactgtcacaaatcagagctagctggggtgataactccaagtgtgctctgcagtcacttgggaaagtttcagcccaaccataagctacagtaatgtgtctgtgtgtggtaaaggaggtagagaatggctagaatactcatcatcaatagctgctctaagaacacctgtttgttctctaccctcctgtgatgagttcttggcttcacataataccctcccttgaggcacacatgacttgtgagtatctctgcacttaccttcagagtcaaagcaggtcaaaatgtgatcatagcaaaatatatcaggttagaaatagtttggccctaaggtttttctaccatgttaaaatgtcatatgtgggcaagcatatacaaacctgaacattttaatttataatagaaaagttttcacttgtcccaccaagtgtgtctcttgattttaggctggttttgctactaatttctctaatttgctaaattttagtatgagataaaaatattaattttaatgtattattttggtggtctaatatgtcttactttttcaatgagtgacacatttttaagtactgtatttattctgcaatcaagacacaaactaagctctagaaattaaggcatgaatctcctttcacctgacttcttccttgcttctatgtgagaaattggtgagggagtgtaaaatacatgtacatctttttagaaattagtttgtaaatgatgaaaaacacagcaaacaaatcaaagaagattcaaattaacctaaataaatgaatcaaacctgtggagttctatacagtctataattaatatttattaacatcacatttaatcttctcactgtgttacctatggggtattccctgcacttgtttgaaattttctaatcaaaagggtatttcaaaatatattgtaatatgattgatttactttagatggcaagcaaataccactttataatagtctgcatgcattcaaagtaaaataacagtagaaagcctaatctcttttgccattaaaggtttcaatttgtcatgctcagttttaagcttttaaaaaccaacatatccagaaaggcaaaaaatactaaaatcatttcatagcagtaattacattttcctttggatcatgtgcctttaaaacgtctgaatgcattgctgtgcaagtgtcatgtgtgtttaaaagatgcataattattagatgcagttccagcatagtgttttaagtacaagcacccagctcctattcaaggtaagagcctttgacaggcaccaagctgcctctgaatgtggcagcgggatcaaattgttgaatacattgactcatcggtgcgggctggaaattatgcttcttagccctctgtgaaacatgtttttcattttttatttttttttaaactgtatc

SEQ ID NO: 37281 - DNA, 2300 bp, Homo sapien
gaaattatttcttgtgtatgtcccccacaacatagcgtttactagtttgtgaacagctgatactcagtacatgctggtggggtggataaaattcaattcttcttttgaaggtattaaactacttctgtgtggcttttctctctttttttttcaacttttattttaggtgcaggggttacatgtctaggtttgttacatgagtaaattgtgtgtcgctgagttttgtgtatgaatggtctcgtcacccggttagtgagcatattacccaataggtagtttttcaacccacaccccctcccaggatacaaaatcaatgtacaaaattctgtggcatttcttttcttttttttttttttttttgagatggagtctcactctgacgcccaggctggagtgcagtgatacgatctcggctcactgcaagctctgcctcacaggttcacaccattctcctgcctcagcctcctgagtagctgggactacagaggcccgccagcacacccggctaattttttgtatttttagtagaggcagggtttcaccgtgttagccaggatggtcttgacctcctgacctcgtaatctgcctgcctcggcctcccaaagtgctgggattacaggcatgagccgccacgcctggccaattcagtggcatttctatacaccaacaacttgtaacctgagagccaaatcaaggatgcaaccccatttacaatagtcacacacacacaataaaataccttggaatacatctaactaaagaggtgaaagatctatctctaccagaagaaccataaaacactgctgaaagaaatcatagatgatacaaacaaatggaaaagcatcccatgcttatggatgagaagaatcaatattgttaaaatatccatactgcccaaagcaatctacagattcaacgctgttcctgtcaaactaccaacatcattattatctctttatacctctaattaaagcctatccaaaccctacctcttttcctttctatattagttcctcttgttacatagcaaagtaccgcaaaccttgaagtttaaagcaacaatcatttattatctccaaatggttgcatgtcaggagtccatgcaaagcttagctgcattatctgttcagggtcttacaaggctataactaaggcatcagctggatttcattcttatctggatgctcaactgtggaagaatccacttttgggctctgtcacaatgttaacagaattcattccttgtgactgtttgacaagggcctggtgtcttactggctgttcactgagattgcacttcactcctgaagggagcctctagttccttgccattgaccctctgcaaaggaacttcacagcctagctggttgcttcttctaggccagcaggagaatctctcactccagtcagctaagctggagtatcataaagtaacatgatcacaagtgtgacatctcatcacctttgtcatatcctattggctagacacaaatcacaggttctacccacattctgccgacacaaaaatggggactccatgtggtgggaatttttggaggtcactccagtgtgtagtcaccacattctcatctgggtgaagttccttttttgcttcatgtatacggctctatcttattgcattactgtgtaaccctttactattcatagcccttgcttgtccatttccacctctagatattttatagcagggaccttgccctattcaaccctctgtattcctttgcacttagcataaaattcagcacttagtggtcttggtgaattttcatttttaacagctttgttgaagtataagtcatcagtgaattttaagtaagtggatgaaggtaaacatagggctaacaaatggcaaattttaaagcatttgcagataatttttaaaggaatagtctatatgattatgtagatcgactcttgttgacttttcccttcaagacaataattggtaaaatgaatgagaaaacgatttcacgattccttccagatttgtgtaaataggactttttctcattatacagcttcatgaaatattacattatttaaccagatttctttttccttctagatgagcaagagatagtacaaaaacgaactttcacaaaatggatcaactctcatctggccaaggtaaaggaaactacccagcattacaggtttacttaggttgagccagtaaatcattaaatgtccagtataacaaaatgcttctgtccctgttgtcactgttgcgaatcaatgatactgtaatcttattggttggtctagctgttgcctaagag

SEQ ID NO: 37282 - DNA, 2300 bp, Homo sapien
aggggatccatttataaggtccttcaggcacttttcactatctattattctcccaaattaagatagcttttgtatgtgggcaggtggaatatttttccccaggatatacaggctgctaatgggcacacaattccagcagggctataggtatgtatgtgacagcccaaccacaagtaattatttctccatgaagaatcccttggagagtcacccactgagaagtacctctctagcctataagacaccaagtattgggtcctacttctagtatatactcctttcaagtagccaagagaagtttgcctctatcttcctaccaatgacttccattcactgcatcgctgtcccatgtcttgctaagttagtaatgctttcttgctccagtacatccttctgatgcattgcacatggggcagcagcaatgtgcaaaggtttgcatcttttttttttttttagataataggctaaaaagcatgttactagctttgcattcatacattctgaccagataccaatatataatagtattagtaatgccattttaaaataaattgtaattcataattgcactctattatttaaccaatccttcatgagcaaagtccttttatggactataatccaagttataatataatttttacagcactcacaggctcctctcattttcttttttccttcaggaaggtgcaccatctcacatgtatgagctttctttaggagttttgcttttgccattctccccttcttcctctcttcccccattccttttttaaccttcatcatcataacctagaaatgcaatgggaactgtaatcaagtatcacctccctgtgggcctcttcggaggccgtttctttctcttggtgcattattcaccccctcttctttctgtctaattatttcgtttatggcaataccttctcttcagctaaacctagggttaggaaattcttatttaaagtacattttgcaatatcaagatttcaacgactactctcctacctcttcccaaagcccactgcaccccctcctcccctccccctcccccccccccccccggcaatgaaacttaaccagccaggcacggtggctcacacctgtaatcccaacagtttgggaggccgaggtgggcagatcacttgaggtcaggagtttgagacgagtctggctaacatggtgaaaccccgtctctactaaaaaacacaaaaattagccaggcgtggtggtatacgcctgtaatcccagctacttaggaggctgaggcatgagaattgcttgaacccgggaagtggagcttgctgagatcacgccactgtaccccagcctggatgacagagtgagactgtcccaaaacaaaaacaaaaacaaaaacttaaccaatgcagagaatttagaaggaaaatgtccactctgcttcacccaccccaccctagccttaaaactcttgagtctttatacatagggaggaaaaaaactaaatcatacccatttggcttctaaaattggagtacttgaaactcaaatttttagaattaaatggtttttacatttatactgctttaattcatcaaattggtatgagaaacaaggatttggtcccattcctggaaagagtacaacgcaacagagcaaaacatgtgcaaagcaggctaaattagcagactagagaacccgtgcatattgaaaactagaattgagtgtttttagtataagggaaaccactttcatagatcaatggaaaaagttgatagtttaaaaagaaaacatggaatgaaagtgaacatttcttcttttagcaacccaattttattttatatgtctcatttatgtatttattttattaaatatcatgggaattcctaacatttgcatagtactttgtagtttataagtgcttttcactaagttgtttcacttgataatggaccaggcattcaaattaaatagaaatatttctccttttagcactgtggtgaccttcgtagattttttttttatgttgtaccttttcttttttgtttttcaggttcttgagttcatgtaagaggacagtcttaaaacggaagaagaaaaagaagcagttcagtctttgggagagctgcctccttgttgagtgctgcaaaggcctggaattcatttatgacagaatagatctagaaaagtccaagcatgttttctagagtggtgtagccctgtgctgcctccagtgaagagtctcttggtgttggcttcgtgcttccggagggaccatggcaacctccagaggggcctcccggtgtcctcgggatatcgccaat

SEQ ID NO: 37283 - DNA, 2300 bp, Homo sapien
aggcttgtgttttaagtggctcacttctcaagtaagtaaacccaagaaagtagttgcttaacgtgtagaatagcaagttggtggccaggtgcagtggctcacacctgtaatcccagcactttgggaggccgagctggatgggtcacctgaggtcggaagtttgagaccagcctgaccaacatgaaggaaccctgtctctactaaaaatacaaaattagccaggtgtggtgacgcatccctgtaatctcagctactcaggaggctgaggcaggataattgcttgaacctgggaggcggaggttgcagtgagccgagattgcaccattgcaccccagcctggggaacaagagcgaaactccatctcaaacaaacaaacaaacaaaaagaatggcaaagttggcacaataactttctacccatcttcaaaagccggcagggtggattgattctatgaaggtagggattgagagggtgagctgagccattctgatctgtttcttctgagtggcaagcctggaaatctggaccccattttgtggccactgggcacagagggctgacctggaataattatgctctggtggttgtctccacaaggggctctgggggtgccccaggattgttgccctcaggcagaggcagggcatacattgagagtgatcccaaacactcctcctccaggcccaacttttggaggtagcaagttctgcaaatagagatccattgtttggtttctctctctaaaaaaaaacaaaagtcagcacaaagaagaggaacacatcagattggtttaccagatttgtttcagatgttattattttgacacgatccagaagaaggagaatttgaagaaaatggaaagctaggcagtgggaatgttggcagcaggtaagggaaaggcaggcagcaaagagaaacttcatctactttataaactgctccttcctttcagcaaatttagaggataaatgactgttttgttcagattggagattcaagggggggattattacttttaagattattgcaacatggcttcgattattttagctgcaatcatcctgttggacttggacttcactgttggtgaagagagactgtgtttgactttgcctggataccataaaaccacaacaaaataaattctcctgaatgctaccaggcaacaccaagatctcttacaccacgagaaggacttgtggccaaagatacaaatggctccgcaatgtacagggtgcatacagtgcacctgaagaacctaaaagtggtttttagaatcatcataataaacagtcaagaattaaagatgtcaagcgctttctcaagaagtctaaactttatacataacattaaaaaagatctataaagcctgaccagtctccctcaaattaagttatttgctactgacttggcagccaaaacgatttaggatctttcggaagttgatgaaaaaggagccagcgggttttgctctttgctctgcatcacgcccttcctgggaccatcagggaacctcccagcctttcaggataggttccgctcagaaaggtcacccgggcagtggaaaccgtgggcaaaagttagctggcaggacagcgcagctcctccaggcagcggaggcagcgcgtcccggctctcagggacatttccttcccacctcgacccccgggaggtggtcccggtataaaggctcgctgagcgggtgggtcacagcacagctttgcagctgcggagaaacgcccaaggccgtgcatctccaggaggtagggaagcctgcgagcctccgggtccccgcccccagctcttccaggcaccggcgcatcccggagccgggcgcggggcgcggggcacggagccggggagggggtgtggcgggccagggcggtgcagggaccctgcccagaggctgaaccggcctgggcgaccttccttcccgacaggagcagtagatgcgtgggggagggcgaagggggaggcctcaccccccagcgagcagccgggaggaggaaccggtcgcggagggcggggagcgcggctgagcagcccggcgcgggagtgagtgtgggcgagccagccagggtgagcgcgggcgccgggccgcggccgccggccgcagcgggctgagattgttgtcctctgtcaccagggcggctgggctcccgcagtcctgcagaccgcgcccgatcccggcgacagggcgggcggacagccgcgcatccccggggtcccgccgagcctgggcgcagagagccgggaggaagcgttcgctcgcttcgccttgctgctgggaaactgaacga

SEQ ID NO: 37284 - DNA, 2300 bp, Homo sapien
tggccaggctggtctcgaactcctgtcctcaagtgatctgtctgccttggcctcccaaaatgctgggattacaggtgtgagccaccatgcctggccaactcccgttcttgaaagctctcatagcaacatttgcctttgcttggagaatggggttttataagtatttgtgtggttctctgatgaatgtctggctcttcccccatcatactgtaagctccatgaaggcaagagcccggtcagagtttgcttaccacggtagccccagcacttaggacaatatttgttatgtggtaagtgttcaagcaatagctgttgagtaaatggagctacaacacccttccctggggtgtgtgaaactgacaagccctttgcaaaactctaaaatgtgcttagtccttctacagaggataaagtttagctgagaatgggatttcagctgtatagggaatcaatgccagcaagacagctctatgcttctgtctgtctcagcctgtgagaacagagattaggcctagtagaggagttttagttggtggaagcaatgtttcaggcttgtgttttaagtggctcacttctcaagtaagtaaacccaagaaagtagttgcttaacgtgtagaatagcaagttggtggccaggtgcagtggctcacacctgtaatcccagcactttgggaggccgagctggatgggtcacctgaggtcggaagtttgagaccagcctgaccaacatgaaggaaccctgtctctactaaaaatacaaaattagccaggtgtggtgacgcatccctgtaatctcagctactcaggaggctgaggcaggataattgcttgaacctgggaggcggaggttgcagtgagccgagattgcaccattgcaccccagcctggggaacaagagcgaaactccatctcaaacaaacaaacaaacaaaaagaatggcaaagttggcacaataactttctacccatcttcaaaagccggcagggtggattgattctatgaaggtagggattgagagggtgagctgagccattctgatctgtttcttctgagtggcaagcctggaaatctggaccccattttgtggccactgggcacagagggctgacctggaataattatgctctggtggttgtctccacaaggggctctgggggtgccccaggattgttgccctcaggcagaggcagggcatacattgagagtgatcccaaacactcctcctccaggcccaacttttggaggtagcaagttctgcaaatagagatccattgtttggtttctctctctaaaaaaaaacaaaagtcagcacaaagaagaggaacacatcagattggtttaccagatttgtttcagatgttattattttgacacgatccagaagaaggagaatttgaagaaaatggaaagctaggcagtgggaatgttggcagcaggtaagggaaaggcaggcagcaaagagaaacttcatctactttataaactgctccttcctttcagcaaatttagaggataaatgactgttttgttcagattggagattcaagggggggattattacttttaagattattgcaacatggcttcgattattttagctgcaatcatcctgttggacttggacttcactgttggtgaagagagactgtgtttgactttgcctggataccataaaaccacaacaaaataaattctcctgaatgctaccaggcaacaccaagatctcttacaccacgagaaggacttgtggccaaagatacaaatggctccgcaatgtacagggtgcatacagtgcacctgaagaacctaaaagtggtttttagaatcatcataataaacagtcaagaattaaagatgtcaagcgctttctcaagaagtctaaactttatacataacattaaaaaagatctataaagcctgaccagtctccctcaaattaagttatttgctactgacttggcagccaaaacgatttaggatctttcggaagttgatgaaaaaggagccagcgggttttgctctttgctctgcatcacgcccttcctgggaccatcagggaacctcccagcctttcaggataggttccgctcagaaaggtcacccgggcagtggaaaccgtgggcaaaagttagctggcaggacagcgcagctcctccaggcagcggaggcagcgcgtcccggctctcagggacatttccttcccacctcgacccccgggaggtggtcccggtataaaggctcgctgagcgggtgggtcacagcacagctttgcagctgcggagaaacgcccaaggccgtgc

SEQ ID NO: 37285 - DNA, 2300 bp, Homo sapien
agaaagagagagaagggaggggaggggagaggaggaacctgaaacccttgcatcaagctgcaattcttaacaaaattccaccttagtgaaagagtagtcaaaaaaaatctgcctgtaggcaaagagagataatgagaaaaacgtctgctctgctcagctatagctccaaggcttccagagagctgttttccctgagaatttgtaatcattgatctgccctcatgctgtatgggcttaaaatttacagcacctgtggaaaaacgctacaccatgataacaattaaagtggtcccaggttggaaggacactcaccgtcagcagagagaaaaatgcaaatctattctagaggaaagcagcctcaatcctgccactcaagattctcataatcttcagccaaacatgaacttacaactaaaaaaaggaccaaatacatgaggaagtaagtaagtatgaatgaaactcgattaaaaggacaaaaaactacatttacatcctaagaacttggaatcagaatcaaaattaactccaacgattatgcatgaaatgtttaaagaaacaaaagacaataaaaatgagcagggaacaaatgactccaaatatgacccaaggtgtgtctatgaaagagacctttaaaatgtgttcctcattaataagtaaaaaacggttgcactcaccacagaaagctattgaattgaataactgccatacaacagaccagatgttcacacagaaaaatggatgggactgaaaaacacagtgccatgtggaaaaaggtaagagacaaaatgaagcttaaagtacaatgatgcctattaaaaatgtatgcattcaaaccctctatatgttttagaggatcattccaagtaaatgatacataggtcacacattagaataatggttggagtgtaatgcccaacctggtttttactaaccctgttttcagactttccctctcctttaatcacctagccttgtttccacctgaattgactctcccttcgctaaaagaaccagacagactccatcttggctctttcgttggcaagcccttcctcaaggacttaacttgtgcaagctgaatcccagcacatccaagaatgcaattaactgataagatactgtggcaagctatacccgcagtccccaagaattcgtctgattggtaacgcccaaagcctcgcgtctatcaccttgtaatagtcttaaagcctctgcacctggaactgtttactttcctgtaaccatttatccttttaactttttgcctactttacttctctaaaattgttttaactagacccccctccccgtcctaaaccaagatataaaagttaatcaagcctcttcctccgggccgagagaattttgagcgttagccgtctctcagtcgccggctaataaaggactcttaattcgtctcaaagtgtggcgtttttctaactcgctcgagtacaacaagagcaaaggaaatagaagtgctgaatgaggatgaaaggagtaaatcaataataataaatgatgggtgaaaataaacacaaaagaatgttagaaagcatgaactgatgatgaagcatcttatgaagggatgagtatggccaacccaatcctctaagtctaaggacctctgcctgaaaaaagcagcaaaattaaaggacatccccagatcagcacaacccactactttactggctctcactctatgaaaaatgtgcaactacctagagaaacaggtcacagaaacaatctgtcaggcctctgagcccaagctaagccaccgtaacccctgtgacctgcacgtatacatccagatggcctgaagtaactgaagaatcacaaaagaagtgaaatgtaaatggcctgttcctgccttaactgatgacattccaccacaaaagaagtgaaaatggccggtccctgccttaactgataaccttgtgaaattccttctcctggctcatcctggctcaaaagctcccccactgagcaccttgtgaccccaccccgcccgccagagaacaacccccctttgactgtaactttcctttacctacccaaatcttataaaaacggccccacccctatctccctttgctgactctcttttcggacttagcccgcctgcacccaggtgaaataaacagccttgttgctcacacaaagcctgtttgatggtctcttcacatggacgcaagtgaaacaatcctttgctgatgaattccatttagagaagtatggggtaagtatagtagattgtgaaataaaatgatttttaatgaacattttaattctcagatgaagat

SEQ ID NO: 37286 - DNA, 2300 bp, Homo sapien
cctaggtcataaactgatttaagaaacacattttctttagagttttgactgggttgtggccatctgcaaaaatgaaaacccattgggagaaaatctgcatagttcaacatagaacaatgaaaggaagtgtcagcctgtatcccagccctgaaatggaatgagctctgtttctgcacagaaggcagttgagacaatgtcagttacccattccactcattttggtttattttaaggaaaatgcaatctatgcagtgtttaggaaattatatacacctttgaaattaggatttattgcaatcaggtaacctttaataatgcaaaatgtgtatttaaaaatacatttagtaattaagaatcgtactcgatgcttttagaacagtaaagtgattagtatttcaatatactttcatccagattacattttcttcagaaataacatgttcttttaattttctatttttatgaactttgttaacaatattgaaaagtaaagacaactgttgaaatgtaagccctttttgtctgttaagtaatagtaggagcttttatttactggattatttgaaaataaactttagcaagaatattatagaggtgagtctttatatttgctcagtgaattctctaaattttctatgacgttttataattctcttagatgatttatattttaatttctaataaatttatacttaaattcacaaaaaaatgagactgatcagaaacaacctcattttggaagaagcaggactgcaaaaattaatataactgtctttttttgttgttttcttagaactactcaggaatatattacagacttcacaaagaggaatactactttgcactaagtcatattctaatgactaataagttagaatatgattaatacaagatatatgcaagagttcaggctagagttactcaaagattgatgaagccagatcatggaatgcagtttagcgcagttactaggtgcagtttgacacgttattcacaatttccagtgcctccaaagtcctcagaggatccagtctaaacaagcaaagcttgaggaaagactcttgaaatgttaactaacttgtgtttctcaaaatgtttcatgtaactctttcctatatcagttctcaaacttctctataaaaaacaaattcctgagatcgttgtaccctttgttatagcacttaacaaactttgtaatgaaaaattttgcatttatgttttccctccttgattttaaatatatttcttcaatgtagaaactgttttttcatactaaatactaagtaaagagtaacacaaattttatataaattacacttagatatttatgaaatgaattaaataactttcaaaatttgtataccaaatagagaaacagacatgttaagaatatagtggccgagcgcagtggcgcatggctgtaatcccagcactttgggaggccaaagcaggtggatcacttgaggtcaggcctagttcatgaccagcctggccaacatggtggaactccatctctagtaaaaatacaaaaattagccgggtgtggtggcacgcgcctgtaatcccagctactctggaggctgaggcaggagaatcgcttgaacctgggaggggcaggttgcagtgagccgagatcgtaccactgcactccagcctgggcgacagagcgagactaagtctcaaaaacaacaacaacaacaacaacaaagaatttagtaagtatctgagttttgaatagtcctttcccccaatttactatataaatttaattttcaagcattggaacgtggtctatttctcaattctgtatacatttaattcaaggtgctgtagctgagagtttggagtcttcctttccatgtcagtaggggatgaggaaacacacacacacacacacacaaacacacacacacacacacaaccctgttatcctaaaagcagttttggaggtggctgagaggagagaacttaggaacttagctgaggaaatgatgaaaaggacattgttttgtgtctcaggaaccatgtggaattccaagataagaaaaacagttgctaatttgagtataaaagcaggaaacatgatacacttatttccttttatgcgaacacaagtatatgaggggttgtgtaaaaattatttttctcttgctgtactacaaagagatagaatcaaactgctttttttcgacatactggtttttctttctgtttttcttctctttcttctatttcttgtggatattatggctaataacacaacaagtttagggagtccatggccagaaaacttttggggt

SEQ ID NO: 37287 - DNA, 2300 bp, Homo sapien
ttacaaacatcactttactgagaaggcctaaggcaaaaataaactttgccagaaatgtaggcaaattatggaagaatatgtcaaagtacggaaaagacacatttaaacagtaaattcaagtttgtatctttgtacttatttactaagttttatggtaaccgagaattcaggataaatttgactgcagtactttttcttatgtttattttttctggaagcatccaaaagttaagctggctacaggacctctggtttacaattcatttccttgaaagaaaagaagaaataaacacaattctataaagtctgtgaattaaaactttgaacctgcagatggtgctatgattccattttcaaattgttttgctttctagtttaaattcataagagaaaatgcagttgtttggttgagtttacttttattcagaggtaataaaattgaattatttctttttattttatcttattattattataatagaagcaattgtcttttgtattgggaaaagctactatagttactctttgtaaatgctaagtgcttgcctaggccaaataatgatcagctttacatcttttatgtttaaaatttttcttcttatcattcagcagtcatttgtctgtgaccctcaattaagttgctttgctgtttctgctcttaaataaaattggttcactaagaattgggtgatgaagagctaaggataaaaaaattccatatgagaactgtttcaacctctagtttgtaataatcaggtaaaaaagatttcctggaattaagccacaggaactctggcttaagtcagagctgtcaactgggaaacaaatttccagacattttgaaacttaattcatttaatttttctggtaactggattagaaaatatgattaagcatagcaggatattcttttactggatcagtctgactttgaacgaaggaaatagatactacaatcttaaagtagaagaaagaggactgtaaagccattctgtcttatgaaacttagaaacaaaatgtaaaaataatacacatggcagaaagcctttaaaataaaaggaaaaatggcattttcctctgttgtttaggaaatttttcatgtggctgcatttttaccttaaactctgattgaatgtgtgctagactacctttagttacaaatccacaaatagaagtgaagtatttatcaaagtactatataaatgcttttcaactatttgaagccacctgtcaagtgattgaatcagaaatgttcaaaactggtttgagtatgtgtgtgtgttggggatgagggtagaaaactaattctacattatgcaaagacttataaaagtgatgaggaaaatctttaaaaagaaaagacaattaaattccttgaggtatatagcctgacaacaatttattttttggatcatttgacacagtgtatgtaaaagtgcattgggaattgtgccattttatacaaatatgaaatagcactacttgtactgctttgtacaacagcgtgcatatcttactatcttagagactttctgaaacacttatcttggaattagtttcaacaaagacgaaatgtaataataggaaggtgaaaattatctctagagcttttaaagttaggatagatttcaagaaagattaaatctggaactatatgaatagcataaaaattaaaaatattaagagaattgatactttgtaataaagtataattatacttttataagcgtaatgaacataagtgtttgttgctttatgcatttgtttctacacatgaagtctttattttctgaaggaatcccaatggccctggctataacactacaatcattttcttattttacaattaattaaaggttaaaacatttcacattgagcttgctactttgtttgtttaaagaaaagtaaatttcctcttatcttacattttgaagttgctcactataaacttatataaattaggcataatgacaattaagtaagaacttcaagccctattcatcccatggccgtcatactgtgacgtctttcagagcactttgtgattgctcagtcctaagtataagccctataaaatgatgggctttgaaatgctggtcagggtagagtgagaagcaccagcaggcagtaacagccaacccttagccattgctaagggcagagaactggtggagcctttctcttactcccaggacttcagcacctaagacagctccaaaacaaaccagaacagtcagctccgggggagcacgactgggcgaggtaagtgaaaactttacctttcctcttctttttccctc

SEQ ID NO: 37288 - DNA, 2300 bp, Homo sapien
ccagtttttgcccatttggtatgatattggctatgggatagtcataaatagctcttattattttgagatatgttccatcaatacctaatttattgagagtttttagcatgaagggctgttgaatttagttgaaggccttttctgtatctattgagataatgatgtggtttttgtcattggctctgtttgtgatggattacgcttattcatttgcatgtgttgaaccagccttgcatcccagggatgaagccgacttgatcatggtggataggctttttgaggtgctgctggattcagtttgccagtatcttattgaggatttttgcattgatgttcatcagggatattggcctgaaattctttttgttgtctctctgcctggttttggtaccaggatgatgctggcctcgtaaaatgagttagggagaattccctctttttctattgtttggaatagtttcagaaggaatggtaccagctcttctttgtacctctggtagaatttcagctgtgaatctgtcccttcctggactttttttggttggtaggctatcaattactgcctcaatttcaaaacttgttattggtctattcagggattcgacttcttcttggtttagtcttgggagggagtgtatgtccaggaatttatccatttcttctagattttctagtttatttgtgtagaggtgtttattctctgatggtagtttgcatttctgtgggatcggtggtgatatcccctttatcattttttattgcgtctatttgattcttctcttttcttcattagtctggctagcggtctattttgttgatcttctgaaaacattagctcttggattcactgattttttgaagggtttttcgtgtctctatctccttcagttttgcttagttctttcttgtcttctgctagcttttgaatttgtttgttcttgctcctctagttattttaggtgtgatattaggtatcaattttagatctttctgctttctcctgtgtgcatttagtgctataaatttccctctatacattgctttaaatgtgtccagagaatgataccagagaatctggtatgttgtgtctttgttctcattggtttcaaggagcatttttatttctgcctcaatttcgttattcacccagtagtcattctggagcagatttttcagtttccatgtggttgtgcggttctgagtgagtttcttaatcctgagttctaatttgattgcactgacagcaccttacttgtaacagcaggaaatggagtaaagagccaaacatccatcaactggtgaactggtatatccaacagcatactgccttgtaagaaaagagcattaactactgatgcacacgcacagatgagtgtcaaaatagccttcagtgaaagcaaactgactccatttatagaaaatccttgaaaagtctgcagtgacaaagatcagtgattgcctgggagttgacaggagggaccctctaccttaggtttttgttgagacgaaaggcaaagcccttaaacatctttggggcccaactgatagcatccgaggcccacccttgaatctttggagggcctagtctgaattcagcctcttaggatttccccatattcgtaattgaaactgaaacataactaactttggaattaaggaataaagacatccttgttctgggctcttgttattagcacaaatgtttgactgcagccaagatggcatcttattctatacaatttaaatccttctagctttttgagggggatggggtgctatttaatccatagttcagctggtttagtgatagacaaattagcacatcagtatttatcagtgtcttttatggccttcctgtattgaatcatctcgagatgtttatctcaagacccaaccccacaactactgaattaagctattaagtgggaaaaaccgggatcagggtactgcccaaaaatctcacaagctccccagaaaaaccatcacaaaaatccattcaatgccttcacacaaacgcagtctactgcagcttcctaattcagttgtttccaggattacaatgtttataaaaggtatacattaagcttacaattttattgagcaaaatttatttttatatgtacatacaagagacatattctttgacatataaaaaatacagaaatatttacatgtatacaaaaatattaaaacagatttcagaaataaggaaaacaagcaagtttttacaaaggatactttcttgggaaatacacacaatgaaaaaaagctttagaaaggtgacaacacatttaatagac

SEQ ID NO: 37289 - DNA, 2300 bp, Homo sapien
actgagaagcacgaccattgtacactgaaaataatgctaacctattgtgagaatgaaaggctaacatttacattcttttttttacataaaaaagctattataatttcaatattctatcaacaaataactaccttgccaaaatccttccaacagctaaccactgcaatcagaagaaagtctaaactctgcatggaaaaactacaaggtcccacaggatctggcttctgcctacctctctaacctcatctcctctctctcttgttcactaagtcgtagtcaggcattccctctgcttattattccctctgcttattatgcagccctgcattgccagttcaacgcatctgggttcaaagcctcagaaagcgtcctgaccatccaaaatccttaacctatactaatctgcattctctacccccgattacattctttcatatcctctttcgtgttctgaaattgttcactgtcaacttctttcccattggtctctgtaaactccctaaaggacaggactttgtcttttcaaccctgaatctccaggatctagccccagggccaggttagggtgaggcaaggaagcacaggcctcaggtgcgtttacggggatgaaaaaaatttaagtcatcaagagtgacactattttaacatttttaaaaatgaaaaaggcaaaaaacccatgatgaactaattatcaaaattttaggtaaagacaggatccacccagcacttgtatgattcatcctaatcctggccgcgccccacaactaattatcaaaattttaggtaaagacaggatccacccagcacttgtatgattcatcctaatcctggccgcgccccaccggactcgtcactaacggtactgaaaactgactacagccaagaactcactccgaggctgcagaaaggcaccagagggaaacagcaaaggaggattcgccgttttggagttcacatcccgttgcttcactgggctgtagccataaagctgagttcagggaatgcactgccctacttaagtgcatattcaaattgtgaaaagttaagcatcactaatactccggtacactttcatactgacgtccatgccagccatcactaaaaactcccttggccacgggggtccagcccaagagggcgggcacttctatttattctttttttgggagcaggactactgtctcctacacctggccctttaaggaaaggaacaaaaacccaggggagcgtagctgcacactcagtaaacttaacgttcctataaaccagtagcgtctgaagtgtggttgaaaatacaaataaacgcgcttgcaaggaagaagtgcctcggtcctaccctcggccccgccggaaggccctgggagatgcagccgcaggtctcctgctacagccgctggggaaggccgcacagcctcctcgcccaccccggaggaaaaaatcgcgggggactccagtgcgcaggcgccgacccgccaactccgcagccacagcccgccaaggcgcctgcgcagaggcgtgggtcaaggggagggtcgagttaggagggagagcagagcgcgcgcgtaaatcctagagaggcgggctaagctggactggggggagggtccgtcttccggaaagtctggattcccggacgagccgagttgctgctcaccgaactcccgttcgagagatgatcgaagaaagtcggctaccatttgtacccatcaaagatctccagatggaagccagcgctgaatttgggctgagattaggacttgcaggaggccggtccagaagacggcggaaggaatcttggcgggcgcacgcatgcgtgatagaccctccacacgtgtggccgggccgcggcctccccgtgctcggaggtcccgcccccggccgtagcatctttccggacgtggggagccggtaagctggaagggggctgggcttcgcggctcggccccgcctcggcagcctccaattgggcgcggacgagggcgcccccacccactgccctcctattggtgcgcgcatgcaagcgacgcgtctcattggaccgcgcggatttaggcaccaaattcaaagattttaaaagtaccagctggcgccttttaagagatacaggtctgtgaagcaggcaggttgctcagctgcccccggagcggttcctccacctgaggcagactccacgtcggctggcatgagccggcgcccctgcagctgcgccctacggccaccccgctgctcctgcagcgccagccccagcgcagtgacagccgccgggcgccctcgaccctcggatagtgagtgaggggagc

SEQ ID NO: 37290 - DNA, 2300 bp, Homo sapien
acccagcactttgggaggccgaggtggatggatcagttgagatcaggagttcaagaccagcctggacaaaaaggtgaaaccccgtctctactaaaaatataaaaattagccaggcgtggtggcgcatgcctataatcccagctacttgggaggctgaggcaggagaaccgcttgaaccaggaggcagggactgcagcgggccaagatcgcgccactgcactccagcctgggctacagagcgagactcagtctcaaaaaaatacaaataaaaactaatgtaatgagaaaccttgcctgcttcgaattttgtatttatgccagcatctgaaaatagaagaggtgaatacaattatctctaaggtcaaactgtgaagtaatgtgaaatgtactaaaaccaaccaggactccagcagatagtgttataggctagcatagcataagaggaaaggacatggactttttgaatcctgcagacgggcactcgaatctccgcttactagctgtgtggttttggtagccacagtgagaattaactcacactgagaagcacgaccattgtacactgaaaataatgctaacctattgtgagaatgaaaggctaacatttacattcttttttttacataaaaaagctattataatttcaatattctatcaacaaataactaccttgccaaaatccttccaacagctaaccactgcaatcagaagaaagtctaaactctgcatggaaaaactacaaggtcccacaggatctggcttctgcctacctctctaacctcatctcctctctctcttgttcactaagtcgtagtcaggcattccctctgcttattattccctctgcttattatgcagccctgcattgccagttcaacgcatctgggttcaaagcctcagaaagcgtcctgaccatccaaaatccttaacctatactaatctgcattctctacccccgattacattctttcatatcctctttcgtgttctgaaattgttcactgtcaacttctttcccattggtctctgtaaactccctaaaggacaggactttgtcttttcaaccctgaatctccaggatctagccccagggccaggttagggtgaggcaaggaagcacaggcctcaggtgcgtttacggggatgaaaaaaatttaagtcatcaagagtgacactattttaacatttttaaaaatgaaaaaggcaaaaaacccatgatgaactaattatcaaaattttaggtaaagacaggatccacccagcacttgtatgattcatcctaatcctggccgcgccccacaactaattatcaaaattttaggtaaagacaggatccacccagcacttgtatgattcatcctaatcctggccgcgccccaccggactcgtcactaacggtactgaaaactgactacagccaagaactcactccgaggctgcagaaaggcaccagagggaaacagcaaaggaggattcgccgttttggagttcacatcccgttgcttcactgggctgtagccataaagctgagttcagggaatgcactgccctacttaagtgcatattcaaattgtgaaaagttaagcatcactaatactccggtacactttcatactgacgtccatgccagccatcactaaaaactcccttggccacgggggtccagcccaagagggcgggcacttctatttattctttttttgggagcaggactactgtctcctacacctggccctttaaggaaaggaacaaaaacccaggggagcgtagctgcacactcagtaaacttaacgttcctataaaccagtagcgtctgaagtgtggttgaaaatacaaataaacgcgcttgcaaggaagaagtgcctcggtcctaccctcggccccgccggaaggccctgggagatgcagccgcaggtctcctgctacagccgctggggaaggccgcacagcctcctcgcccaccccggaggaaaaaatcgcgggggactccagtgcgcaggcgccgacccgccaactccgcagccacagcccgccaaggcgcctgcgcagaggcgtgggtcaaggggagggtcgagttaggagggagagcagagcgcgcgcgtaaatcctagagaggcgggctaagctggactggggggagggtccgtcttccggaaagtctggattcccggacgagccgagttgctgctcaccgaactcccgttcgagagatgatcgaagaaagtcggctaccatttgtacccatcaaagatctccagatggaagccagcgctgaatttgggctgagattaggacttgca

SEQ ID NO: 37291 - DNA, 2300 bp, Homo sapien
gcaatgccagaataacggtgggtattcacaaattgaatagataatccagattatgtttcctccaatttaagtttttctgggtttttttttcccccttcctagaatcaattttatcattttacctatgtacaataatatacttctggaaaatgctagaattttcaccatgtaacagaatttgagcatgacagtaatgtaaaaatattcagaagtctcgaactataggtttgagttttcaaagtaaatcaaaatacagctgttttcattttactagattgtggaaacctatggatgttattgtaaaatgcatatgcattacactgactttcttaaaatgttttgaattaataaagaattcaacaatgtatccttagaaagttactgtttcctcattggtatataacactataggaataaaaggtacacttctatgtgttacttaaattgcttatgcacttgggggaaaataaaattctggctagattctttacattgttctataaggttttaattattaaaatgtttcaccttttataaataataaaatatattgttgaaatgacttatgttctgagaactcaactgagagatataccatgttgagttcaagtgattctcaccatttccatggttaagataaattcaaagttaagttcagacttgggaaacaattgttctaatagagataaaaacatcctgatcagtcctgttctatcctcagatcaggattaaaataaaatgggtttcaacagcagaacgattgtataaagttgtgtagcttgaatacacaaagtgaaaagaactgagataattaggtggagcctttaagtagcaaaaaactatttttgcttcctgatgtttgaagagtcatttcattcttccactcactctgcatttgttatcgtgctaagagatgaaaagagagaggcaatgcaaacgttattttctaagaatgtttatacttaacagtttcgattagatgacctaaggatattttaaccttgataagggttcccattttttaccattttattttttatgaataaattagaagtttcgtacttctaatatatcacctctctcaacagtgaaataccacttagtagacgctgcccaaaccagttaggtagtggcagttctcagattgagcgtttagcccttgcattcccaggactgtcttggttgtgtttattccctcatatttatttctccgttgagctgtgaacaggtcttttgaaaagtgcaaagcattgtgccaataaatgtcggtattgctggcacctatccgctaccagttctttggaaagggatgagggttggactcctggaggcagatatctgaaggctttgttgggctgtaggttgctgtaacacggaatcactccacctctttaaaaagctgacgataagtgggactaagtgaaaatgaatgggcaggtgaataataaagtcctttgaaagcaagtaaatgacgcggcagatgaagggcacgcacgtctattgtgcaaattcattcagtggttatctcataatacacttatcaagtccttattaccacgaacctcacccaccgtggacaagagaaacataagcaggaaaaaaggaggaggaataaacacacgcctgtccataataaaactcgctcttgaagactcagcggcagccctgcaccggagactgacgacttgcgcggctgtgacctccgccctgcagcggaccctcgactgccctgcactgcggctctggaggccccgactcagtgcatgggaaagaaatcctcactatcagaaaacagaggggcaatctgctgctctccctttccggccaaacacgtcacccatcaaccggatacctaccaagaggctttcagaggaggcgcccaaggtctcccaggcccgcccctccccaatcacgctccgctcagccccctcaacttttggcctccgggaagttcgcagcgttctcacgcttggcaggaagttcccgccaaggcttccggaaaatcctttaaaaagcaacgcttgcgctgggcggggcttggtgcgctctcacccttatctccaaattctgggtgttgtcgcgagggctgctgtgtccggaacttccggttccggtcagggtccgcgatctcggactaaggatgcggtcccgggttctgtggggcgctgcccggtggctctggccccgccgggccgttggcccagcccgccggcccctgagctccggtagcccgccgctggaggagctgttcacccggggcgggcccttgcggaccttcctcgagcgccaggcggggtctg

SEQ ID NO: 37292 - DNA, 2300 bp, Homo sapien
gagagatgacaatagcttggactaaggttatggcagtagagagggagcaaagtagataccttggaaatatattttggaggtgaagaaaacatgactaattaattgagtgcggggatgaaagaaagcaacaaaacgaggatgacttctaaatttttggaatgaacaacagagtagaacaatttgaggaggaacaggtttggagggggtggatatccggagttccgcttctgagatgcctgttaaccatgataataatagtatctaccttgtagggttgttgtgaacaacgaatacgaaatatgaggagaatttagatctgtacctagcatgtagtaattgttcaataaataccagctacgacaattattcctcaagtggagatgtaaaggtagtgaaggacataagagttctgtgtgaggccaggacaggactgaagacataaatctgaaagttatataggattcaacgctgctcaaatcatttttggtgaagaacttttatctttatccaccgcgaatcaatactgcagtggactagccgtgtttgtctctccaaaattcgtatgttcgcattctaaccctcaagatgatgatataaagaggtggaacccttggaaggtggttaggtcatgagggtggagccctcatgaatgggactagtgtccttataaaagagaccccagagagctcccttgctcacttccaccacgtgaagacacagcaaggagtcagcagttcatgagctcggaattgggccctcaccaaataaggtatctgcctacatcttgatcttggacttcccagtctccagaactgtaagaaatcagtttctgttgtttataagccatccagtctatggtattttgttatagcagcctggaagacaaagacaaatacttctgtgaaatccaacaaaaatgaagacactttgaagagcactagtactcaaagccatgggaggccctggaggaggccctgagacatatttaacccaagtacccgtgagtctatgaggatggaggcacaggagagttcagtaggctgaaataacacaacgcttgcttacatgaacacacaaggaaggggaactcacacagatttacaagtaatctgttttaattaggtgtaagaaaaaaaagcccattcactcctgcaggaactccctcctcttcccacagatgtggtatctgaagagcaagacactgcttctccacttcctccgcacaaacactttagtctaatcattggagatgcaatctagcgctcgggttgcattaagtatcccaagctccttccctaccaagctgggctccacttgggcacagaacgattatcagacctggtaactaccaagctgtcccctaaggatgctctaggccccaagcatcagcacctccgttaataattctccactcttgccttgtcatcggcttttctcactcaaaactctgctccagcgagtggtccgggcgcctgaggcagctggcatgggctaggccagagagcacctgcactgattcttaggagaaaaggtcctctttctgggcgaggaagtcaataaagtaaaggacgcttcataaagtccttcgggaagcaaaacttgcttaacttcacacttccttgaacccccacgcagggaatgcttcctccgggacccggagcaggcaggctgctgtgcctggcaggccggctcctgggtgcaaggctcccgcgcagcccaggacagcagcgcgcgggctacgggcgagtggagttgcaggggcccgggcggagagccgctgtcacccagggaagctctcgggactccgggcctcccgcgaagctccggacgggcgtcaccgaagccgagagtcccggccgagcccctccgcacggtgggcgccgcgcccaggcgagcgcgcgaggtcgggcggggccgggggccgcccggggagggggcggggccgggactctcgcggccgcgcgcaggggctgggaagctgcccctccggccgcgccgggcgaggggctgcgccggcccgcgaggcgcatgcgcgctgccgagcggctctcgctccctccccgcccaccgctccctcctccccctccccctcctctgcatcctcgccgctctccctctctcctcgcccgctgggtgctgaagttgggcggatggcagcaaaccggctccgctagaggaccgagccgcccagccccgctcccccggacccatcggcgcgctgcccacacctccaggcgaccgggtaagacgctgcctccaaaacaagcggtgctaagtaaatgacatcaaaatgtctgctt

SEQ ID NO: 37293 - DNA, 2300 bp, Homo sapien
tccatctttttaaactccagctcctatcacagcacctggtccaaagcagatctttagtatttgtggaactggcttggattgtgtttaggaaattttgtcattggtaaacctaaggagagtcaagagaacaacgtgaccaaaaaataaaactaaaaaaaaaaaaaagggactttcattgtactggtagaaagacaaagtttataatctggcttagtttctttttttgttgttgtttgttttttggtcagggcaaatttaggtcattatttttaacactggaactgtagtttcagagcagatagacaaactataatgagaatagatgaacagcaaggccactgaaaggactcagaactacatcttataagaaacaactgaatgatgctaatgtttaacttgcaaaagagaaaactcagttgatttcaaatatatgaaatatagtggtaaggagttatcacttattaagcaattactattgcaatgtatactcatttaatcctgctaacagacatatgaggtgaatattattagcctaccctcgccttttttaagtaatgagaagactgtcatcctgtagggtaaagtaacatgtccaaactcatacagctacaaagttacaaagctgatttataaaatgattgactccaaggtcaggaattattatactgtgtcttgtcttccacatgaactaagcacaaaggaactgaatgcaggcagacagatttcagctcaatataagagaattgttacattagttcatggaagaatatgttttaaggtatttttgttagtctctaggaaatctctgtaacattttattgtgtaaattatatgctttaatgtaagaggataaaaataatagtgaacattggcaaaatagcctatgattaatagagtttacctatgagttatctgtttctaagataaatgccaaaaaataatattggaattaaatgttcctttcaagatcttccctccctgctccctgaaattgcagtgaatttttcaagaccaactgaggacatgtattttcaatgtttatggttaaaagatatgtacatgcacagatatatacatgtacagaaatgagaattacttcagaattggtgttaactttagaaaaaaaaagaccaagaacttactcttggtatttacaaatttatttctaaaatagaagcactcatggacttagaagtaaggtataaaattcaaaaacgtatccatgtttctcaaggatcttgttgtaggccactctaattccatatattatgtggcttttcctagaatttttacactagaaaacagactgaatgcaaattttgttttgttttaacaaccttcttctcagaagcatatgtctatcgaggaagtcttcagataaaaaagataaacaattccaaacaggtctatgagatttaagatgtgaaagatcaacattatctttagttgactttactggatgccacaaccttctgatttctgtaaccacttcttatgcctcctacccactgaaacaaaatcagaggcaaacagagcttcaccctagaaattggggaaaatgaggaacaggttttctgcacaaaagtttatttgtttctcatttctttttcagaaaataaaggatcgctgttgttcccaacaggtttgtagggaagaaaattggagaaacattattaccttttcttagatgttggcaacggaggcaacaaggactgcaaaagaaaattgtgtgtcccccattcctaaataatcaaaattggcagtagggatggaagagcattggggttttagggctgttagggtttcatcaagccaatgtattccctgccagattttaaggagaaaaaggcgctggaaaattgagtgatgttagccccctttcttatttttcactgctaccaaagactaactctatctctctccccaacccttctctccatctccctcctttagatgtgtttgcacagaagagtgcccagtgaagagacctactccttggatcgctttgcgcaaaatccaccccttttccctcctccctcccttccagcctccgaatcccgcatggcccacgctcccctcctgcagcggtgcggggcaggtgatgagcctctgtgaactactaaggtgggagggggctatacgcagaggagaatgtcagatgctcagctcggtcccctccgcctgacgctcctctctgtctcagccaggactggtttctgtaagaaacagcaggagctgtggcagcggcgaaaggaagcggctgaggcgcttggaacccgaaaagtctcggtgctcctggc

SEQ ID NO: 37294 - DNA, 2300 bp, Homo sapien
ggtttctccctgttggtcaggctggtcttgaacttctgacctcaggtgatccacctgccttggcctcctgaagtgctgggaggcatgaaccaccgctcccggcattgaatttgttatatattttctattcaaaaataacaggtacaacaagaccatggcaggttgagggttgcgtaaggattcctaattatctgacagttatacaggtgggaaggtgcaatatttatggcttagtgcaagtgtagtatgctgaattgttcatggcttgttcattgcccatgggagactggaagacatcaaaagcatagacgaattgataaacgtgtagcacggattttccctgtctcaaaataggtacagaaataagcaagatcctcccaataagtagaaaattatatagttaggagtatatgtcatagacacactttgtgtcccagcttttaaaaatttgtgtttcaagatatgttcctaagtaaacccttgagaaggaactacagtggtctgcagtgataagccaagtttgagtttctgtctcgttctatttttgttattgatgtttaattggaattcattgccagtaaaatggtaaataggacattttcaatttttaccttacataaaattcttcaaggaattaaaatttgttctagtttaaaaatacctgttaaattctagccagattttttttactgattgacataaaaatattcctggattaaatggatgatcttttcgtacattttttctaaaataaactgacattattaagacattattaagagtaacacctaataactttaatagccaagttactaaatccagtgataaaggatttgatggttgctaaaaatttcaaatgcaggattacagaagatgtgtttgttcatatatttggaatacctaatttagctgccctcatgaaccaactgagtaatgggccacctcacatcttaccttacaaaagataccttgagtatggaaagtattgtgaaaccagaggccttaggtttcgatggcacaaacttatgctctttctggaaatgtgcagactgatggtagaatcatgacctaatttcataacaaactctgggggaaggtgaatgggtggggggctaatctctttggtcaacatttgctttctatttgaattttaggtggttaaataaacttggatcggctgtaatccatcaggaatccactacaaaggatgaaggtatgttctattttaaatttctgaaaatttagcaagaatattagaacaggttgaaacagggtgaaaaaacaatgtcaagttctatgtatagtctgatcctgaggaaacatgctttggcatttaagatgatctgaaaatatgtggagacagacatattcacacagactcaccaacatggaatagagcttcccatgctggctatgaatgcttttcacacttcacccacactccggcagctgtgggcttcatgacatctcaaacagtcaccgatgcaaatgtttaattgctccacttgtggaattcttactgatagacatgatctcgtcatgatctggtcagttaactttcatcccactatttcctccctgatattttaatatttccaccaggtgtgtactgaggctaattaccctaagattgtaccaggaacctgaaggtcatactgggacacaggccatatttttagctcagtcggtagctttcagggttcaaaagctacaggagtctaattcttaatgatgtgattacaccttagtgttgagaagagggaggatttagctgccagggccactgaactcatagtctttctgaaatgcccagaccacaaaaggccttggaaattggaagcagggagttatatcttctgataacaaaatcataaaatcttagagttagttagaaatggaaaagtggcaacttgatttgaaacagtaaaggggtaccgtgcaataccatgaaatcggtggtgtcctagccatcttcttggtcctcttttccataaaataagtacccattgtctatttatagattgtgagttagtacaaaactacacacaaaacttctccttgtcctggtatgtaaggccttctatgacatggcctccaccaccttctagcttcgttttctgccatatcttgtaggggtctccacatacttggcccagcctgctccctcagccagagactccccttcacaagttgtgcaccactgatagtttagtgatcctgccagtttcaattcattaggattcctacaatcaaaattaatcaccactgattttgtgttctcttggtattatgactcacac

SEQ ID NO: 37295 - DNA, 2300 bp, Homo sapien
gacttaataaaaattatggcggagtttcattggtgagaattgcactttttgttagcagtggcaacaaatcggttgtctgtagcaaccgattcttgcctcctcagaggaaagaatttggctgaggggcataagggagagtgagagtgagagactgaggcaagttttagaacaggagtgaaagtttattaaaaagtttcagagcagtaatgaaaggatgtaaacttggaagagggccaagggagcagcttgagaaaaccaagtgccctatcagacctttgactgggggtcttctgcactgtcatggttctggggtttgtgtctctcctcccttgattttttccttggggtgggctgtcctcacccacagtggcctttcagcacttgggaggggctgcatgcatatgtgtttagtagagctgtatgaatgctcatttgaggatttttgttgagtcgagtgttcctcaaggaaggtcatataccagcttaaactctgccattttgcctcttagtgcacatgcttgagcctactctccaatgcctgggatcttattgggaagctgctgatcaccagcttcgggtgttttctatctattgggatactgcctttccttggtactgactgcaacaaattattatattattatttcttccatttattgaagtcataaaactgctctttttttaagtttctttcttttcttccttcccctttctttcttttcctttctttctttcgttctctttctttctctctctctctttctttttctctctctttctttctttctttctttctttctttctttctttcctttctttctttctctttccttccccttcctcccttcctcccttcttcttcttcttttcttttctttctttctttctctctcaaattctcaattatttatttatttttagagtctcactctatcgccccagctggagtgcagcagtgtgaccctcagcttactgcagcctccacttcccgggttcaaggaattctcctgcttcagtctcctgagtagctgggacttcaggcacatgccaccatacctggttaatttttgtatttttagtagagacggggttttgccacgttggccagcctggtctcaaactcctgatctcaagtgatccacccgcctcggcctcctgaattattattttagagagactaacaactgcctgactatcacttgacagttgtctgacatccctggggtaggaaggagccctctcctgccctgctcatgtctgcctagctacctcctccaacatttttaaatatggaaggaaagaattcctttgttaaggttttgcctttgacagtaggctgtagaaaatgctgtgtcaaccactaagccagactattttgcctcttgaaagattggaagtaaggtgtcctgataaattcaagacagaatcagaacttaggaaggcccagttccacagctgaacatacttgtgaggggtgctgtaagagaaaatgcttggattggttttaaatttgcatataagacaacttccttaggcagagcattagttgaaagagaggctggccagacgtggaggtcatggctgtaatcccagcactttgggaggtgaggcgggtggatcgcttgagcccaggacttagaccagcctgggcaacatagtaagaccttatctctaccgatcataaaaaaaattagctggatgtctgtgttctcagctactcgggggaccgaggtgggagaattgcttgagtccaggaggttgaggctatatagtgagctatgattgtgccactgcactccaccctgggtgacagagagagatcctgtcttaaaaaaaaaaaaaaaaaaaaaaaaaaagaggctataattgtagaagtcccgttgctcctgctggtattctgttaaaaggaaagttgtttcccaccccattttctttcaggggagtgtactgaattggatctcttttgtcctatatgtgttgtttttttaaattggattttgcatttgttgttgttggtcattgctgtgctctatccgagaagattatccttataaggaagtaatctggtgggtaatagtgaatttcagttgttctaagcccacatgtagtcttctcactttcttcttgccatgagactgagagagtgctccttgggacggaggtaggttgtgctgtattttctcagatggcagcttcaggttagctacaaactagtaagaagtttggacagcacggaggccagagtggggctgggaagtactttggagtttgctgaagaaaaacaaagattcaaaacaaag

SEQ ID NO: 37296 - DNA, 2300 bp, Homo sapien
tgatctgccagcctggggctcccaaagtgttgggattacaggtgtgagccaccgtgcccggccctataaactttttatacttttctcattttaacggagtctttggggagggagggagcaaatctgtggtcagcccgtcatcttgaactgacagtccggccgttttgaggattattctaattctacaaatcatctttgctcaaagaatttaagtggctctattctggccccataaaggtaaataacatgtcttttgaggatatctttgatgatggcatctaaatgtctggtgagaagccaggccatgctgttgataccactaaattcctttaatatcacctagtaccatttttttttctacgtaaagcagggaactagaagacaactcaatatagggagaagatgaggcagcacttccagaaatagaagtgtacacaaacaagaagccgctgagagaaccttcattttgttcctgctcaaaatgtacagcatcttctttcattttttcactcctccacagatttagtttacattttatctttgtcttagtcattcaggctgttatatcaaaacaccgtagcctgggtggcttacaaacaaaagacatttatttctcacagttctggaggctggacatccaagatcaaggcgccagcagattcattgtctggtgaggacctgcttcctcgttcctaggtgactgtcttctggccatgtcctcatatggtggaggggtgggcagatctccaggttctctttaataagaaaattaataccattcatgagggcactgtcctcatgacctaatcactccccaaaggtccacctctaaatacaatcacattggggattaggtttctatatattctatatattctatatatatatatatatatatatatatatattttatatatatattatatatatatattttatatatatattatatatatatattttatatatatattatatatatatattttatatatatatatattttatatatatattttatatatatattatatatattatatatattttatatatatattatatatattatatatattttatatatataatatatatattttatatattatatatatataatatatataatatatatattatatatataatatatatataatatatatattatatataatatatatataatatatatataatatatatattatatatatatattatatatatatatacacatacatatttatttatttatttattttgagttggagtcttgctctgtctcctagtctggagttcagtggtgcgatctcggctcactgcaacctctgcctcccaggttcaagcaattctcctgcctcagcctcctgagtggttgggattacaggcatctgccaccacgcccagctgtattcatttccctagaaggtatagagaaacaagaagctggtgttgaaagggagattgggagggcaggaatttgtaatgagatggaatatctctgactttcagcctgccattttccttttccaatgtgggaaagaaaagttttgtggttagagactcttctatgtctactgcaaaagatggcaggctaagacttatttttatcctaaaatacgttttacaaatgtgtctgtaccctctctttattagagcattatgaacgattaggaaaggaggaaagagggaaatctgaaagaagattgaacctaaagaggttgaagtggcatttcacccaaaaatgctgagaatgactctgcagatcatctcaccctccatgcctgtaaatgaacatccttgcctccaaaacaggaaagcagaaccatgaactgttccaccaatgtgctcggcaaatgaatacactgggcagtgcttagtgatcaatgaactcaggcagatggggtgtgcttgccttacatgtactgtgtcctggatatgggcatcaaggaagggtttcataacaatgagaaggaagaacgttaggattgaggaagtggagatgatacttcctcttctttcgaaagagctttactctctgatcagctttgaatgttagttctgggttgactgagtttccagagctgaggctgctttaagtagaatcctcaagcttggcctcagagtactatgaggcttctgaatccaggaataagactgctcttggatttactctctttgtattgcatgtaagtaacgtcacttcttggctgatgtatgagaggtaactgcttgacagatcaagatggcaaagcaatggataccctagcactctccttagagtagtgaggtag

SEQ ID NO: 37297 - DNA, 2300 bp, Homo sapien
agcaagccatggaagcagaagaggaaaagactgctgctgagtgctgactgtgtctcaggtgtctatccacacttgacacatgccatcacaccgaattctcagcaggtgtgcatccacgcttgacacatgccattgtgcatccacgcttgacgcgtgccatcacaccaaattctcaggtgtgcatccacgcttgacgcgtgccatcacaccgaattctcagcaggtgtgcattcacacttgacgcgtgccatcacaccgaattctcagcaaatctcagaggtaggctttgttatcaccccattttagaaagaaggaaactaaggctcagagaagttaaacctactgcacaagactgctcagttcctgagaaggcagaataggaggagaggcaggggggtgctgagtgccacccaggctgggcctctgctgccaggtgacccagggctgtgagaagctcagctcactgtccagcctgggagggtcggtgacttggttttgcactcatttttccattccattgccttcatgccaaaaaacaatgtgaagtcatgcctgcagctgcttcctctcggcaggaatgggtgtgggaaccacgttcacagtggcgggaggtgagagggagtcctttcacacgccaactggaacaatttgggaggcgggaagctccttgtgttgctgtctccatcaccaccgcagtcaccactgcagggaaccgatattcttggtggcctcttggatccctcaaggaatcaagttgtaggaaccttgcagtcacaagtctaccttgttcttgggctctggtgtattgagagttggtctctgcctctaggtgatggtctccctgaagtgacagtgcttgtattaatttagagatttgtgggccgggtgtggtgaccaatgcctgtaaccctagcattttgggaggctgaggcaggtggatggcttgagtctagaattcaagttcagcctgggcaacatggtgaaaccccgtctctacaaagaatacaaaaattagccaggtgtggtggtgtgcacctgtggtcccagttgcttgggaggctgaggcgggaggatcacttgagcccaggaggtcaaggctgccggtgagctgagattgcaccattgcattcctacttgggcgagagagtgagaccttgtctaaaaaaaaaaaaaaaaaggaatttgtagtgaaagattatagacacaaagataaagtattagttttatttctagcacacgatcacatatgtatactgtgtttctaaggttgaaatgtgtttaacaagtctgccagacagtattaataggggatgagccataatggtagttgacagtttagttttatctacaagatagaattggaaaagcacatttggagctataattattcctgtttacagaagccgctcctgtagtttaagataatatcaaattcacacatgtaaaaatacatttctaaatttattttttttaagtcttttctctctaggctgctcttttcctgagagtcagtataaattttaggagcagtcattattattgtttcctacatttttatttagtagaaaaaattttaaacaaatgtaagaagacaataaaagtctgattattaaatcatatagagtagaaactgacaggcatcttcctccttcagaagtagtaaaaaatgacctaaaaatgactttttgattgacgtgaaaaatcttcacctgacaattccaacacagttgattaacattttgtcatgtacataaaagaaattagcattatctttaagattgtcctaacttgggattatagttaatagggctgaataaactctatagaatctagttgtatcgattttttttttctgcatgcattctgcagtataggttgaaatcctttgctacagatgagttctagaaggttaactgtgaaagtttcacattggcaatttcactttggcagcttttagacaagacaatggtgattcctataatcagctaacccagttcatacagtgttccaagccttttgttcttaagctgaataaataatgctttgcattccagccctttatttcatgtcatcaatagcatacctcaagaccacttttttgtcagtgtgttaatgaatgttttgttgaacccttttcatctatcaaggactgaaatatctgatttaatctcagtggtgcttaaaataaacttttgtggctgagtttactcaagcccttatttgaaagctattcttataggcaggcccagagctaaagactgccagcttgttggcccactgctgtctgttcctgggggcac

SEQ ID NO: 37298 - DNA, 2300 bp, Homo sapien
gcagaattttagtgttttagctcttctggtaaagactactgccaatgaatctgaagacgtgaaaacatcaagtaaaattccacggcaaaatcattaatatttgacctttcttttataattgtggggaccgtatggcccagtttattcatgttattccaatgtaattcttgatagttgcttctttcatgctcaagaatattttgatttggaggtaagttatgtggtcaccctaatcataatcagaaatcacacaacaggcagtgattgctgaaacaaaaggtgtgcatcaggttggttaccctttccagtgaaccagtgtcaaggtccttctctctgctgactgctgtaaagatggttaatgctggatgtcattaagtttaaaggtctttttttttttttaaggacaactactatatcaggaattttgtcattgcctttgccaacttgtgtggtctgccagtcactttcgctagatgaagaaaaagaatcactatatttgatagttgtgtgtctctgtgttgcccagtcctctaggggagttgaatgggaggtgggtctgatgttttgctttttaaaaatgtttcttttgcttggatgctccagctcatcagatgctaggctggctgctagctatttttccacatgtgcgtccaaacagacctgtgtaagtagcacatatcacacgaattcaacaaatactgaatgaatacagtggctggcacataggaagcattcccggatatttactgaatgaataaataccaaccttgcctttggtcccgtgctgggtgctacaagttaggtggtaggaagaaagggaggagagaaaactctatatgagatcaagtaggttctgccctcaaggggttaatagtctccaagaggaagatgtaaataaataaccgtaattgaaagtaagaatcattcagtgccaaaaagagtgggaggaagaggttgctgggcggggcggggcgggggtggggggttggggggggtgttggggggtgaggggaggggtggtggcgagggtggcaggggttgggggggcggttaggatgcagggagaacttgaaggagaggcaggcattcaaattagattttcccccagtttagcattaactctggccccagttgcagtccatgaatgtggaagggccctcccctgccaggcgctgaaattgtgcacgagctattttttttttcttggctaacagctttcctctcacggttaatgactaatcccaaggagcattagctcactctgtaaatatgaaattataatatagcaaaatataacgctaaaagccatcaatctaattttagtcgcaaagttgaaatttcatagcaatagcattaaaagagttacattgttacgatttcagtcaacatataaatgaaataaaattgttctggcctggcgcggtggctcaggcctgtaatcctagcacttcgggaggccgaggctggcggatcacctgagttcaggatttcgagaccagtctggccaacatggtgaaaccctgtctctactaaaaatacaaaaattagccgggcgtagtggcagacgcctgtaatcccagctactccggaggctgaggcgggagaatcgctggaacctgggaggcagaggctgcagtgagctgagatcgcgccactgcactccagcctgggcgacagagcgaggctccatctaaaaaaaaaaattgttctactttaagaaacctaaaatgacggcttaatggcagagtagtattacgatataaagcatttaaaatgaacagaacatgcagatcttacttttttttttcttttcttttttttttagtgtattgttgctcacagcgagacagagtgttctgctacccacagggccagggcctcacacaaaccagcgggctctccagggtgcgcgcgcgatctacaacccgccccttgaaaaggaaagcggggcccgggacgctgcgggtgtgagccggaccggcttagagagggaaagtaacccgagtccgccgcttcgggcggacccgccccctcccacgagtttccctagaccctcggccccgccctctcttttattcggtttgcagcaaccggagctgaaactttgcaacccgagcgcgcacgctctgcgctcggccctgccagggcggcacgggagggcggcgcaggaggtgggacctgcgccgggaaggctccgggacgccagcgcacgcggagcggggaccccggagagccagcaggcgagaagaccggccgagggagagccgatcgcgcctcgagagatccgaggaagtggtcgc

SEQ ID NO: 37299 - DNA, 2300 bp, Homo sapien
tgcattttaatttctcaggcctaagtaattccatcaacactcatttcatgtatgacctaataaataatccctcacaggccaaagcagcgccttttttttccgttcttttcttttttgtttctctttttgagacagagcttcactcttgttgccccggctggagtgcagtcacgcgatctcggcacgctgcaacctccgcctcccgggttcaagcgaatctcctgcctcggcctcccgagtagctgggactacaagggcgtgccaccacgcctggctactttttttgtatttttagtacagacgggatttcaccatgttggccaggctggtctcgaactcctaacctcaggtgatccacccgcctcggtctcccaaagtgctcggattacaggcgagagccaccacacccggcctcaaagcagtgacttctgattgtgagaacctggcatgcacagaactgagtgcagtactttctcaagccacagtaaatgctcctttagatggagtgattaggggacctctttcaggaagattgaaggaggaggagtcagctatggaaaggacaagagcaacagcaccctgtgtgaagagacacaattgtcctacctatgaaaacactgcttcttgtcaagtaacagaaaggccagtgtggcaggaggagagtcagggagcaagggaaggtggtgtgagctgcggcaggctgggctgggccttcaggccatggtgagaagttatgatggtatcaaatgggcaatgagaaagtatttaagggatttaagtaagggagtgacctgatctgatttatctaagaaaaacatccctcggctactgtctggaaatgaactgtaggaagacaagcaagggaccagttaggaggctactgcaagtgtcagtaaaagatcatggctaggcctgaagatgggagacggtggagaaatctgtgacagaatttgagattttgaaagtaaatataaaagcacttggtgagttatccctgttaccttctcagtagccaggccctatactaaagctgccaatgaagtagaatgaaggctctgaaacctcaagaagggccttactttcccagtttcacggggctctgcgcacagctcttaggaactaccttgattccaaaactctccaaaagtacgatcctgcccttatgttcctctctccctttgagtgaatttgggaatgattgttgaaaaatgactttcaacaagaggacagcagtgttcggggttccacgatacatccctatcttttaacatcgataagtatttttaaattggtaccttattttgcgctgcacgagagagaaggctttttactagcagcatctcctaatccatctaagaaatactgtatttacctttactccaagtatcctagggcaaaattcctttagaacaattcatcttccgaaacagacgggttcccttttcacctattcaagtgttgtgcattctagggtccccttcccgccttgcagacaaatgcgctcattgtgccactccagtccctggatcctatgcagcgggcatttcctgcaaggagctgctgcatgcctgtttccctcgccgcctgccccaacccgaatccaaggctttggtttctaatgttccctccctgtgcagttaaaacaattgagttcagttactaaatagatgaccaggaactttttcttggcgaaggctgcggatgtttagggcactgtccagtaaagttgtgaaaagcaactaaaccctgccgcttgtgcaaaaggaccaatccaccgggaaacaagggaaacgcgcacatttcctcaacttgccgcttcttgggcacgtttaggctcttattagagccgcgctttggagttgcctcctcctgctgtacaaacccgccgcggcgttcccccggatgccgcagcgctcactcccgcgtccgcggggcgcggggagggggcgaggcgcgggcggccccggagccaaggcgagggcagcggagcccagccgggcctacgggcggcgacgctctggccccagcgcgctcgatggtttccgcgcggccgccggggctcgcacggtccagtcgccagggggcgcgctagccggcgccgcggatccccgaactgcgcggcccgactcgagtccgccatattggatgccgcagccgctgctgccagcgcttcctcctctgtcttcgccgagcggggctggttcctgcggcccgagcggcggggaggtgaaacaggagcccgtcggaggaaggggcagaagggagtggagagtgtaggggaaggggctagagggaggggg

SEQ ID NO: 37300 - DNA, 2300 bp, Homo sapien
tttatcccaaaggtgtataatcataactaggggtacatgtgcaggtatctataaatatttgtttgttacatgagtaacctatataacaaacacaagtttacctatatgacaaacctgcacatgtacccctgaacataaaagtttaataaataatgtataatcaaattattgtgtatcagggttacctgaaataaatcttttctttgtagatgtggtgccagtttcataagtgattttttttttttttttacatttttatgggatatgcactctagcttacttggttttgatatctgtattttctttactagaatagacatttcaaaagtaatgtaatgcaacagtaaatatagacatttattcatttccttttttctatcattggacgttacagaaatgctaaatatacccttttaataattttttcattctagtgtactctttatgtacagtaattctccaagcttctgaaaaaacctttagtaattcaggcaagcctacctcaaaaattagacctgaagagtgtatgtgatatataaaggttttaacttttgattatctaattcattttccttgtattcttaaactttttctccctttcagtgtttacatagctttaaaatttggccgggcatggtggctgatgcctgtaatctcagtactttgggaggctgaggtgggtggatcactcgaggtcaggagtttcagaccagcctggccaacatggtgaaaccccgtctccactaaaaatacagaaattagccaggtgtggtggcgcacgcctgtaatcccagctactcaggaggctgaggcaggagaatcacttgaacccaggaggtggaggttgcagtgagccgagatcacgctactgcactctagcctggcaaccgagcgagagactgtctcaaaaaaaagataggtttaaaagtctttctttttgttattgttggttcattaggaagaattgtttattctttctgaaaattagacaaagtgttcagaagtcatttctgaattcactattcacagaggcttaccctagggccaacctcccaattttttcctagtccactaattttggaaaatctgcagttaattaatggaaaaagagaaatagttgtgtgccagatgctatccaaattgcctttgctgtctcatttaattctcttaattcttgtgcatgaccacaggtgtttttatttttgtagctctgttgtatgctaacagtttgttcaggtaatctagagttacatatgaagataaaacatttcctaagttctccaagtatgattttacggcattctaagtgacatattgggctaaaaattttaattgtgtaattattttgtattcctctggttgtgttttttaatatgtgtgacaaatgcacttagggatatttatacccattctttaagatggaaagtttatagcttcatatttgtagtccaccttatgtattctcaactgatgagtttctaacttcatctgacaaaaggtaatgttaaatgaatgttaggaccctagtacattgtaattgcagggggattgggcagattttcatactcatacatttcagtctgcactagtcatttctgtatgtttagacattcactttatctggcattcctagaaaattattaatttttttgttactagaatttactttttttgagtgctggtcctaacatctttggtgaaatatttctgaaaattgttagttttccctatttttggataaagctttctaaatgtaatttagcctattcatgatgactccttttgtcatttgagcattggttattatataatgtgcttagtaatacagagatgccattaaattaaatactcagactgccagaaaacttagcacatgaattgactcattaaatctgaaatatatttttctcctctttaaacagctttagtgcagccgtcattatccatgacaccggaaactgtgaaagatgttggatttggtagccttgttataccaggcggttctgttgccagcaatcttgctacttccgctctgccagctggaaatgtttttaatgctccaactaaacaggcagagcctgaagaaaaagtacctcatcttatagaccaccagatttcttctggtgaaaacaccagatcaggtaaataataataataaaatttaaaaaaagaggttgcctctctgtatttggtgtttaattctggggtggcatgcgtttgtaaccacttcaatctacagatgctgaaatgtcgcactttttttttaaaagagatcactatgtcctaaaatttctatttga

SEQ ID NO: 37301 - DNA, 2300 bp, Homo sapien
agtcagttatcacagcttaaatttaagcgttaatctaaagatgagttataggaagaaagggatggcaggaagcatatgagatggttttgtagggaagtattttttttttttatgcaagtgaaacttgttcatggattattacctcaaggaaaatttacttgatacatgtaattaagtgttttgattatagaaagaatctctttggaccaatattgtaggtgttcagggtctagaagcaatgttattagtaagactccttagatgtgcatgtcaaaactaatgcaaatcagtgaattatttgtgcatgagctttgcttaggcatttttcatcccctccacttaagttcctcctttttcatcaggctcttttgctcccatatgtatacttagaatgactcgggcttcttgttctaaagtttattcaagatacagaacaaatattctaagtaatttgtaaaatatatattgtatatcaagggatagaattgtgctaatgggctaatttcatattgtatgggagacattagatgcctcagttaattgagggtgtttttgcgtggagctcaatagatagttcaagtatattgtatttgaatcgcaatggtggaaatatagcacctggttgtcctgtgttctttgttccctaccctctcccccgacttccatccccacccctgtgggcagctatcattgttttgttttatttttctgcctttctcagaattagcctccaaatccttctcatagagcactccaggctcctttttgaccccatcattccaggcagggaccatcaattggatttgttgtttgcattgaaagtcatttgctgccccttcactaagtgattatttctgacatcacttctagcatttaattacctcaagtctatgaaataagctttcttttctgtaaatgaccagttgaggaagaaaactaagaggaatggaaagacttaacattattggaacacttttaaaaatagcacaaattttattgcccttgggtttttaaaactgcctttaacaatagctagatgtgtggctttggacaagttactgagcctctaaacatcgtttgttattagctaatctgaaggggtaaattttcattattaaagataatattagctaatactaaatggacacatgctctgtgacaggaactggaataattgtattacctgcacaatataatccttacgacagtcctataaggtacttattacttcactatttttctgaagagaaacccaagacacagatttaagttactttgcagactcactgtagtgaagatttaaacactgtgtaccagattcaaaaattagtgtgtaccatcagataaagtgcctgacatgatagaggctcaccagatattaggcaatgtatatgcagaaaaacataacccaaccagccatatgtttatagccacagttaaccactaaattgtttccattgttacaaacatatatcgggctatctccttttcctatggctaaataattaagtttgattttcttagatctccctttcttctttttctttttcttttttgttttctttcttgagatgggatctcgctctgtcatccaggctggagtgcagtggtgcgatcatagctcactgcagccttgaactcttcctgggctcaagtgatcccttctgcctctgcctccgcctccacctcccaacatgctgggattataggtgtgagcccctataggcacctggcccgtatttgcatgattggttttttttttccttaaggttataccatggcataatatttttaaatttcttaataactggctattttggaggcagacatttatgttaagatttctttttgaatacgctttttcctgcaaattaaataaaatttaaaattccttatatcttttaaaatgctttgtaaagcagagccagtgattgcttacaaatttatattttaggatttggttttggcagcttctttccaaaatttaacatttatacactgcatgtataactaaaacttagtaccattttcttgtgcataaaactcctattttaggaatattccatggcttgaattaaacaatgtgtaaagttatttttacacgtagtaagcatttagtgctagtgtttactcaccacttccattcatatgaagagtttagaaactaatctttgtccttagcggcagtggataatttacagtacttttaccttattagaatatataacctgattttgttgtttttttttttaagtcttctattcaagtcactaaactttatattcatataaggtttaatc

SEQ ID NO: 37302 - DNA, 2300 bp, Homo sapien
attcaggctgagcccttcccaagacctaatagagctaaaagctttgggagtaggtggaggaaacctgcatctttacccagcaatccaggtaatttatatgcatactacattttgagacccactgatgaaagaattctaattttctatagagttactctagcaaggaaccttctcatttcttatgtattaggttatttctatatggaacatttcccagtagaccatattatttatggtatcttattaggtggaagccaaaagaacgttaaataatctgctggtgtttttgggttagttttgcactatttctcacagtgcaagcaattcttgttacctagtaaaacggttccccctttgaagggttgaatattgttcacatagcaccccagcctgtggtgtatatgtttaatctgtcaaatctcattaaatttttcttctataagaatgctaatgataccaatttctagaattgaatgatttctactctgcctgttggactgcaaatttgaaatcccctataataattagacccctccttagagtatattataatgaccatcgaacctgtatctaaaaattctagtaacttaaccatccagtcttaaaaaaaaaaaattaaaacaggaattccaaaacaatttcagaagttagaataggtgaagttagcctattttagatgtgtgcagggatggcagtgggggggaaagatggattactaagtatcatttatttcttgctgggtaaaaattcaaacacaagaccttatagctgcctttttattacacttggcttccttttagctttattgggctttggttggtacatatgtgaataaacttagactattattgtatttgactgacaaacacttaaaaatgagtttgttcatattcattttaggtggagttagaaatggaacctaaattgtaaaatataatacagcatgctgcttttcgttctggttttatggtaacattgaaactaaaatgtttctttctaatgtgtccatcctgactgccatccttaaactagagcctcttgtctgctatctgaaaagagcaacagcaggaaggaagcaattgatttatacacatttgaattagtctgtaaagcccaaggcctgtgtttgttcaagaagagacagaggcagcagtaatgctctgtgcatcaggtggattagttggaaatgtgcaagctatcatctttctaagaaaagcattttaacaaggcaaatttgtgcctagctcttttttttctgtatatctgttgtgttgatttttaatttggattgttttccactggctttaaaaatgcaagtctttttcaaagaaaggagaaagcattttgtagctagtagtatttcaagattccgtcataatgtacattgattatacatcaaactatatatagtgtagttagctggatgtagactgtgtagctttgtagtttgcaacttagttgtatatttaaatgagaaacaagtgactaactggatcccatcaaggtgggtgttaagtacagcctcagccataaaagacttaatcagaccgggtgcagtggctcatgcctataatcccagcactttgggaggccgaggcaggtggatcacctgaggtcaggagttcgagaccagcctgaccaacatggagaaaccccgtctctactaaaaatacaaaattaggcgggcatgatggtgcatgcctgtaatcccatctgaggcaggagaatcacttgaaccaggaggcgaggttgcggtgatccgaaatcacgccattgcactccagcctgggcaacaagagcgaaactccctcttaaaaaaaaaagacctaatcaatacgtttccaaggagaaagcgggattttgaaattcctactagctgccaaaagacaaaatgttcctgacacagctttactaccaagtgaaaaaattaaaaaattcattagctatagcaaaaatcagttttcagtttttccggttaccggttttctggaaatcatttgattttcaaatctgctgttagattgcattgtgcttttattgaaatagagcatctggagactctgctatagatgctctgcttcagaaatgaagatgtctccattaaatttggtcatagtagcatgaaatcttttagctgaatataaaacattttgacacctttaaaggataaacgctcataccttcaggactgtcaattcattttattagttatgtggtattagatgcatctcccttggtgcatactcttaattgttaatttaaagttccttgtagttttaattttaaaggacttatttgga

SEQ ID NO: 37303 - DNA, 2300 bp, Homo sapien
ctgggcaatggagtgagaacctgtctcaaaaaaaagaaaagaaaagaaagatattttcactggatataatatgctaggataaaagttttctccttcaatactttaaatgtgtcatgccactctctcctggctcgtaaggtttccaccaagaaaactgctgccagacatgttagagctcccttagagttcttttttgttttgtttttttgtttgtttttgctgtttttaggaactttgttttatctttgacctttaggagtttgattattaagtgtcttgaggtcatcttttttgggttaaatcttcttggtgttctgtaatctggtacttgaatattgatatttttctccatgtttggaaagttctctgttattatctctttgaataaactttctttctttctttttttttttttttttgagacagagttttgctcttgttgccgaggctggagtgcaatggtgcaatctcggctcactgtgacctctgccttctgggttcaagtgattctcctgcctcagcctcccgagtagctgagattacaggcatgagccaccacgcctggctaattttgtgtttttagtagagacggggtttctccatgttggtcaggctggctccaacttctgacctcaggcgatcctcccgcctcagcctcccaaagtgctgggattacaggcgtgagccaccgcacctagccccactttctttttttttcttttttttttttttttttttttttttttgagactgagtctcactctgtcacccaggctggagtgcaatggcgccatcttggctcactgcaacctccacctcccgggttcaagtcattctcccacctcagcctcctgagtatctgggattacaggcacacgccatcttgcctggctaatttttgtatttttgtagagatgaggtttcaccatgttgatcagactggtcttgaactcctaacctcaggtgatctacccacctcgtcctctcaaagtgctgggattacaggcatgagccaccacaccctgctaagtaaactttccaccccagtctctctatctcttctacctcctctttaaggccaataagtctttgatttgcccatttgaggctattttctagatcctgtagatgtgctccattattttttattcttttttcttttgactcctctgtgtattttcaaatagtccgttttcaagctcactaattctttcttctgcttgatcagttctgctgttgagagcctgatgcattcttcagtttgtccattgaatttttattttagctccagaattcctgcttgattctttgtaattatttcaatctctttgttaaattcatctgataggattctgaattccttctctgtgttatcttggattttgctgtttcctcaaaacagctattttgaatcctctgtctgaaaggccatagatctctatcattctggaattggtcactggtgtcttatttagttatttggtgaggtcatgtttttctggatggtcctgatacttgtggatgtttgttgatgtctagatattaaagatttaggtatttattctaatcttcacaatttggacttccttgtacccgtgcttcttgagaaaactttccaaatattcaaagggaattgagtgttgtgatctaagtctttggtcattgcagtcatatgtgcattacaaggcaacccaagcccagtaacggtgtaacttttgcagacccgtagaggtactgccttggtgatcttggataagatccaagagaattccctggattaccaggcagagtctctcgtacccttctcttactttccaccaaacaaatggaatcactttctccatgctgagctgtctagatttgggggatgggtggcacaagcacttacatcgccatcactgctgagagtgtgttgggtcacacctgaagccagcacaatactgggtctcacccaaggcctgtggtgacctgatatttattcaatgcccaagagctttttagttggctggtggtgaattcttctgggactgtcttttgcttcagggcagtgggttcccttctggcccagggtgggtctagaaatgtcacccaggagctatggcctcgaatgggggcttcaggactttagtgctttattttactgtggctaagctggtgttcaagttgcaagataaagtcctctttaagtcctctttactctttcctctcctcttggaattgcgagctgtgctgcctggggttgggggacaggccttggccatgtcagctagtgtttcactgggttgcatgcacaccaagcc

SEQ ID NO: 37304 - DNA, 2300 bp, Homo sapien
tattcttgtaaatgcagagaggcgttggcagtcttttgatacttttggaggggttttggtgggtgccagatggtgcgtagctactgtatgcttggaaaatgttaacgagaggctcagcttttctgagtgtgtgttttggctttttgagatagcttccatgtaggaagaaacttcttttaagaccaaatgtagactctggatttcctccaagagaagtattgtaaatatatcaaagctgatgctgtactgaatttctttatagaaagaaaaaaaggagtagttaataaataacatacagtgtttgaatagagcctacaatttcaaagagttcatctttccttatggccagtttattacaaacagtttatgttcaaaccttgtttttctccaccccttgcgttgtcatatttcattttgtactgtacggcccacatttcttatcctgttctttactatgagagttcactgagcaaaagtaagtccacagagcaggaagggaatgataatccttaacagtattttgatttttctcacttttgagcttttgactcaatgtagtcttacagaaagcacatttgctacttttgtgttgggtggagtgaggtttaaaaacaaaaatcaaccaaccaacttaccaaaccccattaattcctaattctgtaagatatagggtatcttacagaattaatcacagggcaatttctgatgctattttattttttaaaatttattttattttatttttttgagacggagtctcactctgtagcccaggctggagtgcagtggcgtgatcttggctcactgcaccctctaccttccgggttcaagcgattctcctgcatcagcctcccgagtagctgggactacaggctcccgccaccatgcctggctaatctttgtagttttagtagagatgggatttcaccatattggccaggctggtctcgaactcctgacctcaagtgatccgccctactcgggctcccaaagtgctgggattacaggcgtgagccactatgccccatcctctgatgctattttagaaatactaaaaacagacatcttaaaatcttacaatgtagcattagaatcatattgaaatcataaaatactgggagagaccttagagtgagttcagactcacttcagaagatggaggtgagagagtttaagtaacctgcccagtttctcccatctcgtaagtctggccattatgctcgggcttctgagcgtcctctcacttcttctcctgctcctcacctgtcccctacctgtggcacattgttgctcctcctaactggggctggaggacccaggctttctctgcacatagatgcttaccagtccccatggctcctgtagtacagctgaggtttggggtctacagctggcttagtctgtgctcctgcaggtgtgtgtgccatagacgatccagaaagcaggtcagaaaatctctgtctgcttatttctgtgtttgataatctgtaagttctctgtattccgagtttgatgtggagttttgtctcttttgctttggagaactcgaaatttgggagacggcttgctgggagaggtgaggaactcaagggaagagaagaaaggcatggttaccaacatttactacataccttttctgcatctggcgctgtgctaggtacttccaagtgcttgctcccctctgctacacaaaagggatattggaaagccatattgtacacgaggatattgaagcatagagctgggattgaatcccagtttgtctgacttcatatccttcctcccaactctttctagggagggggaagggcacagagcccatgtgcgttttatgagccatatggaagtctgaagagctgctcagctctgacagctgtttaaattatctgtgacactgcatcccaccattagcagggatgatggattgttgacagtctccatcagaaaaggctggagtcccagtccgtggaggagcacttacagggtctttcctaagtgctgagtaagtataattgaaacttggattctaattattattgctgggttagaaagcattgaagatactgttaggcagatatatgtctatgtatctgtctacacacacacacacacacacacacacacacacacacctgagatggggtagatcattgtatttttgtgtctaccagcaagaaaaggaaggaaaaactaaggtgatgtgtatttttagtagagatcttccataatttaaagtcattttgttattttctttgctttcacacaaaaaatatgtggaccttttctgtgtaccttactcc

SEQ ID NO: 37305 - DNA, 2300 bp, Homo sapien
cctttttcttttgagatagggtctcagtctgtcacccaggctggagtgcagtggtgcagtcatggctcactgcagccttgacctccccaggctcaatagatcctcccacctcagctcccaagtaactgggactactggcatgcactaccacacctggctaattttttgtatttttagtagagatggggtttcaccgtgttagccaggatggtctcaatctcctgtcttgctctgtctcccaggctgtagtgcagtggcacagtcttggctcactgcagcctctgcctcccgagttctcccacttcagcctcatgagtaggtgagactataggtgcatgccaccacgcccagctaatttttgtatttttagtagagacgaggtttcactgtgttggccaggctgatctcaaactcctggcttcaagtgatctgcccgcattggcctcccagaggctggaattatggcatgagccatcgcccctggccctggctaatttttttatttttactttttgtagagatagggtctccctatgttgtccagggtggtcttgaactcctgggctcaagtgatctgcccacatcagcctcccttgtagcttggaccacaggtgtgcactcccaggcttggctaatttttttttttttctgttagctaattgtttaatttttttctggtagagacagtctccctatgttgcccaggctggtctcctaggctcaagtgatcctcccacctcagcctcccaaagtgttggaatcacaggcatgagccaccgtgcccagcctttgttatttttaaaatgatgaaggtattaccttaaaaatctcttgccacatgtttgtccgggataatttgtgtattcacatacttagaatatgtacattttgaaaacctttgattaagtggttttcttctataaaatatgaaggtttgtgatcctgttctcctattcatcatcccgcctccacaataacataaaagatctgaaaatgctgctttatcttttgggtatttttatttattttattttattttattttattttattttatttttttgagagagagtctctatgtatcccaggctggagtgcagtggcgtgatctcggctcactgcaacctctgccccctgggttcaggcaattctcctgtctcagcctcctgagtagctgggattacaggcgtgtatcaccacacctggctaatttttgtagttttagtagagacagggtttcaccatattggtcaggctggttccgaactcctgacctcaggtgatctaccctcctcggcctcccaacgtgctgggattataggcgtaagtcaccatgcccagcctttttggggtatttttaaaatgtaaggtctttcatcaaaggatatagcaagaccccaaaacactctgaacctctgctgtatataacttttatttaagataatttaatggttcatttttaataaaaaagcaccacgttggggtaacaaggacttccaatgtacaagactgtagttcagccaacttaaaaatgaaagaactctagcaaggaacacaagtaagtttatacccgatattttgcaaatcatgatattatttttaagggcctctcttgaggcagggtttttatgatcataacattccagctgtggttttggaggcagaatgtttactactgctctaaatgcaaggatggtaggtgtgtattcttactgctaaagggcttaaaaaagaagctgaggctcccttcaagtgagtaaacctttattcggctgacttgggagccgtgttcctatggaacttcggtggtaattatggaatgcaggcccaacaacagcccagtcatgggcgagcctggcctctccgaggcatgatggcaggctgtcccggctaatggcttcaggcagcccatggaaaaccactttctggttaagtctgcatcatactgttccaccaatggaaaaaattgaacatgatgagggtgtgtagctagcagacaaaaatatatccagcattgcacaggatctgtttttagctctcaacggctgagcatttgaagtgttagacactgtttcctggcttaccatgagcagaaggaagagtgagtttgtggatgtgtatatagactctagctttgtgaaacttttcttattaacgaacagaccccgagaaatactggctacatccaaagttctggcaaaggtaaggttataaatgtttacttcccctcttctggagttgagacgtaattttacatgtgagataaaaatgtttctcaaaatgctcccaccggcaatatat

SEQ ID NO: 37306 - DNA, 2300 bp, Homo sapien
agatactgcttatgtccattaggataactgctgtcgaaaaacagaaaataacaagcatgggtgaggatgtggaggaattggaactctgctgcactgttggtgagcatgtaaaatggtgcagctgttgcggaaaacagtatggcggttctgtaaagaattaaaaatagggctgggcgcggtggctcacgcctgttatcccagcactttgggaggctgaggtgggtggatcacttaaggccggaagttcgagaccagcctggccaacacggtgaagccctgtctctactaaaatcagaaaaattatctggtgcaatggtgcgcgcctataatcacagctacttgagaggctgaggcaggggagtcacttggacctgggaggcggaggttgcagtgagccgagattgtgccactgcactccagcctggacgacagagcaagactctgtctccaaaaaaagagagaaaaaaaaaagaattacaaatagaataacctaagtggtgtgcttatgacaataaatagtttattttctaaaaataaaataaaaatagaataacctaatgctattgcatttccacttctgggtatatatcataaagaattgaaagcagggtctggaagagctagttaaacacccatggtcatagcagcattattcataatagccaagaggtggaagcaacccaagtgtctctccatgggatgaatgaataaacaaaatgtggcatgcacatgtaatagaatgctattcagccttaacaaggaaggaaattctgacatctgctaccacgtggatgaaacttgagggcattatactaagtgaaataagccagttgcaaaaagacaaatgctttcacttatatgcggtatctagagtcctcaaattcatagaggcagaaagtagaatgacagttgccaggggctgtgggaccggggaattgctgtttaatgggtgcagagtttctgttctgcaagatggaaagagttctgaagatggatgtcggtgacggttgtacaacagtgtacttactgctgccctgtacatttaaaaatgggtaagatgggccaggcgcggtggctcacgcctgtaatccccgcgctttgggaggctgaggtgagcagatcacctgaggtcgggagtttgagaacagtctgaccaacatggagaaaccctgtctctactaaaaatacaaaattagctgggcgtggtggtgcgtgcctgtaatcccagttactcaggaggctgaggtaggagaatcgcttgaacccaggaggcggaggttgcagtgagccgagattgtgccactgcactcccgcctgggcaagaagaacaaaactctgtctcaaataaataaataaataaataaatggtaagatggaaaatgttatgttatccatgtttgaccacaattacaaataaacttttttttttttttttaaaggaacaaaaagtcactattaaggcctcacccctctgcttcccgtgtctgtggcttcgtgtccagcagtgagcacggccagaggggagcctccccatctcagccagtcctcctccctttcagaagccctgccttatccctcagagggggacctcttgcccctgctaacatgtgcttgagaaagcttttaatctcatttatgaggtcaacctctacaagctaaattattttaaccaaggactattcactgtgatgttatattttgggctttgtttttgctgcttggtcaaatagagaacaagggccacctctcgtcacacagcctgacgctcctgcagccctgtgagactgagagttgttttcctggtcatggtgacagatgagccacgcatgactcactggagcggtctcccctgaaacaaaggcatgcatttgactgcagactgggtgttgagttggtggcctttgcaagactgggtgggcagttctggcttcaaatgaccctgatgaatcacacggttcacagacgtttcatttattaccttgacagtgaccctggacaccagttgtttcttcatataatttgcgttaaggcttccttttgactttgtgggagcttggagtaaaacgcttcacagagttttcttgcgtttctgtttttcaggctcacttcatggactcactttgcgtgcttgttaaatgtgctgtgttgctcccaagaccatgtaaagcctactgaccactaacctccctcacagcagaaactagacgtcaggtaaacccaacccttgtgcctgggggtcacgtcaagttgcatgactgtgattaaggtaataagtaaaggtttaattatttgggctagcg

SEQ ID NO: 37307 - DNA, 2300 bp, Homo sapien
ctcctgggtatttggaagtactctccagttgtgtgattattctcttacaaaacagcaagtaattgcaacttgatttttggatgaaatttctgaaaaggaaacctctctatacaatgtaatattcaaaataaggcctttagtcaatggtccttgacccagttttccatcatttttattttaatgcataagaaaatataatcaaaagcccactagcagctgagtagtcttgagtgtgcttggcgtctctgcagagttatcttcatttaagccataaatgttgaatgtcagtgccttttgagtcagaagttaagctcactttatgctgaaaattttaattactgccatttaccagtgaaaagcctgtatgcaaattatttttcttcagtgactagacttctaatccagatattagagaaatgtctttatgttttcagctctgtgcatggccagcttgatgttcaatgcacctggtcctcacagggagcaacattattatataagtatgcattgtatttagagctacctgtgtttgatttttgtgttggagtaaatactgcagttaagaatcatgtctttgatatctccagtacctagaataaaataggtactcaaatgaaaggatgtgaatgaataaatgggtatatttttttcatgaaagtaattctctaagtaagaaatattaattatgaaaaaaactggccgggcgcggtggctcatgcctgtaatcccagcgctttgggaggctgaggtgggcggatcacctgaggttgggagtttgagaccagcctgaccaacatgaagaaaccgtgtctctactaaaaatacaaaattagccaggtgtggtggcgcatgcctgtaatcccagatacttgggaggccgaggcaggagagtcacttgaacccaggaggcagaggttgcagtgagccaagattgcgccattgcactccagcctgggcaatgagagcgaaactccatctcaaaaaaaaaaaaaaagaaaaacaaaaaagctatagttactagccagtacccttcatagataaggaatcctaagtgtattattattgttattatttttgagatggagtttcgctcttgttgcccaggctagagtgcaatggcctgatcttggttcacagcaacctctgccttccaggttcaggtgattctcctgcctcagccccctgagtagctgggattacaggtgctcaccgccaggcctggctaatttttgtatttttagtagagacgggtttcaccatgttggccaggctggttttgaactcctggcctcaggtgatccacctgcctcggcctcccaaagtgctagaattacaagcatgagccacctcgccatctattatttttactatatgaactgggaaaataagatactagagatctcaaagtctagaagtctagacctgggcacttggccagaagctggggactatagggagaggaagagaagtttttgggttttgcataacaatactgagtccctgtcttccccaccctaccctggtatagtaattttctaatttacctttcaaatgatccagggaaaaaataaattgcaagaatatgaattctttcctggaagatactgattcatggttagcaatgaagaaagaaatatcattctagtaatcttcactagtgtgttgtaaacatactagttaatttctcgatgctaagcataggttagatttaggagagccatttgtattttatttacctctttaagtgctaattctactggatataaattgacttgggcaacactatttttaaaattctttctggtatgaagacttgatggttaaagatgtatttttgttacaagaatcttgctttgcattacattatcagcagccactggtattacacttatgctgtgtgcaagaagggatgctttggatagccgtaagctctgatgggtgatcatgtgtgtttctcacaggagccgaggtccaaggagggcagtgactactttgacagtcgctctgatggactgaatacagatgtgcagggatcctcccaggcatctgcttttctgtggtcagggggctctactcagatcctgtctcagagaagtgaatccacacatgcgattggcagcgatcccctccggcagaacatttatgagaatttcatgcgagagttggaaatgagcaggaccaacactgagaacatagaaacatctacagaaaccgccgagtccagcagcgagtcactcagctctctggaacagctggatctgctctttgagaaggaacagggggtggtccggaaggccggg

SEQ ID NO: 37308 - DNA, 2300 bp, Homo sapien
cctgggctcaagagatcctactgccccggcctcctgaagtactggaattacaggtgtgagtcactgtgcctggcctgacttaaaattttttagaaaatcaaatcctcctgaaacactgatagagcaaggccatgtatttaaaagttaagtgtgcctgtgggggccctggcacaggatggtagcttgggggactctcacttaacaccgtgagggataacgacttctcgtctcttatgatctgcttgagttacacatcagagctcttaagaaggaaattgaattttttcccaaagtttatcttaagattcagcaaaatagatatgcaaaaagttagcacgttaaggccattgccaactctgttatttaacaatgcctatggtaactaagcaaaacatttacaaagtgaacattggagcatcagaaatttagaagaggagagaaagctgcaatcaggttgaaattggggccgtctgagcttcaattttcattgttaaaagtggagaaaggagaaagcaaataataacatcaacgaacacagaagaaaaaattttattgaaagaatatgagcatgttaagcatttgctgtaaaatccctctcaagtctaacgtagttatcaccttacctttttaagatatgaagatttccatgtataatgatagatttcagtgcattttttaaaatctttggtaaatacctagcagttactcagtttccctgttctttgtttcttgggaaagaagaatcagtggccaccaaaagtaaaaactgtggtggacattagtgaaaagaaaaagaaaatttcaaatttaaggatcacatttttttttctgttccgtggtttttttaaaaaaaaattttaaattttttttttttttttggaaacatcgtgttatatctaaagcaatcctcttctggattttttttttattgttttaaattttgttttattttatttttttgagacaagttctcaccctgttgtgcagcctggagtgcagtggtgtgatctcgactcactgctgccttgacctcctgggctcaaatgatcctcccacctcagcctcctaagtagctgggaccacaggtgcctgccaccatgcccggataattttgtttattttttgtagagactaggtctcactgtgttgcccagtctggtctcaaactcctgggctggagcaatactcccgcctcagcctcccaatgtgctgggattacaggtgtgagtcaccgtacccagtcctcttctatttttgaagtggtgatgtgggaggtgtctggtgaatgcctagtgtgtgctgggagtggattttttgggactccccccgccccaccccctgtgccatgtcctcagaaggtggtctcttctcagggagaagatctgcctctgttttctgggcttcctgccctagcccaactggtcttctcaggggtcattaacttcttttcagattagaccctggttgaacctgggctgttggggatattttactaacaactattctagacattagaataaagaataatttcccttgaaaatcaaatgaagcctggtttgatgaagcacagctgtacccagggcttttgacagccccgcaatttctgcaaatggttcctaattgattggcttcttctctgtaagggtgcctattactgtcatagctctttgtgtgaccctgtcagcctctcctgtagggggggatttttttccccagtattgttagcaattagcatgtgctattgtaatagtttggagtttgaaagaaatatacaatgtccctttgggtgaggaggttgaaagagtttttggtttgttctgggaacttaaggtatattaagcagtccccacagacatgctgcctgcactccacctgctgagctggctctgaggctcaggagacgtggccctctgtggtcccattgtctccacgtctgtggtaacccggtgcctttctagagcaggcaggctcccggcatgggtggaaacagagcagggggccagcttcccccaatcaccggtgctgctgtggaggaagagcttggtggcgctaggacgtccttgtgaatgtgacttggaagagcagtttgggatttttttcattgcctggggatgagagggagagacaacgtgtgtcttacacatctcccaacagccgacttagatgtgatccgttctcccagagggagcaggtttctttgaacttttcctttttatgtacagcatgtaagtaaacaagggctttgattttcatgggtaaagattttgatccaaatgtaggcatgcttgcacggtttcctt

SEQ ID NO: 37309 - DNA, 2300 bp, Homo sapien
ttgaaaggaccatcagcctataagcaacatgctatctatctcccctggccatgacaccttccaagccccttgggatgagctctgtaagagccctgagacttgaagaaaaatgcaatccaggcctaactccgcagcatttcaagcagttctgctattcattttaaaacaatggttcaatttggatagatgaaatttaaaatatatcctctacttcaaatcagttttaaagatgcttgaaaaataacaagaggaataattatattttcctatcagctattttcaaacttttagcaaaaaaaagtaactcttttagcgtgaagagttctaaaggctgatacattcaaattctagagaatcaaaactgatgatttgtcacacaagaaataatacaactttcacattgaaacatgaggcacatcaagcttatgtttctacaagaatgcagctgagcagatgttactttaaacttacttacttacctttaaaaagtacatgtactgatttagctttggagaatgctttcccattgtgtgcttgcctcgcgcctcaggttagagctgcctcagtggcgggccgtgcctcttatctggtgctatataatccaagaggctcctgccactctctccagctgtcagtagccagcaactgtgttgtgttgttttcaaatgagggttaaaaagtgtcatgatttgcagaatttaagtaaaattcttatttttctgtctgtctgtcttcccctcagaatgttattccctgaagcgcagcgcttggaaagcacgggcaggctgttagagttggcagacatagaccctactcttcggccccgccagctctccatctcacactttaagagcctctgtgatgtatacagaaaaatgtgtgatgaagacccacaactctttgcatataatttcagagaagaactcaagcgaagaaaaagcaaaaatgaagaaaaagaagaggatgacgcagagaattacagactctagctgctgcctgggggcgagcagcctaccagatgtcgatttgcactacgtggagcttcttatataggtactcttttgtctttacagaatgacgatacaaatgccaatgaccagatgtgacttattttccttttactatacagcttggcagagaaaataaatatcatcaaataagatacagtacaagctttcttttaatatatactgtatagatagttatgacatgtttagtataaacagcatctattacaatctatcttacaaaaatgaagtatctgcacattttgcccctaaaccacattaaaataacttaaatatgctttaaataaagcaaaaactaacaaacagctgaaagaaaatgcccagaggattttaaaaaatggccctttgaaaactattaatcacgacttccccagccttactttttccacataacttaattattagaatgtaattttaaggatcctaaatcatttgatacctgctcaaagtggatataaactaagtaatttacagattctgaccagtttcatctaggtttctgatccacaataaattaaaataacttaaatctttacaaccattttgtgggaaaatgtatactgcacaaaacccaggaatgaacagtttttttttttttttttttttgcaatttccactttaccaccagtttaaaagtaaaatgaggaatttaacccatatctggattgaatcatactatgattttccgtggctctctgtttcataaaaacactcctcactgacaacagatgttaaactctggacactgaattctcgctctagaacagaatttaggtcgatggtggcattttcagactgactgtcaagggactggtgacggatctgcgccttgagcaaagttcctctgtccctcttggtgctgttggcttttcgtttaatggggcagaagtgcccccggaccagtttgggctgctctcctcctttctgaccctcacccgactccgggccaggctgctgctcagcctcggggtgaacgtctgggtcctcggaaatcctcagtctctggaactgaatttcgatgtctttagtagggctgccctgcttcacagtctgacggtggtcatcatcttcatcgctcaggatgtcactctctttgatgagattgtcggcaaaatctgccaagccggggtgtgggtatttcccgggagaagtgctcttggagtcctgcctgccctcagccgtggggcagccgctgctctgggtgccgctgctcaagctgccctcgtcagagtccagcaaggttcccttgccagtctcaccggtccactcgtt

SEQ ID NO: 37310 - DNA, 2300 bp, Homo sapien
ttatgaacagtgacttaactaagatgtcaaatgctcttaataaattttagtaagttttttgaattgtgtgctatatgttgtttcatgtttcctcaagtttagtaacaactacctcttcctacaggacttcccttagactttaacaaaacgcaccatagaacagtgcccagcttggagaggtctgtggtcatcagggaaagagggactgaagaagacaaggggctgtggagtggatgcagggtgtaggtggggtagatgtactgctatagggagagaagaaaggtggtttcagctcagggcagttctggggaaggaaaaagaagacctgatctatgaatggcagagtgcaggcagcagcccaagacacactccactgacttcagatgtcaggttccttcccacaaactctgaactatcctgcctacctcgcctcctcctgatttgtatagagaagtggtcccaactgtcaggcatgtgtctggccactctctacacctcgccagccttctctcactggactctccatttccctttcatcccctgagcttcctggcacccttgtccctgcctcccgttctccaggactcatctcctgtaacccttcaactccagttctcccagtgacaaagagccaattctatcaattcttactagcagcctgctagtctccagaagaaatactcttagcaaaatctgagataaaatctaatccctgcctaggcctaaaaccatgaaatattatcaaaactctacataaggcttacaaactattaagaccaaaagcacaaatacagagatagatgcactctcttccagtacagaaactgccactttcagcttccttagattttaaattttggcctcatctttatttgcctgatttcattcctttgagatatagttggtatttgcaaatacaggaagtgtctaacttttgcttgatttaaataaagttttaaaaccctgaacaaatatagtagtaccccatgtaaactatagcgtcgacttctaaagtttgaatacaattccaatactctgttaagttggcttatattatgtcacggctaaaagagaattcccctcacaaatgcagttactatttagtgggagattctgtaaaactcagcgtcaacaaagctcttccagttatgtctcctgcttctgggacggccaggacctctcctgtaccaccccttcctctccctttcccccaaaggcacctttcagaattactctgaatgatggagcccatttttttctagaactataggaaagctgcttggtaactatggtaacgaatacaaaaatgttttttacttataattgaatgcttatttaaaattacaagtattattttttcttccttgagttttaagtctattaatgggtttgattacaaaaaagaaatcagtacaaaggcatcagaagtacttaaaatattctagtttaatgccgccagccttttccaaactcagtccatcagtataccaaaatgacctactaaaatttcaaatgaaaggatttaaaatgaatttaaatatttgcctttctaaccctatacgtcaacgctgtaacaagctaagactgtttctcagtgttagcagccttggccataacaggcccgaggcagatgtcctagtttccaggccagggtgtctaggacgtgactggttatcagctcagagcagcacttggaactcacaagggacccgggctaaggagatattaaatcttaaatcttagatattagatattacaactgagaactgtaatcaacatgatatacagaggacactgaagagacgtacaactcagttcctgatgattatcatatgcccaaaagctaagtcacgaccacatgcacagacacagaaacaatgctggccactgtctacaaaagggtcttcattcaacactctcacggtgttcaagaccattagaggacaagatagtggagatgaaaaaatgatgaggaagttactatgtaaatagccaagacacagccataacttaagacaacagaagggctagtgaaaaaaaaaaaaaagaccacagggaataatcagtaagactttaaagaacaacatataagaaggattcaaagttcgaagtgggatgatcacgggcagacctgggtggttgggaacaggaagcatatggcatcttgcaggctataggcaccacaaaatggaacgcaggaggacaggggcttgggagagccacttcactgtcgggtaaaacaacggagcaagatgagtgcctccggatgcttggtttccccaccctccagtgtctgcttg

SEQ ID NO: 37311 - DNA, 2300 bp, Homo sapien
cagaattgaaatgagaattaagtaacaaaggaagctgctttataaataggttcagttattgaagatggcatggtataaaccatccataaattcatatttagatctggggacaaattatcaggaatctacaaattctccacgcaaaggtgtttcactcatttagattttagtttgtttttatgttgatgttaatcttttaaaaagctcatgtgattatatttggggtcatctgaacatcctctttatacctgttacacaacgtgtgtgttcatggtagcattagtgccaaataattcaaattcacttgtttccaagctactgaaaacagatgcaggcagacttaatatgtagcttccatattcttccaaaagaaagacaagcgacaatggaaaaaaaattgaacaaagatttggtaatagtttgactccagaaaactaatgagaacattcagtcattacatggcacactggatcactggtaggctgaaacttaaaaaaaaaaaaaaaagaaaacctgccagttagcactaagtgtcgtgatttaacagtgttcatccttgtcaattaataagaccatttgtattggttttgtatatatttattgcaattgttttaaatagtcatatgaaaactgtaagcttatgtttacacctagattcgtatttctatatatttagatgttacaaaattaacacatattaacttaaaaataataagctgatacttgagtgtggccagtgagatcagaactcagaaaaaacacaactcaggttgtcttctctctgtactttgctgtctgactctgggcattgtcaaatgacctcacctcccctatttcttcacagcaaactaagaataataatctcattcacatgggaccattgtgaggagtacgggaaataatgaatataactgtgaaataatgctttgtcaggtatactgtgttttggacgataagatatctgaatcaagagtttgtacttccagtctacattttgatgccacgttgggcaaatctccttacctctatggtagtcatcactattttttaaagctaggagattatctcagttccttttaaaacagcttttatagaaggtggttgagttttccactggaatttcaaagtactcctcatttttatatccatacccatagttgtttcgttttccattagcttttttaaaaacttactaattgaggaacagaaactttaaaattcatttgtgatcaacgcagcaatgtccaaacataagcagggttaaaacagcaaaattctcccacctatcagagaaactttaatttttttttttttttgcttcgttgtttttatctcgtataacggaaagacagaactcatatttcagtcttctctctgttcttagctgtaatcctagcaaatcgaatgacctctttacactggccaattattcatctgccaaataataacagccaccactgatcacgtgggagcttacccaatgccatgcgtgcactatgttctgaacgtgcacaccaggcgatctctctcatttagtgctcacaattttgaggtagacattagctccatttaactgatgaaaaaactgaggctgaacgaagttaaaaacccatcatgcagcatctgcagagcggcggttctaaaaacgcctcacagtaagaaagaattgctaacaaacagtagctttgcctctaagcacccgcttttcctctaatattcacagacaggtatttagaacgttaaagagccggaagcccttgggaacttcagggcgggagtaaaccggctgcacctctcagagcaactcctccgaaaaaccccaccctgtccaggccccgcctcgtcccgccctcctgggcgctctccccatagcccgcccaggagaagcctagtccacccggctctcccccggctctcacaggcggaagccgccgaccacccagcctgcccttctcgcggcaggacttagcgcatgcgctctcagcacgccgggaatttcctgtccgcggtcatcgcttccggtgggataggtctgaccaatggggctgactccgaggcgggccttaggtctcgcaggttcctcccctgcgcgtttctttcggagcggcggtgaaggtcctgggtgaggtagggttggatggtgcttgccgcgtatcatggctgcctccggaaaactcagcacttgccgtctccctccgttgcccacgattcgagaaatcattaagttgttaagactgcaagcagcgaagcagctatcacagaatttcctcctggacttgaggctgacaggtggatggctt

SEQ ID NO: 37312 - DNA, 2300 bp, Homo sapien
ggaatgaccctacaaggtaggtgttattagtcccattaaactaatgtggaaaatgagaatcaaaagaggtaacacatcagagctgggtgacaagtagaaaactcacctgtttgtcaaaatacttaaccaggatgaatgaggaggcagaaggatcaaggggagaacacggggcagagccttctttgtggctttcacgggaagaaaggggcaagtttgtataatcaggggaggaggtttaagattggatagtttgaatagattctgcaggccctcggctacaggtgtggttggtctctcgtccagtacctggctctgaggtgatcaaaggcaggagaaaggttgattctatgtatgagagtttaatgaaagagagggttaggggtttggactgtgtttggtttgcatatcaaagacatgctcccaaaccagttgttttctatcactaggaatgagctaaccctaacttgagcagtttctccccaagactgcaagatcctcagatgtcaatgcaccccaaaatgcagaaaataaaaaacattattaatacaatagaataacatccatttttctgtaattcattggcattatgtagaaatagtgtacttaatcacacatagcaacatgtatttgtaattaaattcccataagttaaatgtcctatttacagcactgcaatttatatctgtatattcagtatgctttggtgcacaggtccatatattaatatttcataaaagagacagtataaggtaatggttagaaatgaagatgttacagtcaaagagaactgaattcaaatcccaaccacctatctactgcaagttatttcatttaagcttgtttccacatttctgtaacggggctcataatatcgacctgacagaatccatgtatgatttaactgacaatacttgaaaagtccttaacctaatagtacctgggtaaataaagataaatgaatattcacaattcttactcttaccaggtttttaacaggagagatttgattttccaaaattgattctcctcctattttcatcttgtctaaaaaatttaaaggaaatatttgggccaaaaccagccagaaaattgcttcagttaggacaattttgcctagcagagtagaattatggtcactatattgaacaactatgacttacacaaaatcagagatagacgaggcttcccgtgcagccactcctggggtgactggagtatgaaaggatatttgcacttgcctcatgggtgcaccaagtgtgattaatgacacgtattacatcagtcccacaaaaaagttcattttttatagtcacacttttagatttatatgagagttttctatcttatgttttttagaatctctttccaccatcttctgaaagacggtttaattcatgttcatttagcccacactctttgtcttctatagagagcttttttgaaagaggggaaaaggaattaaagaagtggaaaaaatatggctggttgcggtggctcacgcctgtaatcccagcactttgggaggtcaaggcaggtggatcacctgaggtcaggagttccagaccagcctggccaacatggcaaaaccccatcactactaaaaatgcaaaaattagccgggcgtgatggtgcacacctgtaatcccaactacccaggaggctgaggcagaagaatccgttaaacccagggggcagaggttgcagtgagcccagatcgtaccacttcactccagcctgggtaaaacagcaagattctgtctcaaaaaaaaaaaaaaaaagtggaaaaaataacaaatagagaaagagctttgctatatgcagccttcagcacttaggttatttctcagatttacataaagacttactatcatcttgactgcaatcatgtagaaaatgaacgggtataaagtacatgaggacaatttaataaaaccagctttcttttcttataaaatctctgacgaaaggaatcattagacagagacttgccttgtatttacccaggtcatgaggcatgtcagtgtggtgatgtgcctttggcaagaagtccttaattagaaattcctcgagagctgctccctgcaggtgcttcctatgacacaaagacaaaataatttactagggaagcccttactaacgacccaacatccagacacaggtgagggagaagaaatttcctgacagccgaagagcaacaagtatcatgatggggtgctggattttgaatgagggtctctccaccatattagtagtaagtatcatttttgttattcaactttaaatatatagattgaatagtc

SEQ ID NO: 37313 - DNA, 2300 bp, Homo sapien
aacacacgatgatatatcccgttttccagttgtttgcgtagaattgcaatttgttgtttctacactctataatgacccttgggtgtgcacctgattccctccccccgaccccaattagtcaccagttttcccatcaatccttttctatttagtcatgtaacatatttacacttggtcaaacaaataaccactgctgcagtggaaatgaactaaaatagtttttatggaaagctgaagaatgaaataattttggaaaactatactctaccaaaaccgtaagtattgtttctgccaggttttaaatgctttctctcaatgaaaactgagtccacactagtacaagtgggtcattgcctaaggttaagaagtcttgctttttaaaatgttactaggggacaatgcacatattgaaaacattaataacaatgcaaatattaaaaacattataaaatgttaatagacaccaatttttaagagaacaaagtatggaacatttctacattaggactagagttgactgttttatattattattgaagttatatttattaaatataatgtctataatattttagtttcgttccacatctctttgaaatgaatgtatatcgagagggttaactgtgcacacgaagctctgaaacatgatgaaaggtgtcatatagatttatgaagatacgagctaacccatagctgtcgctgttctggcaccaagagttaaatgttcatgtgaaagttggcgcagaaaacaccactgtacatactccacagaggacatccaagtgcatgtaagaaaaatgctcctttgggaatacgtggacatattcctttggaaatacactgacaaacctacatacgtgtttaaggtgccttcaaaaagagttatgtaaacattctctttggggcgggtgcagtcagtcataagcatttattgagtacctactgggtacaggccatagggctctctgaccggggctaaccttcatttcaaatctttcctaattttgcagttggaagaagttgtgggaattacgccgatggcccgaaatcaaggcagaggcgaacgttctgaaaattacataactcctgggagagaccgtgcttttgcagattgcctaaatattttctttctccgtcggctccttgtaacctctgaggccaatagacaactttgtttcccagcccttctccctcttttgtctgctcgtcagactcgttttccacctttgtatcgttccttttagacgtgaaaacaaacatgcgaacgcccggttggcaaggagacagcggcccggggggaaagtgcaggttccggccgccccacgccgccgcgctccgagcggccgccgagccgccccggccccggccccggccccagccttagcccaagcccggctgggtcccgcgaggctgcgccggggcgggcggcggcggcccggggacgagtccagtccgcgttttgcgagtgcgcgggagtaatgcgagcgaagtggataatagttgctcgagctcgcccgctgcctctcaagccatgctgggcccgataggctcagctagtcgtgtatttacccatatccgggctagagaggaaaagagaaaagtttcatttaaacctgaactaaaaactttcaccatgaaagcacacagcaggagcaggcccagagcgtaaggcgtgcccggcccggcgctccggcggggcctgcggagggggagggggtcgcggcttcccggcgggccgcgtggatgcgcacaggaggggccgcggcctgaaaagtgggggttattgtctccccccgccccccgcccggcctcgccacgccgcggcgatcatggccgcgcgggcagcagcggcggcggcggcggcggcggcgcgggcgcgggcgcgggcaggcagcggcgaacggcgggcgccccccgggccgcggccggcgcccggagcccgggacctggaggcgggggcgcgcggcgcggcggcggcggcggcggcaccgggacccatgctggggggcggcggcgacggcggcggcggcctgaacagtgtgcaccaccaccccctgctcccccgtcacgaactcaacatggcccataacgcgggcgccgcggccgccgccggcacccacagcgccaagagcggcggctccgaggcggctctcaaggagggtggaagcgccgccgcgctgtcctcctcctcctcctcctccgcggcggcagcggcggcatcctcttcctcctcgtcgggcccgggctcggccatggagacggggctgctccccaaccacaaactgaaaaccgttggcgaa

SEQ ID NO: 37314 - DNA, 2300 bp, Homo sapien
aacccaaagattctttgggtaaactagagttgagcaatccgtcccatcatggctcccattgaaggacagctgaccgggtccagttggttggcactgggccccaggtctcagggagagcccctctgtgctgttacaggtttcctcagcccaggcttacagaaggtggggtgccagcaaagttggtcctaaatggatgaatgagccgtgtgtctaaaaggatagcaaattggttttaatcgtgaaggagcatatttgagggcacccaggtctcggtttgctcagtcgtgtaggtggttgctccagtgaagatttcttagctgcgcccacctatcctcctcgccccacaccctgcagccaaacttcctggagctggactaggtagtaaaaaattctagtcagcttgtggctgctctagtgttagtaggttcttgcaatctgtcctgttgttgtgttgcttagaaaacagcgccccctccccaaacaacacttccatattgtgtgtgagggcttctgtaaccagaaagtcaacatattaaagcgcaattcataggggagttgctggctgtgttgactgagctttacagtcattttaacactggcagaagtgttatcctaactgctttaaatcaaactgcaaagatgcttgtgtgaaatatagtattagatatcaaatcaaacatatgggtgttgaacggaaggatgtgtgttgtagtggtatatggtattctagcatgtggagttgtattttatggaaattcgttggcttggcttatggcagggacataacattcattatgagatatcaagctgtaaaataaataaaagcaaaaaattcaactgtgctgttaaatggcttgcaatgcagacttttctgctccaacaacttaggctctgtgtgatgagaggcattgtgagccgttatggtcacatttaatctcatcctctttggtagatcttgaaaataatctggattggattgaaagaaatataggaactttaactttttcattttttccccttttaccccattgtatatgttaggaattactgtgctgatttttcttagaggctaaatgttttactcttttcatcttttaccatttcatctttttcctcattcagtatttctatagtggatttgggttttaagtgtgtatctggcactcattaatttcttaagtgtgtgtgcttatggggctcaagttcttgaagttctccagtggaccatattgtggtatgaaacaaaatgactttgccattcttgtctctagagtgctttttgctgtcctgatatcttgtttttcttttcctttcctgctctctcttgaaattacagaaaaaggcaatagatttctcattaagaaaatattcaaaaatactatccatggtatatttattgcatgaggaaggattttcctgtaaacaatgctttcaggcatttttaggctgatgtaaattagagatggagaagattgattgaggccatttttgtctatacctctggtatttgcactgtagtacaccttgctttacattgttacctgttttatcaactaagaaaatgccatccttagcaaaaatagtaaataaaattgataatttaactggtatatatgtgctgtaaatgccgttggtatattctgactttttcattctgaacttagaaacaaacatacacaagaaagcacccaaaccacaggccttctgtaaagtattagtgagttaatttggactgtttgagttcactttttcactgttgtgtgggaatggatttcatatcatgcttctctttcttagtagaggctattttttagtctcagtatttagcacttcctcccctctccacctttatgatattatcaatagtttctatctgatagaatatgatggtttttaaaggcaaagcagattgccttttgacttcatttatagtatgtgaatagaaagcagcgtgtcgatttgtttaaggaagagaggattagaaatattgagtttagttgcttagcagagaacccccttcatgttgctgaattgaaaccatatttgatttcatttaattgcacattttgactttctcatttgctttgcttgactttttgacagatgccacctcagtatggacagcaaggtgtgagtggttactgccagcagggccaacagccatattacagccagcagccgcagcccccgcacctcccaccccaggcgcagtatctgccgtcccagtcccagcagaggtaccagccgcagcaggtgagcacagtgcactgccccgcagggccctgttttctccaccaagg

SEQ ID NO: 37315 - DNA, 2300 bp, Homo sapien
ggcccctgaatagaggccttgtgccctgcttgatttgaaatccatgctgtttatggaaaggaacctgcagggcacccagcgggaagtctgtgtgacaagtggaaatctagaatctggaagaaacgtggtgtttgagggggaaggtggtggggagagtggtcataatctttcagcctttgcttttgtgccccacaagcttaattgtcaccctctgctggcaaccagattgcagagccactctgtaagtgtccttggattgcctgtgcttactctcaccttattgttatcaaataaaaacctagacaaatagcattgaattctcttagaaaaatatgatatgaactgggtacattactagtagaggttaaatatctgaggctttttttgtttgttttttgtttgtttgtttttttggtggagatgtatttaaagggaagaagggctacatgtgaaaagctggaattattggcacgctcctgtatttcagagcgtgttgaaaagcaggtcgcaccaacactaggctggttaaatccagtttgtacagcttgtgtacttggtggtaccagctattgctccaaagtttcctggcttaagaagccatgtaattttaagtgtgcaagaaaggggtgggacagcagaagctttttataggatttcaagtaataaacattaatttttaaagcaatattccagggacttaacagaagtagaacttgtatatgatgtttctttaataccaacacatatttgaactgacaagggaagggagataattttattttaaagcaatattttccattctttttttctcttcaattagaaactggttcttcaactttcagtgccaattgagacatgctataataagtatttaacaattctgtcctgctgtttgacttcagggggaaacgatggtagaatgtttagtagctgagcatacacaggtagctagagatctggtatacagtaaatgtggtgtggtgtggtatttgggttatatatgctaattatttcagcacaatgctgaaaccatgcagaatacctcttggaagagtgtttgacaagatgccagaaaggccgtgttaattataagtttattgtgcctattcaggttttttgggtgtgttttgttccccactgttgttttattctttatgatggttctctgaaaactatgccccatgaacatatggagttctatatatgcgtgtttattggttttatagaaacctcaggatcctatgagcttaataacgatttacgctgttatgtgggtaattgagaggacctgttaagatatagttgatagtaaggttttcgttagttatttcaactttttgaggtaatattaaaggcagtttgaccaaaatcggaattcaacaatccagggagcttttggtttgctctgggttcactctgggtttaaagacagtttggtttggctacagctgacctccctccctgtttttatgaactagtcttcttcctgcaaaactcaaatacagtacttggtatggtctcataataaatttagttgttaattatatatatatatatatatatatatatatatatatatatatatatatatagtttatatttctgctgttattcactgctttttaaaatttttgcttctgataatgtattaaattatagccataacatatttatatgcctgctaaaatgtaacagttgttggttgtgataagcttttgttttgttttgttctgttttgtttgacacagggtctcgctctgtcacccaggctggagtgcagcggtgcagtcaaagttcactgcagcctccacctccaggctcaagctatcctcccacctcagcctcccaagtagctgcaccaccacactcggctaattttttattatttttgtagagatggagtctccctacattgcccaggctggtcttgaactcctgggctcaagcgatctgcctgccttgatctcccgaagtgctgggattacaggcatgagccactgtgcccagccaagcttttgtttaattttagttactgaagaagcttataactcattgagatatttatgaagtgctttgtgtttgtgtttttttttaggacatgtctcaggaaggctatggaactagatctcaacctcctctggcccccggaaaacctaaccatgaagacttgaacttaatacagcaagaaagaccatcaagtttaccagtaagacattattgtgctgatttggaaatgtaatgagttaaagacttttagaaagagctgttgtttttgtttgttctactttatattatgacat

SEQ ID NO: 37316 - DNA, 2300 bp, Homo sapien
gtggaatccgtggcaacagcatcacctgggaacttagacatacacgttctcagcccccactgagtcacagactctgggaatggggcccagcaagctgagtgcaataagccttccaggtgattccaatattcaagttcacacttgaggacgactggcacagtggataaggaaggacctgcttttaagccctgtctctgccacttaacagctgtgtgagcttgagcaagttagtctttctgagtttatggagaggaataaatgagataatgtacttgaagcacttagtgcaatgtcagatatatagaaagcactcaatacatgttagcagctatggttactgttatgtatgaggggaaggaaaaaggataggtccttcaacaaattagcacagcatttaccagcttaaaagccctttcagatactgacgtgtttccaggaaatccaaaggtcacatacattctgtgtgatctcatccacacaaaaatttgaacagagcagtagttttttatcatcagaaaccccacggagcttttacattctgccctgccacccgcgggccttcagagctctaatctcccgtggtagatagaccttgataatccatcatttttaaaaatccccataggcaatgctgcaaaatagctactggaatcaaaggtggtaatagttagagctaacatgtattgaatatttatatgtgccaggcactgtgctaacttctttatagatgttgcttcatttaattctcacagtaatcctatgagttaggtactatcagtttttgtgtgtggggggggcgggatggggtggatggcagagtttcactcttgtcatccaggctggagtgcaacggctcgatctcggctcactgcaacctctccctcccaggttcaagccattctcctgcctcagcctcccgagtagctgggattacagtcccgcatcattagactccgctaatttttgtatttttagtagaaacggggtttcaccatgttggccaggctgatctcgaacttctgatctccacctgcctcagcctcccaaagtgctgggattacaggcgtgaaccaccgcgcctggcctactaccagtttttaaattttacaggtgaggaaactgagctatagaggggctaagttaccccaagttcacacacctgagaagcggtttaggacccgagcccaggtttgagctattaactgcacttcactgacgcaaaaatggatgcattcatttactcattcatccaacatgcatttgatgttggtaaccagttaatatctgaaagctgggggatataaactgaacatagagtcccatctccatcctcaggaaactcatgccctccggtgatggggggcaggacaaatagcagagagaccgccttattttacaagatgtcattgttctctgagaggctgaaaagattttctatcaccactagcctcctcctctccacggccatttacagaatgggcaaaccagcctcccagcggaagaccaagcttgctagcggtcaacgttgccggcagctctgcaagcgcttccagcgggcgtcgctctcctttcgggggtggtactttcattcggtcatcctgtgagtgttccacttcccgacggaggccgagcactcacaccgcggcggaggtacccgtcaccgcagaaccgggtggctggctctcctccagggagaaagcctgtcacttattcctcaacactgttgggaagttacctagaaaagtacagacagaagacctaggcttgcgttttagaatcgtggagtgttagcgctggccaaatcgttggacacaatgtaagcttgatcaggaaaatgagctccagggtctcacaggcggggcctggaatcttggcgcaatctgcgaccctcactgcctcctacagtcggggctgagcgttctttcaaacagccaaagtaatcacttaagtccagcaatgatctccttggagaaatcaaaagatcctccctaagagacggccttggagggcatcgcccctggggctgggcacagcacgtcttcccggccccggcgcgggaggagggtttggggacagcggccgcactccggacccttcttcagattgcacaggaggaggcggtagcggaacctttctcctccgcctggttctcgcttccacccgggcccagttggggacggacgcactagaggcgacctaaacatggagacagcgggcgctgcaactgggcagccggcctctgggctggaggctccggggtccacgaatgaccggcttttcctggttaaaggtaagatgtg

SEQ ID NO: 37317 - DNA, 2300 bp, Homo sapien
tctcattagctaaaggacaggaaagcatatgagagctttcacttgaaatgtatgaagctttccagttggttttttaaaactagtccagccacaaatacttaattgtccctgtaatatgcttgtctctcatacaatatctaaaataattaaaacccaattattatcgtgtgcttaagatccattctccctagactctaaccggctttggaatggacccctgtaaatttcacttgtattcaaaactccttgtaattgcatgtcatactctaattgctattcccatcactttttccttaccacagctcctcccaactggccctcttggataagccaatctcatcccccttcgacactcctcactgaggcacgctttgtaagggacatacttagggctctgggttcgatgccatctctactacttgggagctttgtgatgtttggccagtagttaagctttctctaagctggatacaataatgcctcaccgggttccggcgaagattagacaaagaacatgtgtaacgtgcaaactgcccagtacagagaaggcaccgttccccacaaccccctttgttggttcccatctcccaccacctagccccagaacgcccagcaccacgcctctcctgcccttgtcgcgggggatgcagggacttgtagtttctaaggccccgagtcgtgcttctcctcggcgcaggcctgcgggcggaagaactacacatcccagtgggctgtgaaaggaaagtggggctcgggaaattgagcatccctgcccagctgccttcgttttctgcggccccggggctatgcccacctctgcgggggctcggacccgcggcaacgcctgggagggcgcgagcgagcagaagccccaggctccggccgtcccagggccgcgcccgcagctcctcctgggctgtcgggtgggaaggggggaggcgcaggcgggagaggagaagcacgcgacccctccgctgccgagggggctccacgggggaatggagggagaaataaagcgagcagctgtaaacgtccgtggggagaagtggagaccgaaagagctgggcggcagcaacccaaaacctggcctccaagggcttatactccgggagggaggccggggccggaggggaccctgaccgcttcctctgcccttctttctcggcccggaagccggccgagccgggccccgagaccctcgcccgcagcccggtcccgaagtcaggccggcctagggccgccccaccccatcctggcacccggcacccccagcccatttctcgggcatcaccagagtccccgggcgacgcgaccacgcgcccagctggggaggaggaagaagggaggcgcaggccggggagggtcacctccgcgccgcggctcctcaggtcccggggagtcgccaggagtggcttgccggtggccgtgggaatgagcgtgtcccgaggcggcagctgctgcgcgggataaacccggaagaagccgcgagacggactgaagtcggccaggagcgcactgcgcggcggggccgcgggcgcccgaccccatccctacttgggcgatgccacagggagccccgcgccttccacaccccagggcgcccgcccgagggggctggggctggaatctcgctgcgccggtgccctggcttcgcgggcgaggaggaggaggagcaggaggaggagccgcgggtgaggcgcgaggccaccgcccacccggcccggaggaggcggacccactcggagcgccgcgcgcgcgccgggctgagccttgcaaacaagtgtctgtgctgtgtccccgcggccctcctcgcgccggggccgcttcctccgggtaggagggagcaagggagccctcgccgcgcggcccgcgagccgccgccgccctcggcccgcgcatccccgcgcgggggccgcggattcgactaggctgccaggcgcagcgacaccgggtcgcggtgcgagcggcgccccggctctcgccgagaggctcctgacagaaaaacgtgcgtggttgtccccacccctgggaggggttgccggtgccgcgcgcggccgcccagtcgccagcgctctctcctgggaggatccgctgccggaggaaggagtggacccaacctggccgcgccgcagaagtggctcccgaggaagccggcgccggggccgccgcctcgtgtcccctcggggcgcagtgctcgggggtcggcgggccagagccgaggcgcggccggggagccgggggctgcggggccgagcgggcagccgcgcgagggggcgggcgctcggcgacccgggggccgg

SEQ ID NO: 37318 - DNA, 2300 bp, Homo sapien
ggggcactgcctagtggagctgtgagaagagggccaccatcctccagaccccagaatggtagatccactgacatcttgcactgtgtgcccagaaacgctgaagacattcaactccagccgtgaaagcagttgggaggggggttgtaccctgcaaagtcatagggcggagctgcccaaggctgtgggagccttacctcttgcatcagcatgacctgcatgtgagacatggagtcaaaggagattattttggaactttaagctttaatgactgacctattagatttcggacttgcatggggcctgtagcccatttgttttggccaatgtctcccatttggaacaggtttattttacccagtgcctgtacccccattgtatctaggaaatagctaacttgcttttgattttacaggcttatagacagaagaaacttgccttgtctttggacttggacttttgggttaatgctagaatgagctaagactttgggggactgttggaaaggcatgattgtgttttaaaatgtgaggacatgagatttgggaggggccaggggcagaatgatatggtttggctgtgtccctacccaaatctcatcttgagttgtggttcccataatctgtacatgtcatgggagggacccagtgggaggtaattgaatcatggagacagttacccccatgctgttcttgtgatagtgatctcccgagatctgattcttttataagaggctttttccccctttgcttggcacctctcctccctgctgccatgtgaaggacatgtttgcttccctttctgtcatgattatacatttcctgagacctccccagccctacagaactgtgagtcaactaaacctctttcctttatcaattatccagtctcaggtatgtctttattggcagcatgagaacagactaatacaatgtcccacaccaatgaaagactctctgacagcaggaccaggatctcagcagttctgctcaatgattattgcccaggatgagttggtgtggtgtgaggggactgagtgggtgatgggactgattcctaccactttggaaatcaaccaaaagtatcttgcaaccatctctgatagtatgtgctttaagagggtgagaattaaaatgaacagttatctttaatgttaccaactctgatgctcctcaggactgatccagtcccttaggtctggcttgcatctgtcagccacagagtctcagctgaagctctcatggaagttcttgatcttctccatccaccctgccctcctgttcttgactgcacagccagctgccctaacttcttcttggcaaggctaatagggctctgaggagtctaggtgaaataaaactggaagttttatcttcccagagagcaggggttctcaaaccttgcccacgtgagaacaacccgggtcattctgatttaataaatctggaacagggttcacaccttgggggagttttaaaagctcccatgtgatcctaatgtgaaatcagaaatgataagataaaatggaaatttaaaaactccacgtttgtattgtcattgacatttttagaactggttctaaaaattaaaggtgctattgagatgataaaatgtagaaatgattttcaaaatatacatttaatgattttttaaaatgtattttttacaatctggtttctccccctcccattctatacttggcatttttgaggtagccaatgggcaaagtgaagggaccctggagctggatttggagtccagcattccaggagagcgaattagggtggtgtgttaatgagggcaaggctagcagtaacaagtaacaccctagcctttccaggtttaaggcaggagtctggtgctcacagacctgtgcaggcgggaagaggtcagggtggccctcctctgtgcagtcaggcgactccccagctgtgtctcccaagatggcctggggcctctcctgccgcctacagggaggggagggggaaggaggaaaagggcggggctccacagggagggcctggctgggtggggccatgtgtgctgtgctccattggccagagctcagtcacgtggcccctgcacgtgtgcaacgaaggaggccggggtcccagcggagggtgagtcccagagccccagcctgggtaaaccgtgggcaccgggggccctgccagccgctgtgcctgctgccctggagcttacactccaggcggacgggtcccgccgaggcagagggaggctctgaaggtgtgcgctctttctcttcttttctccacagatatcgcaaacggcaccagttcagg

SEQ ID NO: 37319 - DNA, 2300 bp, Homo sapien
caagcacatagagatagataaaatatgaaaactggatacaagttcagcttagaaaacagccggaggagaaagctaagtcatatgcccagcggtgtcctccccagccgccacaggcagtcttgtatgagcgagtatgttagaatggtgttctcaatagaagatcagctgagtagtcaagagaagccctttgccattacttgcaaggggaagaacaaatctcaaatgcattacagactttgtgtgcagatgtccaggtgagaggcctggggtctgcacttagggtaccatgggtaaccatgtgatgatgcccatatcggaccctctgtcatttataaagtgccagaggcggcatggacagtaagaagatgggagcagctctgaaaggcatggcctcaagttctagttccactgcttctgagctgaatggccccgtgcaggcagtctcccatctctgtaagcctcagtttgcccatctgtaaaatagggtaacaccatcgttttcttcataggaatgttttgaggcccaatgcattaataaatgtgatggatatctgctgaacggttgtaactgaggacaaaggattgtccctctgtcctgtcccaggccccttgtggcctctctctatggccatttactatgcaatgcaggtcacttgatcgacatccagccccagcccagaacttaccatcaggcggtgttggttccctcttaagggaaggttgttcagtgaatgcaaagaagtttcttttaccaaagagaggaatctttactttccaaaagaaatgagaatttgccctcctgtttctttaagttgccatttgagaagaatgcatatgctttgttttttcaaaacagctacgttctgttgaaagaatgacgatgtccttgaactgtcttgatgagaaacatttctctgagtggttaatttggaaatatgcagaataatatcattgtgttatactatcagagtattgggtgggaggggcggggctcctgcaagtaaaaagacattttattaattgatttccactttttttttttttctgcctctcatttcagaacggtttgatcaccactgtccctgggtaggcaactgtgtggggaaaagaaactacagatttttttatatgtttattttatctctgtcttttctgacagtctttatatttgcattcgttatcacccacgtcattcttcgtaagtatgctggcgaaatcagattacgtatgtaaccatttgcctgactttgattttcctatttgattttgatttaatattttggtcatttcgggctttctctttccctttctttctccctttcccctcctcacttccagcctgcctcgcttttgtttctcaccctcctccatccctcctccgtcccctgtcatcccccactccccaccccatctttcacagcactttccaggggtcgcacctaggccaggctgcgctttcaccaaacaatacctcctccttgatacgcacatccctattccaacctcagtgacctcactttttctcctgctaaggggtcccctggaagactcatccccacattttgcacaaaggacaatgtgctgcagtgatgaccattgaagagcagagttttcttccttaatgtgataatctccttatgtaagaacagtcaccagtcaccctccctagaaaagatgtctggtgagaaagactaggttttcttgcacacaaatctatataggttaaaaacatacatttgacaagatgtttacgtatctgctagaacatgagctaactacccctggcatatatataaaggaagcaactttgattaaaaattagatttggaaatcaattattttaatatctatttgcctaagcaaatggcattttttcattttccattctgagggttataactttgaattgcttttgtctcttggtcattcacttttctacaatagaaagtgatgagaaggaagtgaatttgccttgagttataaatttaggcctttgaacttccattacagtaccaacagcaacactaagcactagccttgcctcttgtccgcattcctgaagcataacccttcattagcaagtccgtagcttctttctggaatgtttccgtaagtatctgcacaacggcttcacttccttcccaggccgcggtgctcaaaccacaaatggcgtgggctgggctcaggctcacgttaggagtacatcttcctccctttctcttctggtgggttcgtatgggggtggggaagtgggtgggagagaatgttttgcattcattctttttgaatattagtcaaat

SEQ ID NO: 37320 - DNA, 2300 bp, Homo sapien
atttggaaatatgcagaataatatcattgtgttatactatcagagtattgggtgggaggggcggggctcctgcaagtaaaaagacattttattaattgatttccactttttttttttttctgcctctcatttcagaacggtttgatcaccactgtccctgggtaggcaactgtgtggggaaaagaaactacagatttttttatatgtttattttatctctgtcttttctgacagtctttatatttgcattcgttatcacccacgtcattcttcgtaagtatgctggcgaaatcagattacgtatgtaaccatttgcctgactttgattttcctatttgattttgatttaatattttggtcatttcgggctttctctttccctttctttctccctttcccctcctcacttccagcctgcctcgcttttgtttctcaccctcctccatccctcctccgtcccctgtcatcccccactccccaccccatctttcacagcactttccaggggtcgcacctaggccaggctgcgctttcaccaaacaatacctcctccttgatacgcacatccctattccaacctcagtgacctcactttttctcctgctaaggggtcccctggaagactcatccccacattttgcacaaaggacaatgtgctgcagtgatgaccattgaagagcagagttttcttccttaatgtgataatctccttatgtaagaacagtcaccagtcaccctccctagaaaagatgtctggtgagaaagactaggttttcttgcacacaaatctatataggttaaaaacatacatttgacaagatgtttacgtatctgctagaacatgagctaactacccctggcatatatataaaggaagcaactttgattaaaaattagatttggaaatcaattattttaatatctatttgcctaagcaaatggcattttttcattttccattctgagggttataactttgaattgcttttgtctcttggtcattcacttttctacaatagaaagtgatgagaaggaagtgaatttgccttgagttataaatttaggcctttgaacttccattacagtaccaacagcaacactaagcactagccttgcctcttgtccgcattcctgaagcataacccttcattagcaagtccgtagcttctttctggaatgtttccgtaagtatctgcacaacggcttcacttccttcccaggccgcggtgctcaaaccacaaatggcgtgggctgggctcaggctcacgttaggagtacatcttcctccctttctcttctggtgggttcgtatgggggtggggaagtgggtgggagagaatgttttgcattcattctttttgaatattagtcaaattgggccgttaaatggaacatcccaaattttcataggtactttcaatcctagttgccattctttctgactataatctttcatccaaacgtgacacaaatgtgtaatatgtgcttgagagccatgacttggtgggcttgcaagaggacaatggacacccgccttttccacatcagctgggcaggatgcagacaggggcaccctctccctctattttcaaagtcctcaaaatggcaaaaatgtggctagggtcctatctgtgcattaatagacaaaagaagcagagagaatgactagggcattatatgttattttcaaagaagcagttgttgacacaactagggaagaaatacgaaccgatcctccagcacacacgtaacactgaaaagcagtgtttagacattatttatttttatttttgagatggagtgtcgctctgttgcctcagctggagtgcagtggcgggatctcggctcactgcagcccctgcctcccaggttcaagcaattctcctgcctcgagtagctgggattacaggcgtgggccacagcacccggctgatttttgtatttttagtagagatagggtttcaccatcttggccagactggtctcaaactcctgacctcaggtgatccgcctgcttcggcctcccaaagtgctgggattacaggcgtgagccaccccacccggcctagacattgtatttttatatcacctttcacaacctcaagatgcttttgtgtgtattatgggattgtatttatggccttgtccctgcattgtggatgtcaagggccagttgccacgtgcttagtcatatacctaaactcagggaacacacacacgcatgcttatggactcacacacactcacactcttacccacactcattctagccacactcacactcatatatactcaccaat

SEQ ID NO: 37321 - DNA, 2300 bp, Homo sapien
catttgacaagatgtttacgtatctgctagaacatgagctaactacccctggcatatatataaaggaagcaactttgattaaaaattagatttggaaatcaattattttaatatctatttgcctaagcaaatggcattttttcattttccattctgagggttataactttgaattgcttttgtctcttggtcattcacttttctacaatagaaagtgatgagaaggaagtgaatttgccttgagttataaatttaggcctttgaacttccattacagtaccaacagcaacactaagcactagccttgcctcttgtccgcattcctgaagcataacccttcattagcaagtccgtagcttctttctggaatgtttccgtaagtatctgcacaacggcttcacttccttcccaggccgcggtgctcaaaccacaaatggcgtgggctgggctcaggctcacgttaggagtacatcttcctccctttctcttctggtgggttcgtatgggggtggggaagtgggtgggagagaatgttttgcattcattctttttgaatattagtcaaattgggccgttaaatggaacatcccaaattttcataggtactttcaatcctagttgccattctttctgactataatctttcatccaaacgtgacacaaatgtgtaatatgtgcttgagagccatgacttggtgggcttgcaagaggacaatggacacccgccttttccacatcagctgggcaggatgcagacaggggcaccctctccctctattttcaaagtcctcaaaatggcaaaaatgtggctagggtcctatctgtgcattaatagacaaaagaagcagagagaatgactagggcattatatgttattttcaaagaagcagttgttgacacaactagggaagaaatacgaaccgatcctccagcacacacgtaacactgaaaagcagtgtttagacattatttatttttatttttgagatggagtgtcgctctgttgcctcagctggagtgcagtggcgggatctcggctcactgcagcccctgcctcccaggttcaagcaattctcctgcctcgagtagctgggattacaggcgtgggccacagcacccggctgatttttgtatttttagtagagatagggtttcaccatcttggccagactggtctcaaactcctgacctcaggtgatccgcctgcttcggcctcccaaagtgctgggattacaggcgtgagccaccccacccggcctagacattgtatttttatatcacctttcacaacctcaagatgcttttgtgtgtattatgggattgtatttatggccttgtccctgcattgtggatgtcaagggccagttgccacgtgcttagtcatatacctaaactcagggaacacacacacgcatgcttatggactcacacacactcacactcttacccacactcattctagccacactcacactcatatatactcaccaatacgctcacactcacacatatccttacacacccacactctcacatacccttacacacccacacacccttacacactcacactcacggtagccacactcatgtataaccaatatgctcacacatgtacccttacacacccacactcatactagccatactcacactcatatatactcaccaataagctcacacacatacccttacacacccacacaccgccttacacacacatactcgtacacgcccacacacacccttacacacccacacacatacccttacacagccacacacatacccttggacacccacactcactctagccactcatatatactcaccaataagctcacacacacatagccttacacacacatccttacccacatttacacactcatacccttacactgtcacactcacatgtacccttacacacccacactcacacacacccttacccacactcacacacacccttacacacccacactctcacacctttacacacccactcacacacatacccttacccccacacacccttatacacccacactcacactctagctacacccacactcatatatagtcaccaatatgctcacactctcgcactcacatgctgtcgtgctcgctcacataccgttgcacactcacatgctctcacacactctcacggtgaaatctgtgcctgccaccacactcaggttgcgatgtgtgtttcacttttagctcctctaaggttttactcacctggctccaccaaactggattttaccatagtctatacttaaatactgttcatc

SEQ ID NO: 37322 - DNA, 2300 bp, Homo sapien
tacacacacatactcgtacacgcccacacacacccttacacacccacacacatacccttacacagccacacacatacccttggacacccacactcactctagccactcatatatactcaccaataagctcacacacacatagccttacacacacatccttacccacatttacacactcatacccttacactgtcacactcacatgtacccttacacacccacactcacacacacccttacccacactcacacacacccttacacacccacactctcacacctttacacacccactcacacacatacccttacccccacacacccttatacacccacactcacactctagctacacccacactcatatatagtcaccaatatgctcacactctcgcactcacatgctgtcgtgctcgctcacataccgttgcacactcacatgctctcacacactctcacggtgaaatctgtgcctgccaccacactcaggttgcgatgtgtgtttcacttttagctcctctaaggttttactcacctggctccaccaaactggattttaccatagtctatacttaaatactgttcatctcttcttctacacaaaagtattaagaatttacctgcctgcaagttattggaatatcctgggcaaaagcaaataaaactttcccttttcccttgtttgacaccccctcatcagtgacccccacgacacgaccccaccaccctatctggcttggcatgtgatgcttcaggaagggcacagggtttccacggctcctgttaccctcttaagcctcagaaaacattggcacaggcagagaggagagctgtcatctgagtctctctgtgggatcctgggctcttagggaaaggccagacagggaggggcgggagagatttctgtggcctccaagattcctgggaaggcgaagtctggatttccttggagaggaaggagggcttaggccagccacataattagggtgcagtagacaaacagaaatcatttcttttggtccctcatctgcctcaaggctgtgtttgctccacatggccgcacaggcacttgcgtctgtgccctttggggctggcagagatggaggagaaagccttaagcaccatctctcctgattagcgctccacgcagcttctcttcacagcccctcccacacactgtgtcccactactcagacacatgggccgtgggcacagagggaaagggaccttgggaagaatagggagccaagccactcttcaccctcccaggtgtcgcccatagtggggcacatggggacacggtggccactcaccccctgccactgagtcccacagtgcagctgggcctgtggtcagatgccacagggacaccatagcacccgtagagtgtgtcatttccttggtgcacgagggccggatgatgtccccagaggctcactggcttcccacagcacagagggacctggcaccgctaccctaagatggaattgttaaaactacctccatttttatttttaaaagtatgatgtcaatgcataaaataaaaattgctttctgtcagatgcttctttattcaagcccctaaagaaatgttttcttgcctaagacagctcatattaaaatgtctaaagcccaagagaagtctaataaatttcagctttatgactttgtttactctgggtgtagaaaaagaattcttttatacgtagcctagtttccagaacttccagggtcaaaagttaacaaatttggggaaaacagaagagaaaagatagcatacagtattctgttttcctattaaaatgaggaaaacaaaggagtcatcagaactataatttacgggaaagtgtgcagacatccatctgcttttattgaaaaaataccctgcagatgttgggcctaattatgaatcctccattttcttgatgaaaaactttagtggcatctcaatctctgatcggtaaactgggtgtcgtagcacttacaaaatagaattatttcattgatctttagccatctattatttttttgtagatgagagagcattcagcatgaaggctgtttctatctgaatactaaatgttggtttcattcccacaggttcacagcaaacaggattcctaaatgcccttaaggacagtcctgcaagatatcctttgtgatgattctgttttcacgatgctaatgtgttgagtatctggctgaccttctgtgcgcacacctcctcatcttctgccccggccttgcttctcatgtatcttattccaaagaactccctcagattcactggcacgagtagt

SEQ ID NO: 37323 - DNA, 2300 bp, Homo sapien
acgtgaccactttgtgccgcgtggatgtggccttcgtgaaatcgagatctggctgtttgtcgtgtcacacttcacaccttttttgatcttcaattgaatctgtgtctgattggggggaaatttcctaaagcccaaaatagagagacagatgcctgtggccctgctaatgactgaggccctgctaatgactgaaggtgcgtgcagggagctgtggttagcatcgtcaaggagacaggacacatgtgcaggaaggaagcagccagaagtctgaggaaaccagtttcgaaagttgatttgcacacaatagaaatgttcatagggagaaagccacatgggccgcagtcgttgatactgtggtcatggtaataatgacgatgacacgaaccatggcagtagctgacctttattgaatctgtgttaagctctgctctaagttctttatctgcattagcctttcacaagctcactctgtacctataggtaggcaccgttatatcccattctatggatgaggaaagtgaggcacagagtttaaataatgtgcccaagatcacacagcaagtaaatgccggctagtcaggacacacacccaggccacccaatgtcagagccagtatgtgcccactgaggcacgctgcctccaagtcagagtgtacaagttcaaaatacagattctttgtgagttacacctatggagaatattttcaactgataaatcaaaccatgatcaacaaatagatattgagcaaatctacctggtctctagaatgagtttccaagttattactgcttcctaccttttggtctccaaatgtgtaaaacagggagaaatgacaaaagccaccatgactgtgtccagggcagacccactgtgcacccagaccttaccgatatgcgcttgtggaatgcaaacttcatttgattatcagcctcagtgaatcctcattagagaggtaaaaagaattcaagaaaaaaaaaatccaagcatatattccaaggccatctgtgcactggcattgagttattactttgagtcaccgtggtgctactgcaaaactagaacttgatcattttctagctttagcctagaaacttgggagcccagcatgccactgtcctcctgaactaggggtcctcaaggcacccctgacctcctcagaggcttagaaagggcaggcgaggatcctgggttagaggagctgctcagaccacaggggtcagacatgcctgggcaggtgccagctcctcttgaagaaacctcctgactcacctagggatccttctgggagctctttaagcagaaagtctctcaggcaatggcttgatttgtcacagcgtccatggtgcttcccgctggcttgtttgtgactagcagggcaggtcaggaaacagtaagagccagggagagctggcctctttcccccacctgcagtgcgtgtgtgggtctaagagaggatgccgaggcctcagttctgtccaaatctcccttcttgttcctgagtccttcatctgcatatggcacggctttatgttgtttagagaccacaaactgtcacaaccaaaattatttccaccactgggttaaatgtgctgttttggctggattggggctgtatcttttccaaaatccatgttcctttgggtggggcatttcttgaggatggtcctaccctgagaagtgtttgaatcgtttgttaaaaggtaaactgaaggacattaaaatagtgaagagtgtatttgaacagacggcgattcatgaatctggcagctccagacttgaagcggtgtggggcagcactgaaggggctccgggggaggcttttattgggtgaaggcagagcaagacaaataagacatttgctttgttaaagtggggccgtagctttccttgggtcattctggagcttgggcagggacataggccactcataggcttccgggctggccccaggcagatgtgagggggtgatgcctacctttgcccctccctctcgtcccctcttgccttgcccttccgctgtgccacctcgacccagcccctgtgcccttaagtgggccagggccttcccgggcatcccggccaggcctacccactgagagtgtccccttcctcggacccctgggcccagacccctgtgcttgagttgcccctcctgggttcttaaatggtgctgtgccatgcaaataaggcagagagagttcttgtgttcccctctgggagtctgcttaccaagagttcagagacccacattcggttcctgcagtgttcccagaggcagggatggcagctggctgggtat

SEQ ID NO: 37324 - DNA, 2300 bp, Homo sapien
ctgctgcagagcgagcccagcctcaccagcgacgagctgcacctgcccgggaagcctggcctgggcacgccctgcgccagcctcacactgggcccgcccacaccgcccgcctccatgcccaacctcgccgaggccacgctcgcggacgtgatgccccggaaagatgagcacatgggccaccagttcctgacgcccgatgaggcgccctcgccccccaggctactggcggcgggcagccccctggcgcacagccgcaccatgcacgtgctgggcctggccagccaggactccctgcatgaggactctgtgcgcggcctggtgaagctcagctccgtgtgacccacatggccccaggccgggggacaccagaggctcctccatgggcagcaggagtgagcggaggggtgtgtcccacagcgactttcccagccaatgccacggtggagatgacagccccaggtctggggtacagagaccacttaggatggcacagggtggctggccccggatgctgagagcttggtttcatttgaattttcttccccaacctgagtgctttgacaacaatggaaatagagaagtggctgctttcttttggtgaccctccaggggtggaatcggagtgtgtctgcccgcccttgtgacagacacacggaaggcttctgacgcttgtggccagactgcaattgcacttatgtgttatgctactaatatttgaaacagacctgccattccatttgttaattaaaaaaaaaaaaaatcctaaagggaaaaaaccgaccaggtgtggatctgcatgccacgctgccgtctgtgttacagtggtgttgctatttccaaggaagtgctgctttctttttctttttttaattttgtgaattttcaagtgctgttttgttggaagacagtgcaacgaactgagactaatggacagtgtcatcactcagcttactgggctgaggcgtctgtggagaggtggcaccggggctgcagagggcggctggggttccgtcgtgtcgggtgtcacttcaccttctgtttggccgctcgatgaggtctcgtgttgagatattgtgtgccacaacccccacagtcttcacctccgtgtgtgatgaaacttcccgtggacagccaataaaatgacgtcctctgttattttggatctgcgtacggttatccttaatagcataaatgaaaacaaagtcatccagatggggagagtttttcttgaaatgtccctagcgaggaatggtccccagacaaccaaaagtcaaatctttgaactgggagatatttatagaataatttcttagataagaggcaagttttccatcatttattttctttaattatctctttttgacaccatcttagtggaatttgctctacgtttgcagtttgccgtgcaacagttgatcggaagtagggagaggggaggggacgctcagggagaaggttctgtcgggcgtcttctgggcttccttctgtgttaacgtgtcactcaatcccagaagtgcaacttgaggtcctagtaaaggtatcagaaaatgaggaggagaaatcggcttacagtctaagctgagatcatgtaggtcatcatccttcctagacactgatcagaatgaaattaagaaaatgaccactttgttcactttcattggtcacctagaagggaacgaactggctctggacttagggagtgtgtcactatgggggcagccacaggggacacagcaactcctctcctggcttctttccagaccataaatctaacagctaaagctactcaagttcaaagccatggccttgctccttataaccatatgaaagacaagacacattgaccaatgatacaagtaacccaagtgatttgcatttatggaaaaaggctattactcctgagaaagagttgccattttatataaaagaaaagaagataggaaaaagaaaagcacacaagttttatttggaatgaaggcaattcacaggtcacaaaataattcatgctgaaagggcctgcagagttcttgcactgtgatgtcttcgagccatctttattgtcatgctgcatgcacgtatagaaaatggaataggtccattctatgtagccatttttgattttctgaaccacctaactacttgtacccacctgcaatgtgtaattcatggggcagtgccctccttacacaaccgcacacgctcacaggcaccaactcacagggattctccttgtccacgctacctgtgagcccaaagtgacagccccacaaaggagcttccacaacttcccaaaccgtctc

SEQ ID NO: 37325 - DNA, 2300 bp, Homo sapien
gagtctcactctgttgccatgtggaatgcagtggtgccatctaagctcactgcaacctccgcctcccgggttcaagcgattctcctgcctccgcctccaagtagctgggactacaggcgcgcaccaccacacccagctaatttttgtatttctagtagagatggcgtttcaccatgttggccaggatgatctcgatctctcgtcctcgtgatctgcccgccttggcctcccaaagtgctgggattacaggcatgagccactgtgcccagccgattttttattttttaattgacaaaaatatatatctttatcatgtacactatgttgttttactacatgtatacaatgtagagtggctaaatgaaactaacatgtgcactacttcacatacttaccattttggggtgaaaacacaaaatccactctcttagcaatttttgaaaatatatttttattaactaaaggcaccattttctacaatagatctcttaaacttaatcctcctgcctagctggattttgtatcctttgaccaacattctccccagctggcctcccacctctcccccagcccctggtccttcatattattaagagcccttcaatgctcagtgttttaaaagagcatgtgttaattatttaaagtatttagtgtgtttgttttggcttcaaccttgtccagtggatgctcagaactttttcacttccagctattgttcatatatccaccccgtgccagcctgatgataccagaatcactgggtttttctgttgttgttgttgtttttgtttttgttttgagacagtcttgttctgttgctcagactgaagtacagtggcacaatctcagctcactgtaagctccacctcccgggttcaagcaattctcctgcttcagcctccctagtagcagggattacaggcatgtgccagcacacccagtcagctaatttttgttttttgagtagagacggggtttcaccacgttggccaggctggtctcaaactcctgacctcagatgatccacccgcctcggcctcccaaagcgctcggattacaggcgtgagcccacgcacccagccttagaattacttttgataaataccaagtaggaggcattttattggcttcaaaatagaagttaatgtcttcacagctgaggaggtccatttctgaaacccaaggaccttggctttggagacattcatgctatgccaaaaatattccccatcccccgccaagtttttattcattccctttcattgttttgtgtatgtaccaacttcttccctccaaccagatcttttttgttccctccaactagtatcttcttttaagcatctcatattcctggtcttttaaaaaaagacaatatatatataagctaaatactaattttctaaagtaattcactcaaaatatctaattaataggatgctagcgaatgctggtcttttacaaaaagctaagttccttagcaagcaggacttggtcttgctcatgcttgcacccatcctgcctcagcaaccccagcaccttgcacaattcttcatgcacctagcaagtctgcaacaaatacctatgaaataaaagaggagacatgaccatcaagcagtagttcctattttcttgtgtggcttataacctgatttgaaagtacttacaaaaatattttgaggggtggccccatcaggtaaatgaccacatggctccaaggggtctgctttgaaaacagcctcatgtgaaaccctaagacctggtatatttgttgggggacaaaaatggttttcttattttgcagacatttggctttatgaaattttagaatattaaaagtatatcttgttggtcaactaggctaagctttctcgtgaagaagctgatatggtttggctgtgtcctcacccaaatttcatcttgaattgtagctcccataatccctatgtgtcatgggagggacccagtgggaggtaattgagtcataggggtgggtttttcccctgctgttctcatgatagtgaataagtctcacaagacctgatggttttataaagggcagttccactgcacacgctctcttgcctgccaccatgtaagacatgactttgctccttcttcgccttctgccatgattgtgaggcctccccagccacgtggaactgtgagtctattaaacctctttttctttataaattaccctgtctcaggtatgtctttattagcagcatgaaaacggactaacacagaagctaaggctcagacaacttacagaacttattcaagtcattagttcacagtaa

SEQ ID NO: 37326 - DNA, 2300 bp, Homo sapien
gggttatgaaattgttctggtgggaaaagcttgaagtctctagtcttcttgctttcatggtgctgggtgcccaggatgactatttgcataggatttgccagatgagcatgtggaaaggcctgtcttcacaggtgtgcccctaactttgcaccttcctatcaagggatgcattgttgaacggctgcagagagagctgtacccagccttcacatttaaaagaatatggaaaactcattacttatgacattgcctgagttcaaatcctggcttttccacatactagtgtgtgctcttagccaagttatttcttccattgtttattaaaatataactgctgtttttaaatgaagtcatatatacacatggtcaaaaactctgacaacaggatctggcgaatctttctcagaaattttctaggaatgtgtcacatatttcctttttttttttttttttacataaatgtaccatacataatgttctttttatctttcttaacacctcttagaatattatcattttcttacgggcttcctagtatttttgtttgaatggatgtatcttatttactgaaacagtcctgttaacaaacacataggttgctttctggttggagttattacagaacaatctttgatgaacatctttgaacacttgtacaagtgtttgacaggataaattcccaggagggctgctgggtccaaggctacggtcattttcgatttgaataagtattaccaaatgggcaagttatttaagtgatccctgagtcgctcttctttgtaaacagtggacaataatgagtttctcaaatgtttcttataaggattaaatgagatggggatgtggaagcctagtatacagcaagcaggccgtcaatgaatgttggcctcccaatatttttttttacggagaaagacaactatttatgcatattatgatgactatagcttaaccatgagctcaacaaacacaaaaattcacagaaaattctgcaataccgtatctattttaaaccccattattgaatataactagtgaaatctcaggtcaaatagaatgtatttaagaagacacaaacttgacattaaacaccagagatttacatttgatagttgtctcttcttacaaatatatccctcataataataaaaaagcactccactagtatgccaattaagacacatcttccagtcgtgttttgtccttgagtgaaaaatcttgctgctcaattcaagtcattcgtttattcataacacccatatatatatctccaactctggaaagaaacactgacagaaagatggaaaattttagagacctcgtttccacttcagagagcctgttgtcccccaaacctctcgggccctccggtatttttaagcttatcaagattccagaatgaggttaacggggcgtcacagaacgaaaccccccaccgtcccgtcccaggggcttcaagccaggaccccggcctgagggagcctccgggcaggaggaagaggcccaggaagccatcgctccgctccttcccagctgtttatgtggtactcagggtactcggccaagggcacggcgaccccgcaacaccccaggcgtggggcaaagacagcggggttgcggggctcctgtctgcccggggcgtcgagagttcctgccgccccctcccgcctcatgcacggaaagcgccgagccacggcgtgcggcgccggccgagcgtgaaccggagtcggggttcggctaccccgagcggctctgtgggccgcggatcgcttcccctggggcggccacgcagggttgcgggccatggcctggggcgcccgtccggaccccgccgctgcgcgggacgccgctcccagcctcgaccaagggcgcccgggggcggcggcggcggcggcggcggtgactgcccggggcggcggcgcggcgcgggggcggccaggaggcgaggaggccgggccgcggccgagggcccagggcgcgcttccggcgggcgtcgcgcgcgccgcggtaaatgggaggctcggccgacaggggcgggggccgcgcagccggggactttcaggaactgcaggagcgtgcggcgcgggagtagccgagcgcccagcggctgggcctgagcgtcgagactcggggccgaggcggaggagcggccgccgcgccggggcccagccggagccgccgccctcgcccttgcctttgcctgcgcggctcagaatcaccatccgcggcgcgggagacgagccggccgtcccgggccgggggacccgcccgccatggccaccaaggtgaggggcgcgcgg

SEQ ID NO: 37327 - DNA, 2300 bp, Homo sapien
gaatgaaaagcttaatgttaattgctttttttatgtataacaattcctccacacaaaatttctccaggaaatctcaactgtaatctttttcttttttttttttttttggtgacttattaggatgtaggtggaggatggctggaaggaagaaacatcaaaggagaacgagggctggttcccacagactacgttgaagtaagagcttcctgtcattcattcattagagctcatctttgccaggcatctttttatgaattatcaacttacaagaagtcagcaactttttgcaaaacaaaatttccattgtaaatataataaatgttaactatataaaatatggaaactacattgaaatagaactaagaaaaatattacctgtagacccaagcttcaaagaatgactacagatatttaggttaagtttcttccagggatagcaacttttaattggtctgaataaaagttagtatttttcctttgctaatattatctatattataaatatatattataaattgtataaattcaataagatatatgaaattatatctcaatatatctgttaatatatacattttaaatatatatttatatttttataagcaaaatatataaattttataaaatgtattataaattatataaattataaatatagatatatatttataatatgacacatataacgtatttttcctttgctgatattgctgccatctataatattgtttattgtacaatagactcacagtttaaatagatttttttaagtgcatatctcagttccttctcccattcccatagacagaggggtgtcttgggggagctgctgtggggatctcctgggtagagctgttaggatggatacccaggagagcaacacagcagcctgggctggtcctgcctgggacacccccaagctgagccaaccacctggcgccccctgctggttgtctttcggtccctccaaaccgagcgaaggttcttggtaagcttgtctttcatgttgggtgacagaaagaagcgaaggtttcctgatgccctgtgagtacaactggagctagatcaagaataaaggtacctttggttcacctccaggagaaaagaattccccccagaggatgtttacctgggacctgtctgcagagtgagatctaaggccgtccttctgttgttgatagacagtgagggtggggagtcatgacccctcagagaatccgatgcaatctctaggctttccctcagaaacgtgtgcccatgcacacaccacagccttttccatacaactgcaaccccctattcacaggcccctggcctcactccgtaggtcttatgttgaagtcttgttttacttgtatgcactttgcatccaggagcccacaaattgacaagattgagaaaaatctgagaatttaagttgatattggcagtaattggattttctaggattctgcttatataaaggaatagtgattacagatattcttgggtttgcttacctttaagaatataaaaccccctctattagaaatagatcctgcaggcagaaaatcagtaaggacgtggttgaactcagcaccatcaataaattgatgtccacttagggacatctatagactgcttcatcaaaccacagcagcatacacattcttttcaagcttacatggaacattctctaagacagaccacatattctgagccataaaacatacctcaacatgtttgaaagaaatcatacagtgtctgccctgagaccacaatggaatcacactagaaatcaaaacagaaagatagatggaaaatctgtaaatacttagagattgaacaatccacttctaaataatgcatggatcaaagaagaaatctcgagaaattaaaaaatagtttgaactaaataaaaatgaaaatacaacccattaaaatatgagtatgcggcaaaagcagtgcttacagagaaatttgtagcattgaagaatataaaccctttttgacaattcttgcttgccctcgaagactccctgaagtgaccgtaatctatgaaaataattgcggctctttctcctattcagattttacccagtgatggaaaagatcaattttcttgtggaaattcagtggctgaccaagccttccttgattctctctcagccagcacagctcaggccagttcgtcggctgccagcaacaatcaccaggtacgtctcacttcctccttctggatgtggctggctttacggaaaacagagcgtatttgtgaaggcttgtgatgcattatagctattgccattccccaaaagcaa

SEQ ID NO: 37328 - DNA, 2300 bp, Homo sapien
actaggaaaccagtgaactgagtcaggtctaaccatgtcatccaaacaagcgcttgccctgcttactgcatttttttgttgtcagaagtaggggtttatttcttactggtcccagttccccaaggatgtcatatgaggagcaagaatacaacataaaaaaaaaataacaaaaccagaaactactatttttgtggtcagcagttgctaattagcattattactgtctttaaaaacaattagtaaagtaaccttttattttattgttacagaagcagtacatatgcattgtagaaaattcagactagaaaaagaaaagtatcccatttccacaatcactactctttacactaggtgtcttattttctctctgtgaacgtgggtatacacacaaacatacagatataaattgtatataaatggtaatggtttaccaccagttggtaatccttgccagaatcagaaatgttattccttccacgcttagctggtttcatctagaaagcagcactttcctgtatcagctggagctagttaattatgtcgaattccaatttggaattcaggatagatggctaattccacctctccttaattgccatgtttcaaagtaagaagttattttatagctactacaaatagtgaccaatgaagaaagcattcctgtctttttttctgacagtagcatggatgtatggatttacattgatttcataatgtgttttgttttttttttctttgtgcttaaagttatcaccttttggaagcccattcaagctgagtcttctacctcattaatatttgaaacctctcttgctcttaaatagtgctaagtctttcatctctgtcagtactgtatcagcttaatctttctcttcattatgggtcatattttccttgcttcttttcatgtctgataaattatgagtggatgtcagacattgcaattttcaccttgctatatgctggatatttttgcattcccataaacatttttgagccttgttctgggatgcacctaagttactttgaaataatctgattatttcaggttttatttttaagcccagagcaacatttagcttagggatatttttgcccctttcctgaaacaaatcctttgtagtattgtacccgatgccccgtgaatcatgaagttttccatctaggctggtgggaatagccctgtgtgaggggttgcactcttgattcactcttgattcttccgtgtgtgtctttccctgaccttgggtagacccctcacgtgatgggctgatcagtgcagatctgcagtgtcctctgcagtctccagagctctctctctgcgtctctgtcttccccagactctgtatcctcccaccacagagaccgccgagctttgtgtgggttttccatgcctgctccgtgtcctggagagtctctccacgcagtgaatgggcacttgtgggcttactctgtctgtctcccgtatctcaggatcacttcttcactgtctggtgtccagtgatttgaacacggtttcctatatttcatcatattttttgttttcattgggagcataaactgggtccctgttactccatctttgttgtctgctttgcgtattaactgattttcaactccaagtttattttcatctctcaggtgagaataataccaccgcttatttcacaggagagttgcgcctgaaaaggatgctgtcgtccactatataaatgtttgtagtactgacttccctacaggacagttgtggaaccgggatttgaagcctggaagctgggctccagaatggtcctcttaacacatctgctgcagtttacccatcaattggcttcttggaagcgcatcagtcagttacctcttctcacaagatgctgtattgtaggccagttagaccctaagagcacacaccgggagacattgtgttcacagaccagctgggctgttgtgtcattcacagctgcgattggtaggactcactgtggctctgtggttagcttcaagttgaccaggtggctttgctgattttgtctggactctctcacatacatgtctaatgcctctgaaagcaaaaggttcagaatattaacattttttttaacttggctatttctgttttttcctctggagtttgtttctctggctgtatgacttgcatgatacttaatccattctttctgtgctgcttatagttatttttagggtttcattaatactgtatcatgatgccaaacaacagactttagaaaatataatgcattgaagataacccattgctacacagttggggctttttgcatgta

SEQ ID NO: 37329 - DNA, 2300 bp, Homo sapien
tctatcttcaaattcactaggtgttttttttcttctgctaccttaaatcttatgttgagccttatctgcagtgaattttttatttcaattactatactttcaactccagaatttccatgtgattcttttttggtaacttctctctcctttttgaaactctgtgtgttgattctctgtcatatttttctttaattttttaggcttcctttagttctttgaaaatccttatagaatctgctttatctgccacattgtttttttctgccaaattcaacatctgcggacactcagagatagtgtctattgactgtttgtttttttctcagtatggttcatatcttgctatttctttgcgtatctcttaattttttgttgaaaactggacatttttgagaatatattttagcaactccagattctgagtttacctctctgaaggttgttgtttctgctttttatttgttaagtaacttgcctaagattaaatctctgaagtctgtctccctggaagttcagttattgctgtttgtttgtttgtttgtttgtttgttttatatttgtcttcctagagtttgctcctgtgtctgtggattggtagtaagcctttgattgactgacagaggttgtacccaaccacctcaggccagtaagttggggctcctgtcctctgtcaatgtaactgtaactcgatgtaactcattcaaagctcaggtcatttttaagttgccctggcttttactttctaccagacccttttgtgtctcctttacttgtatgtacagcctcagagttgaccaggattgtgtgcctggcttggaccctctctggtctccaatgtgtatgcatacagcctcagcctggaatatgcatggttcaaccttggctatcagggctgttgtcccttcctgttcatctgtctctgagattgtcactgccactgacaccaccattgaacatggcatctcccatcactccaagcgagccttctaccctcacggagaagctgcagctgcccatcttcacagcctgtccaccctagtggtaccaccatgtcgaacacgtggggtgggtggcacacaggcagcagatgcgggggagacaggagcagcctcccaccaccacagatttccaccatcgtcgcctgaagttcagttcttcaagcataaacacttctcaggtggccattcgccttttgttgatttctagagcactcatttggttgtttttattactgttgtctagctttatagttgcttttgaggggtagggttagctgatctctccaggccatagctggaacttctaccactagaaggctttcaactaatagtagtttttgtttgtaggtttataaacattcttagtgttcacttgatgtttgttatgctattcttgtcaagctgactttctacttttaaaacagaaaggaccactcattaaactgttttagtagagtcacaagttccagaatagcaacttccattattgcattagtggaaaaattcctttggtatttcagtttaagtaatttaaaatacctggaggaaaaaagctatagccttgggttactcttcataatgctaaatttaaacttgtatagatgtaatttatattgcatttggacacattttgataatatggaaataccatgtcgtttgtaagaatgacattaaattccactcatcactcctttcttgcttataggacttcatgtggccacacagaaactggcctgttagcttataggaaagagacaggttttcatgttgagataagatttaatttttttttagtactttaaggatacttgaagaaagtagcaccttgaggttgtcattattcttgtcacaatatgtgaatatgttaaattggaattatgttcttaaaaactgaagtctgttgcatcttacctgtgggcctttgagcattcgttgtgttgcttgttttttagattagttaaaaatctccatggtttaccttttgctaaatagctttctacccaatagccagtagacatagaaatggtttttcagttacagtatggtaacagtcattcattttagacaaagttgtatgtcattcttggtgtgtcgcttgcaggccgctttgaagaggaatttatcaaaatgcgcatggagagacttcaggcctggatgaccaggatgtgtcgccatccagtaatctcagaaagtgaagttttccagcagttcctaaatttccgagatgagaaggtaggacattgtgttaatatggcatcagagaatattgagagttgtctcattcacaccaaacttatttct

SEQ ID NO: 37330 - DNA, 2300 bp, Homo sapien
aacacaagatgaacagaatggggggcagacgggatagcagagaccctcgaggactggccagacctgcacatggtggaaggcaaatagcaaagagcagagcaggagagctcactccccagcacagagaggcacctgtctctagaggggagaaaggaagtcccctgaaaaggaggtggcaggatcttcagagggagggagaggaggttgggaggacaggtatggaggcagaagggagcaggcagtgggacagggctgtgggcaagctggaggaggaggcgccatcctcccaagaactggcccttggtgagctccccatgaggacacgagggtgggaatgggagttagcgagagtgggaaaggcccaggacgctggccacggtgcacacaatctagaagtcatagtcaagatcctctgggcctaaacccagggtggactgaagtactggaggtagccttggctgaccggctctctggttcctctgcaaaacgaggagaaagcctcaagcctgccagttctaactgaaaatcatatccaggctcggagcacggttcactggctcactgtttcaggtttggttccctgtggcagggactctgagcaggggatgtgcctgcggggtctgtgctggggagaaagatggacggggagggggaggatgaggagtcgagttgcctgagtgcatccggcggtcctggcttctgaagaggggcgacctgggcagggcaccccagccgggagcaacactcgcagcactgggggaatagatgctccctccaggacctacagtttgaggtcagggcagacacccactgtccccacctggtctggcatctttagcttggatctagtcacccttcttctccccaacctcgctggcagccagagtggccctgctgacaccgtcaatctgcacagctcactctgtggaggctgaagtccaggcgctctgtggtctggccggtctcccgtcccatatgtggctgctctctgccttgtccagccaggctcgccgtggtcctcatgctggtgcaccaggtgagcccccacacagggcttctgcatgtggaaggcagctgccccagaggcccgacgctacttctcttacctccttcacaaccatcaaaaaacagcttcttagtgaggccttcccgagcctctctatctaaacttcctccccccatccactccgttatgagctgaattttgccccccaaatccatgtgttgaactcctaacccccagtacctcagaatgggactgcatttagaggtgtgatctttaaatagatggttaagtcaaaaggaggtctttggggtaggctctaatctatcaggactggaaatttttgccaggtgcggtggttcacgcctgtaatccagcactttgaaaggccaaggcaggaggatcacttgaggccaggagtttgagaccagcttggacaacatggtgaggctccgtctctacaaaaaattaaaagaaagataggcaggcatggtggcatgcatctgtagccccagctactcaggaggctgaggtaggcggatcatgtgagcccaggagtttgacattacagtgagctatggtcacaccactggactccagcctgggtgacagagcgagaccctgtctcttaaaacaaaaaacaaaggccgggcgcagtggttcacgcctgtaatcctagcactttgggaggccgaggagggtggatcgcttgagcctgcgagctcaagactaacctgggcaacatagtgaaactccatctctacacaaaatacaaaaaaagtagctggggcagtggtgcacacctgtagtcccagctacttgggaggctgaggtaggaggaccacttgagcccaggagtatgaggttgctctgagctgagatcatgccactgcactccgccctggctgacagagcaagaccctgtctcaaaacaaaacaaacaaacaaacaaaaatctaaaaataaaacataaaaagatgaaatttggacgcagacatgtgcccacagagggaagcccatgtgaggacagagggagaagaaagccatattgcacaagccaaggagagaggcctcagaagaaagcaaccctgccagcaccttgatcttggacttccagcttccagaactgagaaaataaatgtctgctctttcagccacccagttgttggtactttgttctggcagcctgagcagacaaattcacccccaacttttcatgtctttccctgtttgatttctctccttagtgcttattagtctctattataataaatctttgactggtttaccctgttgt

SEQ ID NO: 37331 - DNA, 2300 bp, Homo sapien
ccttgaaggcctcaaggtcagttgctccatctgcgaaaggtgcctgtgcctgggtacccttggtctatcaagccagtgcgcatgtgaggaagctgctccctctgccacccaggtgggctgtcccacctgaaaccagacagcagaggccccaaaacccagcaggctcttggctcacccagccatttctcagagacggaggaacagccactgtagttccttgagtctgagacgtgcattttaacattgtctaaatcagggcagagatgactattggtggcatgttctagtttaattggaagtttttttttttttctcagtggtacataaaatagtggttcattttacagttgatggtgacttggattctataagctgtgaggctcaactgctggtcctgactgcaggaaaatttctaaaataggtatggcatgccactgtgcaggactttagactatatgatgctagttaggaaagaggagagagagataaatggaagactgggtcccctccctaaggccttaccactcaatttgcaaaacagggctaagagaaaacataaaaacacttctcaagcaacatatgagtaggtgagaactgaagtctgtaaatctgggtgttatataagcactattatctgggacctcagcattccaggaaagcttcctggaagaagtgagtttcaggtcaaaaagtgggccaaaggctgatctgcctcactgaatgggcacactgttttcatgaggtagtaatgtttccatctacacagaaagaagctgctcggacagctgatgagcatcatgcctgggatattgagcacatcatgcttgacctgggcagagtttgtgggcaaggaaaggggctaagggtcaagataatctctgctggggttgttcaaatttattacccaaccatcacctgagaggttgtcccctgaggatggcttgtctggtcattactgaatgtctgcaggggcatggcagtgttctgcttggctctgggggctctgccctttctaggacaagtcccagagacaaacagcttggcccagtacagcagaatggggtgagagaggaactgagttcgtttgcgggcaggatggaaacagctgatggaggcttctcgggccatcctcacgtacccatcacaagcgaagggaattaagccgccaaaccaccccaaagagtgactccaactcagccctaaacacccatacccaccccacctcccctgcagctctgacaggccaagcctgggcgctagaaccccgcgccagaaggccgggccacacactccagcgtacacgcgcggacacgtgccggtgtccagagccggtgggagaggcgctgtcaccatctgacaggagaggaaggtggagcgcagagaagtcagggtcacgtggtaagtgggggtcgtggtctggggatcacggctccaggtctcttcgcgacaacgcaccgttgacccccaacacctctccctggcggggtcggtgaccgcaacagcctccgggatagaacgctagtgaaaggtaacctttctccagcccgctccacgcgctccgcacccgctaagcgcctccgcgaattaactcaggcctccgcgccgaagtaggcgcagttatgaccccgcttccccgcagggagaccgaggcacgcagggtcgaaaggactcgtccagggtcgcaggagccgaccacacagggaggcgcagcgcccccggcgggaacagtcagcgggtccagcctggcggactcccgggccgggctgcccatataaggctgcgggcggccggcatcgcagccaggctcccggggtcgccccgcgcggggcatcctcctccgcagcgaggaatgcgtggcatccgggaggctcttccgctccacgcccgcctgcggggagcctcagccccggggcgcggcctcgcgcagctgcctggccgctggggggagcgcggggccgggcgggaggcggcggcgcgccctcacctgccccaggctggggaggcgcgagtggggaggaggaggaaggggaggaggccggggaggagcctggcgcggcgggagcggcggcgcaaagtgaaactctggcaagttgcgggcgcgcggggagctgtcgcgggcagcgcgccctcgggaggacgtggccccggcccccgcccgcagtgggcccgaccctcatggccctgagcaaagggctgcggctgctggggcgcctgggggccgagggggactgtagcgtgctgctggaggcgcgcggccgcgacgactgcctgctgttcgaggccggcacggtggccacgct

SEQ ID NO: 37332 - DNA, 2300 bp, Homo sapien
agcaggctccccagcagtcccactagagatacaccaggttccagagaaggaaaggagtgctgtggttactattgccaagcagatcagacagagggacggggattgttttatttaaaaaaaaaaaaaaaaaaagctttaagtcagggaaactagaggttccaggttgcccattgtggtcaacagagaaggaagtggacagcctgcctggcctctcgctgacagaggccatgtcctcctagctggaccctggggaggtgggcctctcactttctgcagcagctggagccatgactgggcttggtggctcaggagcctgggtgtcagaggtcgtgactggacagattcagtcaatggctacaaggttatattaaattctgacctcccctgttcaaagggaacagaatggacggagggcccctctgggctcactgctgcatttaagccaggcatttctgaagcagattccactggggcagttcccagcagcaatggtagccacctggagttggactcaggcagtggacagcatgactcgggagagggcactggggagccccatgaactcgtaatgcgggacttggcggttctgacttctgtcatctcttgccttgctccccagatgacagcagcccagctgacatatttgctgtggggtttgaagagatggtggaattgagcgcagggaatattgtcaatgccaggtaaggggccaggtgtgcggggccaggcagggacttcctgagtcaggtgcctggctgggagcagagcctctgaggctctccgggagccagcctgcttctgagccagctaagctgtggccctggctgtgtggggatctctcacctggctccttctctatgctcacacatgcaccaccccgttctttccctgccacttaggaagtaaaaggaagggctgatgattgctgtgttttctttgcagtgctctggcctcggccacttgttgaggctaatttatgctgccagagggagctggcatgtgtggacctggggtgcaggggaagggcggggctgggactgggagagtagttgactcatgtttcctggggagaggtgagaaagtgtgagtgccgggaagaggtactttcttcctgcacaccagggcaaaggaaaaaatcaaaaccactggatttttatttgatatgaagtcaactgggcgctccccccaccccctgctgaactggcctggctttattttaaggaactttctgaacaaataaataagactgactctgtggggctgctatgagaaggtcctgggttgggtttcaggggtcaagggagggctgctgtgatgtgtgaggcatagccaaaaacacgcagatcctccagtagaagaaggaaagcatgacactaatattggggtgcgggcagcgtgaaatcagttctgcaaacagaataggcttgggctggagcatttggtaggtgggagatagatgtacttccagctacctgtaaacagcatcctttccttttctcttccagtactaccaacaagaagatgtggggtgaacagcttcagaaagccatctcacgctctcatagatacattctgttgacttcggcacagctggtgggcgtctgtctttatatctttgtacgtccataccatgtcccgttcatcaggtaagaacattctgtttacacacatctggggaacaaggggttgttagtctttgtgttttgttctttgacttccccctcctcccccatccccttctgtaacaggaatcgggacttaccattattttagataaatgtagcaaaaccccctaggaaaaactgggctgaatagaatattgtctagcgattaaaaagccaccatgggaaatgtctaactcaggaagctgaactcttagaaagggtgttacatgattgtcatcgcccaagctcaattccgtgcaaggaaaagggttccttgttggaatcttatagacaggaaacctctgaccaagagctgagtaactcactgggaaatgccaactcttttgtccctttttaaaagaattctaagtagaacgtgtgggcctctacaactgtgacctcattgtcatttctccaaggtgcatgctttgtgagcatcagaaagggggcgagcttaggggcggcattcctcttggggtgtgggtgtgggtgtttggatgctggaggaactcatcttttccccagcttgtggttggcctcatcttaccacctgggcctacccatggcttttgaatttccaccagcctttcggcgagctggcagcaggcgttgaactgacctccccactgagcccct

SEQ ID NO: 37333 - DNA, 2300 bp, Homo sapien
gagggccaggtgcggtggctcttgcctgtaatcccaacactttgggaggccgaggcgtgcggatcacctgaggtcaggagttcaagaccagcctggccaacttggtgaaaccccatctctactaaaaatccaaaaattacctgggtatggtggcaggcgcctgtaatcccagctactcaggagactgaggcaggagaatcgcttgaacctgggaggcggaagttgcagtgagccgagatcgcaccactgcactccagcttgggcaacgagcaaaactccgtctcaaaaaaaaaaaaagtgtgaggacagggcagataaggtctctcctgaagcaagatttggacgttcttcgaggtttactgtgtcttcccacttgagccccttccagtgtgtggagtgctaaagggttgccacatggacgagtgaccataccaacctcctaaagcaggttttcctgtcttcctactaccaacattctcacatcctctcagtgatgcccaagagaatgagggtgtgtttgtcccttggtcttcccatggaagcaaggccaatccaaagttaaacaaagaaaagaaggatgtgcatgggggctcacgactgtaaggcgggaggattgcctaagcccaggagtttgagaccagcctgggaaacatagggagactttgtctctacaaaaactaaaattagccaggcatgatggtgcgtgcctgtagtcccagctacttgggaggctgaggcaggaggatcacatgagccccagaggttgaagctgtagggagccgtgattgcaccactgtattccagcctgagcaaaagagcgagaccccagggggagagagagaggagagctgactttcactctgcgcttctatgtacttagctcatttagtcaacaaacatagatgaaggcctcggggttgtgggccagacatggcaccaggcatgggactgtaaagatgagcacccctgacccgtgcctcggaccctgcactgtctcctggggggcaacaagaagacagtggatagatcagacactggagtgggtggggagatagatacgagggcggtgtgtccctcagtgggatgagctgaggatcacttttttgctaattaaaagacacatatgtccagtttcagatagattttcaaatgtaatggagcttctgttactttttaagaatagggacttgccttttcagttttcgtttttgtatataacattcaggatcgaaaactacggtggcctgatgacttctttttctcccaatagatttttaaggactttcacgaaggagccattaactttggacccacctacaagtatgacgttggctcagccgcctacgatacaagcgacaaatgccgcacccccgcctggacagacagggtgctgtggtggaggaagaaacatccctttgataaaacaggtgagggggccgtgcccgttcgagagtcggcagagggtgaataagaaatgcgacggagggagagtcacgtttacccaaccccaggcgctgctacataaatcagtttcttcataaccccagatgacacaaaagtcatcccagaccttaacccctaagctttggaagttgtgctttcagggagcctctgcttctggcctctttttttcccttttcttttcttttttttttttgagacagagtttcactcttgttgcctaggctggagtgcaatggcgtgatcttggctcaccacaacctccacctcctgggttcaagccattctcctgcctcagcctcctgagtgctgggattacaggcatgcaccaccatgcccagctaattttgtatttttagtagagacggggtttctccatgttggtcaggctggtcttgaactcccaacctcaggtgatctgcccacctcggcctcccaaagtgctgggattacaggcataagccactgcgcctggcctcctctggtctctttctagagacagtgacctgcaaataggtctgctcctggctgcccctgcatcacagctcccccccacacccccacctcttttttctgggtggggaaagcggggagcatgaggttgcctccctccctgccccccatgctccccctcatgttctttatccagcctattttgttcagctacacttttacctgcttaaagccctaattccaaattggacacgagcaagacacagtaaaaataagttagtttttaaaaatcattagttgtcaagtatgttttgaacaactgttgatgcccagctaggaagtgaagtttatttaaagttagaatatctgtaactagtacataaaaa

SEQ ID NO: 37334 - DNA, 2300 bp, Homo sapien
gtcacgagccgccagccgccgggtggagggtcccggccgggagccgcggaaagagtagggctccccagacaacggggtccgacgagcagttgggcacgggctgagtccgcctgccggcaggtaggacgtgaaggcaggggtggtgtgggggcggacgggggcgtcggcgcagctgggcgcggtggggagcggagaatggggagggcagggaccgggcacggccgagcaccgccgtctggcgcgcggaccggaccgaccagctgacgctcggctgggcgtgagggcctctctctctggtggtcgcgagcctgactcgtctttccctgtcgctgcctttctctggctgctgtcgaggccttggggagtgcacctgccggtccgtcttcccgggctcggtagtcacggagagatgaggaggaggaggaaagggcctcaccagtcacttctgagccttgcagaccaccgcttcctgctccctctctaaccccagagatggaatagattgaatgctgagagagctctaaactcggcaacggtcattttaaagtgaaagaccccagaaggttctaaagttactccctttccccaagtctgttctgtaagtctaaaggaacactgtcattatttttactagttgagatatgagattcttgttttctgttccttaggttaaattgtacttcccgcattaagctcatgctgccttttttttttttttttttgagatggagtctcggtctgtctgccaggctggagtgcagtggcgcgatctgggctcactgcaacctccgtctcctgggttcaagcaattatcctgcctcattctccctagtaactgggattacaggcgtgcgctaccacgcccggctgattttcgtatttttagtagacacggggtttgtccatgttggccaggctggtctggaattcctgacatcaggtgatcccccgcctcggcctcccagagtgctgcgattacaggtgtgagccaccgcgcccgacctcatgctgcctttttttttttttttttttttttaacatcgtgtgtgttcatgtgatcgctaaggaacccagctcttccatttagttccctctttctatccctcaaatcttttccaactggtgatttccatattgttgcactctctttaaaataaaaaaattgcctccaagtcttcttcttcccaagtatcttttatttgctttttttcatcttgcatacattctcttccttgatctcatcagttccatttttgtgcacttgatgtgtgtcagctattattctagacgcttgggatacaatggtgaacaggtaactaattttggtgggggcagagagactctgaaatcagttaaggaataagtaccatttggtgatgtgataaagagtgactagaggggttattttggccagggggatgtcagaaatggccttaatttctgcatttaaaaacttctgtataccagtaacaattaactaggagttttaataataaaaagacactattcataatggcattcaaaactaaaggtacctagaaatagatgaacctaaagctgtgtagtcctttagacagaaaattgtaaggctctgttggaacacaaaagatgacccaagtaaatggtgagatataccgtattaatagatggaaagactcaacaaaaagatgtcagttttcctcagttctacgaattcagtgtaatgccaattaaaatcaccatattgttttatggaatttgccatgctgaacttaaaatttatatggaaaggcaagggaccaagaatagtgaagtcaattttgaagaagaagaaaaataaggtctctccctatcagataccaaagcttaatataaagttgtaattattaagatggtatgatattgattcagggatagagaattagattcatggaacagaatagagacactagaaacatacctatttacatacgggagtttagtataccactaagtggtattgcaaagcagggggaaagcatagactattcaataaaggatgatgaaatatatggttgctgagatatctggcattgttatggtatacagacaggattagattcttactttcaaactattgacaacagtttccagataaagacctaaatgtgaatggcacagctgcaaggtatttggaaaggaatataagagaccattgtctctaggaaagatttcttttttgtttgctttgttaaatcttgttacacataagatttatcatgttaaccatgttgagttgttgagttcagtgacattcacattgtgcaaccagcactactatc

SEQ ID NO: 37335 - DNA, 2300 bp, Homo sapien
aatagtctatgctttccccctgctttgcaataccacttagtggtatactaaactcccgtatgtaaataggtatgtttctagtgtctctattctgttccatgaatctaattctctatccctgaatcaatatcataccatcttaataattacaactttatattaagctttggtatctgatagggagagaccttatttttcttcttcttcaaaattgacttcactattcttggtcccttgcctttccatataaattttaagttcagcatggcaaattccataaaacaatatggtgattttaattggcattacactgaattcgtagaactgaggaaaactgacatctttttgttgagtctttccatctattaatacggtatatctcaccatttacttgggtcatcttttgtgttccaacagagccttacaattttctgtctaaaggactacacagctttaggttcatctatttctaggtacctttagttttgaatgccattatgaatagtgtctttttattattaaaactcctagttaattgttactggtatacagaagtttttaaatgcagaaattaaggccatttctgacatccccctggccaaaataacccctctagtcactctttatcacatcaccaaatggtacttattccttaactgatttcagagtctctctgcccccaccaaaattagttacctgttcaccattgtatcccaagcgtctagaataatagctgacacacatcaagtgcacaaaaatggaactgatgagatcaaggaagagaatgtatgcaagatgaaaaaaagcaaataaaagatacttgggaagaagaagacttggaggcaatttttttattttaaagagagtgcaacaatatggaaatcaccagttggaaaagatttgagggatagaaagagggaactaaatggaagagctgggttccttagcgatcacatgaacacacacgatgttaaaaaaaaaaaaaaaaaaaaaaaggcagcatgaggtcgggcgcggtggctcacacctgtaatcgcagcactctgggaggccgaggcgggggatcacctgatgtcaggaattccagaccagcctggccaacatggacaaaccccgtgtctactaaaaatacgaaaatcagccgggcgtggtagcgcacgcctgtaatcccagttactagggagaatgaggcaggataattgcttgaacccaggagacggaggttgcagtgagcccagatcgcgccactgcactccagcctggcagacagaccgagactccatctcaaaaaaaaaaaaaaaaaaggcagcatgagcttaatgcgggaagtacaatttaacctaaggaacagaaaacaagaatctcatatctcaactagtaaaaataatgacagtgttcctttagacttacagaacagacttggggaaagggagtaactttagaaccttctggggtctttcactttaaaatgaccgttgccgagtttagagctctctcagcattcaatctattccatctctggggttagagagggagcaggaagcggtggtctgcaaggctcagaagtgactggtgaggccctttcctcctcctcctcatctctccgtgactaccgagcccgggaagacggaccggcaggtgcactccccaaggcctcgacagcagccagagaaaggcagcgacagggaaagacgagtcaggctcgcgaccaccagagagagaggccctcacgcccagccgagcgtcagctggtcggtccggtccgcgcgccagacggcggtgctcggccgtgcccggtccctgccctccccattctccgctccccaccgcgcccagctgcgccgacgcccccgtccgcccccacaccacccctgccttcacgtcctacctgccggcaggcggactcagcccgtgcccaactgctcgtcggaccccgttgtctggggagccctactctttccgcggctcccggccgggaccctccacccggcggctggcggctcgtgaccccgccccctcggcccgctctgggcccgcctcccgccggctggctccacccacaatagcgtccctagcgcgatggcgtatcggcgcaggcgcactctgccggcaacgccgaggcgcttctgcatctgtgggccgaggtgtgtggcgagcgtccgagcggctggggaaagtggggtgtgggaacactgaggggtcccaaagaaaggggagaggaagagaaaagccccagaagcctgtccaccgggtgctgggggcacagggcggtgtcccccactctctccgggcccttcctg

SEQ ID NO: 37336 - DNA, 2300 bp, Homo sapien
atttaacagttaagtctatgaaagacagttaacattaagaaaaaagacattctgattttttaacaaaattaaaatgagtctacttggaatattaatgccacatcttactcgccagccaattctacccaaggtcaattagccctaatagaagcaagaggcctaactctacaccagtgtgcccaacccaggtataaaccgtccattattcaaaggatttcttttcccattcaggagaatgacaaagggtaagatcctgggagacaggaatcaaagaagatagttctgaaaggtgcttcaaaaattatacagtgagcccaaccacctccttttagtttatattttattttactgagacagggtctggctctgccgcccaggctgtagtgcagtggcgcgatctctgctccctgcaacctcttgcctcctgggttcaagcgatcctcccacctcagcctcccgagtagctgggactacaggcatgcactactaagcccagctaatgtactgtgttgtatcgtgtgtgtgtgtgtgtatatatatacacacttttatatataatatataatatacaatatataatatataatatacaatatattatatataatatacaatatattatataatatataatatacaatatattatataatatataatatacaatatattatataatatatattatatattatataatatacaatatattatatgtaatatacaatatatgtaatatacaatatattatatgtaatatacaatatatgtaatatacaatatattatatataatatacaatatattatatataatatacagtatattatatataatatactgtatattatatataatatacaatatattatataatatacaatatattatatataatatacaatataatatatataatatataatatatataatatacaatatattatatataatatataatatacaatataatattatatataatatataatatacatattatatatatgtattatatataatatacgtattatatataatatacataatatacatattatatattatatataaaataaatatatattatatataaaatacatatataatatatatatatgtatatatacacttcgagacagagtctcactctgtcgcccaggctggagcgcagtgtcgtgatgtcggctcactgcaacctctgcctcccgggctcaagcgattctcctgcctcagcctcccaagcagcggggactacaggcgcccgccaccacgccaggccaaattttgtatttttagtagaggcagggtttcaccatgttggccaggctggtctcgaactcctgatctcaaatgatccacctacctcggcctcccaaagtgctgggacaacaggtgtgagccaccgcgccaggccaatttattgtatttttagtggagacggggtttcaccatgttggccaggctggtctcgaactcctggcctcaagtgatttgcccgcctcggcctcccaatgtgctgggattgcaggcgtgagccaccgcgcccggcctcagccacctcattttacatatgaggagaccaaaggaagagattaagccgtagttcctggccaaaggaaaaaagtacaagccagatctccagatcttgtgccccttcactaaataaatcacgtcccgtgcggacctaggctggaaacaaaccactcagcgtacgcccatttaattaacttccacttacacctgggcgcagggcgagccctagccccacaggaaacccacgattaaacgagggggggactgccgtgcggccccgccaggaagggcccggagagagtgggggacaccgccctgtgcccccagcacccggtggacaggcttctggggcttttctcttcctctcccctttctttgggacccctcagtgttcccacaccccactttccccagccgctcggacgctcgccacacacctcggcccacagatgcagaagcgcctcggcgttgccggcagagtgcgcctgcgccgatacgccatcgcgctagggacgctattgtgggtggagccagccggcgggaggcgggcccagagcgggccgagggggcggggtcacgagccgccagccgccgggtggagggtcccggccgggagccgcggaaagagtagggctccccagacaacggggtccgacgagcagttgggcacgggctgagtccgcctgccggcaggtaggacgtgaaggcaggggtggtgtgggggcggacgggggcgtcggcgcagctgggcgcggtggggag

SEQ ID NO: 37337 - DNA, 2300 bp, Homo sapien
gaggcgcttctgcatctgtgggccgaggtgtgtggcgagcgtccgagcggctggggaaagtggggtgtgggaacactgaggggtcccaaagaaaggggagaggaagagaaaagccccagaagcctgtccaccgggtgctgggggcacagggcggtgtcccccactctctccgggcccttcctggcggggccgcacggcagtccccccctcgtttaatcgtgggtttcctgtggggctagggctcgccctgcgcccaggtgtaagtggaagttaattaaatgggcgtacgctgagtggtttgtttccagcctaggtccgcacgggacgtgatttatttagtgaaggggcacaagatctggagatctggcttgtacttttttcctttggccaggaactacggcttaatctcttcctttggtctcctcatatgtaaaatgaggtggctgaggccgggcgcggtggctcacgcctgcaatcccagcacattgggaggccgaggcgggcaaatcacttgaggccaggagttcgagaccagcctggccaacatggtgaaaccccgtctccactaaaaatacaataaattggcctggcgcggtggctcacacctgttgtcccagcactttgggaggccgaggtaggtggatcatttgagatcaggagttcgagaccagcctggccaacatggtgaaaccctgcctctactaaaaatacaaaatttggcctggcgtggtggcgggcgcctgtagtccccgctgcttgggaggctgaggcaggagaatcgcttgagcccgggaggcagaggttgcagtgagccgacatcacgacactgcgctccagcctgggcgacagagtgagactctgtctcgaagtgtatatatacatatatatatattatatatgtattttatatataatatatatttattttatatataatatataatatgtatattatgtatattatatataatacgtatattatatataatacatatatataatatgtatattatatattatatataatattatattgtatattatatattatatataatatattgtatattatatatattatatattatatatattatattgtatattatatataatatattgtatattatataatatattgtatattatatataatatacagtatattatatataatatactgtatattatatataatatattgtatattatatataatatattgtatattacatatattgtatattacatataatatattgtatattacatatattgtatattacatataatatattgtatattatataatatataatatatattatataatatattgtatattatatattatataatatattgtatattatatattatataatatattgtatattatatataatatattgtatattatatattatatattgtatattatatattatatataaaagtgtgtatatatatacacacacacacacacgatacaacacagtacattagctgggcttagtagtgcatgcctgtagtcccagctactcgggaggctgaggtgggaggatcgcttgaacccaggaggcaagaggttgcagggagcagagatcgcgccactgcactacagcctgggcggcagagccagaccctgtctcagtaaaataaaatataaactaaaaggaggtggttgggctcactgtataatttttgaagcacctttcagaactatcttctttgattcctgtctcccaggatcttaccctttgtcattctcctgaatgggaaaagaaatcctttgaataatggacggtttatacctgggttgggcacactggtgtagagttaggcctcttgcttctattagggctaattgaccttgggtagaattggctggcgagtaagatgtggcattaatattccaagtagactcattttaattttgttaaaaaatcagaatgtcttttttcttaatgttaactgtctttcatagacttaactgttaaatattgacatttaattattttgcctcgtttcagaggcagatccccaaagtatatgaaagttaatgatttttaatttaatgttaccttactctttttattagcattcttcaggtcatctgaaccttctgagaaaacatggtcaacgtcttgaaaggagtgcttatagaatggttagtagttttgatactgcatgagttttaagtttaaatattgaatcttgacttgtatgtatgtcttttctaaaaccctgttgtttttaagatatggatgaaatcaagtctttcgcttttaacaagtggc

SEQ ID NO: 37338 - DNA, 2300 bp, Homo sapien
cttttaaacaaccaggtatcgtgagagttcactcactgtcagaagacagcaccaagacattcatgagggactgcccccatgatccaaacacctcccaccaggccccacctctaacactgggggttacgtttcagcatgagatttggaggggccaaacattcaaaccatgtcacatggtattccatgaaaaaagcaagcagttcattttgcaacttaaactgtataatacatgctttttcctgggactaccatggtgcttcagtagtccacagaagtactttatgtgtacctactattttgggacacaagggtattaaaaaccatgtactcaagggctgatatttaataaaattaataatttttactgccgtatcaaagatgttcttaagtgaggctggctttttttttctttcttttttttaatctatgactactggtgcagttggtacctctaccttgattagtgttaaagagcttgcagtttgacccactgttgattttgcaccatgggtacaaatgtgaacacggaagaaggcaaattatgtcctagtattatgatgaaagtagagtcttttgctgggacttgatgctacaggccagtagttctcaaagcctggttccctgcccagcagcattagcatctcttgggagcttattagaaatgcgaacacctgggcccttcccttccctttcagtgtccagttcctgtgggatggggctgggccgcttcagctgccccaggagactgagagagtctgctgaatttgagaaagtccactctgctttctggaaggactggcggggcgggagggcagggaggatgagtaagttagggacagagtgttctcgtgtttgtagaggatgtgatgcagcctggacttcaggcagtaggaagaagatggaatggatttgctagagacagattctctagaactttattgctggtagaccacataaaagcttagaaaacagctgcgctttgctccgagacctgccagccatcagggacgaatgagttttaaaggcccttactgctttgtgtcttgagggaatatcttttattaatcgtgaaaaaatcaatccagataacttgcctgagtcatttcagtctcctttttgaggatgcctgcttaaacagcgaccatggtctctggaggggtagagtctcacattcggagttcagtctcttagaaagtacagttcagtgtggaagaatggcagttatgatttcattcagatgtgcccagctgctgacaaattgaatacaacgatcagtggcaggcagaactctcatttgttgtgtgttgtcttgagtctggtgaggtgtatcctttcactattggattttaccattcagtgcagtcagtagctccatttgatgtaagtgtaaagatgggtctctcatttcagtttcagcaattattcttaaaacctttattttccagtgttttaaagtttttaaattttatatctttttttttttttaaacagatttgtaagactccagggcctcccagccgtgaataatctgatggttcctgaaatgactggggaagcagacgcttcgtatggcagttgaagagtgtgtgtctatgtgcatttaaaaccttctttctgtacttacacattcacacgggaagacaggctcattcttgtgcacacttgagagttttacaactgatgaaaattaatttaagaatcagatggagcaacttgacaccagtgggctcaggagcccggggagaaaaatacatcactaatggccagttttccatatggtctgcacgggtaaagaaagtctgcaaaaagaagaaaaaaaaatttgcgcagattaaaccacaaaaatattctccagtttaaagaaggaactaagtgagaaggtgactgagaaagaagtgtgatttcaaacattgcagcggctcacacagtgtttgttgcactttatttttcagtgggtttggtgatttggacggattaaaattctagactgaaaagtaactcctactgtggttatggctagaggaaagcaagttcaagtatgatgggacaagtttgaataatgaactgattcctttgcctatcttaattaactgtatttgagaaattttaatttattattcccccccttttttcctgcatctataggataatattgtaaaatagcaattgaaaccaataattattaaataaatatcaaggaaaatccaagcaaagctttctttttgttggactagtggtgtggtgtttggagacagtctctgaatgtgaacaggaaagcacccatcagcaaaacactatca

SEQ ID NO: 37339 - DNA, 2300 bp, Homo sapien
aattctatgggaaataaaatatacaaaaaagaaattgtagtatgtggctcagctgtgcataacaggcacagtcactgtgtgtgtgtgtgtgtgtgtgtgtgtgtgtgtgtgtgtgtgtgtttttgaggcagagtctcgctctgtcgcccaggctggagtgcagtggcgcaatctcggctcactgcaagctctgcctcccaggttcacaccattctcctacctcagcctcccaagtagctgggactacaggcgtccgccacctcgcccggctaattttttgtatttttagtagagatgggatttcaccatgttagccaggatggtctcgatctcctgacctcgtgacctgcctgcctcggcctcccaaagtgctgggattacaggcatgagccaccgttcccggccgtgtgtgtgtgttttatctcgaatttctagtgatttgtagtaaaagagctgacaaaatagattagtacctcacagtgctggagccagatgtgtattatcctcgaggggctactgtacttcaaagagggaggaaaaaaaactaggcttgagaagctaaggaaggctccgtagaggatttttaagtgttttgatgtatcttggagattggcctatatacctcctaaaaataagctctctgtagccaatgatacaatgtttaaaatatggcacatgctgaactcacagtctctctcatttcagaaaacaaatctgcatgtgtgttctctgaagttcttcttagtgcggctcttgatgcactatattttgaatattaccaaacctgagctctttaaaaaaaaaatactgaggccgggcgcggtggctcacgcctgtaatcccagcactttgggaggccgaggcgggtggatcatgaggtcaggagatcgagaccatcctggctaacaaggtgaaaccccgtctctactaaaaatacaaaaaattagccgggcacggtggcgggcgcctgtagtcccagctactcgggaggctgaggcaggagaatggcgtgaacccgggaagcggagcttgcagtgagccgagattgcgccactgcagtccgcagtccgacctgggcgacagagcgagactccgtctcaaaaaaaaaaaatactgagatgattaaacacaaatgctcatgttaatgaattaaggctaaaacctaactgtgcgcaatgcaagatgatcagcagttatgggaagatgtgcaagccctgatagggagcctggctagcatacaaaagctgttccaaaatgtaaagggagggaataaaaatacagagcaaggaagagtgggtggagtgacagagtaggcacagacagcaggaaacatgggaatgctgagaccactggcacctgagtggtcattagacttgcctgtggagtttggacaaatacagattcctgggatcgatattccacaattatttaggttcaattgtgtaggttttgtccctaaaagtaagaggtttcccccagtgcaggcaggatcaaccttgcgtggaaacctgccctgggttcagttggaaatgcactaacatcgtctggaaagactgtttttccacctattattggaaaaattcacaagaggagatcacaccacgctttggagaagccattccgtagaagacgtgttaactggttaactatagtttgcacactagtgttgagcttgtagaaggtgagaaactcctctgcctagactttttttggtggttttagtacatgtgggaagaagcacctcacttggacacacttcatttaaaaataatatttattatgactataaccctaatgggcttagttttaaatgtttctgcattcggccaagtggagcccaagaagccagaagtcgcccgcgggagctgtccgcggtgctgaacgcggtagccggcttcagcctttgacctccccagcaggaaagggccttcggtccgcccccaagcaccattttccttcgtgctcccacctccagtgtcttcccttcccagcgctgccaatggcgagggcggcactgagatttttgtcctgggcggcagacgaccttgtgttgcacttcctcccccgccttctgcctctcccggggcggcggcggatgggcgcggaggcggatgggcgcggctccctcccccactcaggcctcttcacggggcggggggccgggtcccccagcccccacccgcgccgtgtccagctcctcgcgtgctcgcggcggagccctgagcgcactgggtccgagtcctgcgcgccccctcaccacctcccccgcacctgctcctcctcctcggtcccgcccagcg

SEQ ID NO: 37340 - DNA, 2300 bp, Homo sapien
gcctgtctaaacttgatggagttggctgcggggcactgtacgcttcctgagcagggcgaggctgttaaagtgctgtaatggcacaaaggaaggtgcgtttggaggtgatggcagcagctggcaggagtttttggggcctgaacagtgggactggcgtgctggggatgaagaggaactggggagcaaggactcagctcttcctggctggctgaaagtgtggaaggagcgagagaagggcatctgagatggtgccaggtttcagggtacgagaatggagaaagggtggaggcaggaagtgggcagtggaagcgggcttttcagtaatgttattttgttttttagctcagtttgaaaccttttgaccttgaagtactgtagggcttctaggtgaaaacgtgttgggcagcgctgcttcagagtggggtagggtgggcagggaggatggctcctgaaggcaggaaggacggagagagaagcagcaggagatgagctggtgttggaggactggtgcgaggggtggcaggagtctaggactagaggtttcaggaagcacacggggacgacagagatgaggagagggaaggcctggggtcagggacccccagggaccctctcctgttcgtaggctgtgcatattttctgcatcacagacttgcctctatgtgtttagaaatatcctcccttgggggactgatcagagagggccatgggctctcttggtcactgagacttactcggtcactggtctaggttggcatggtgttagagacctgtgagcattttcagcaggaggcagagctgccagtgggtttctgttgcagaacaggagccgtgttctgaagcgactggggactccagccgctgtggtcactgagctggtctcacagcagggggctaggttagttctggcaaagacacctcccctctcccatctttaccttggcttctcaatgttttgttgttttgcccatgagcaacagttttagagctatgattgatctgaaacggggtcttgtttctgaggtttctgaagtctgtggttttttggctcaaatcttttttattttaattttttagtgacagggtctcgccctgttacccaggctgagtgcagtggtgcagtcttagctcactgtagcttcaaatttctgagctcaaacgatcctcccccctcagcctccagagctgctgggactacaggcatgagccatgctgggctgtttcagaacttttagattggaagtcgagagcggaaagagtcgcagaggggaaggcattgatcatcacgcagaattatcctgtcctgggtgctgccttggcccatgatagccctgcaggctgcagagggtcccaggaccctaggccctccagtgaggatgcctgcttgtcaggaaaatgaagacagcggaagccagggcctggcgcccaccctctcacccacgagcctgttgcagcacaggcggttatacccagcttacacttgcttaagaagacagattatgttgttttctctgtcttttttcctttgagttggatgacttgattgttaaaccaggaaaatttctaataagttggacttaagtagaagttttcgggaaggggagacaatggattttattgagccttctgagagagactggcaggtgcctggggcgggttgtgccctcatgccctttctcttttttttttttttttaaattgagacagggtcttgctctgtcgcccaggctggagtacagtggcatggtctaggctcactgcaacctccacctcccgggttcaagcgattctcctgcttcagcctcccaagtagctgggattataggcatgtgccatcacacctggctaagttttgtatttttgtagagatggggtttcaccatgttggccaaggctggtcccgaattcctgacctcaggtgatctgcctgcctcggcctcccatgccctttctgggattgcaggcgtgagccaccgcacccagcctctcatgccctttcttaaggcctctttttgcaacgttccttctcatttgctaaataactgtgctagtagggggtcaataatgtgtttttgaaatcaagatttaaaatatagttattctggttttctctgcttccaagtaatttctcttgtgcttttagcctctgcttgggtagttctcggagctccatagtcttgggactgtggctgccccgggggacgggacctccgagaacgttgtagtggaggaactcagaaatagcagtgtcattgtttaaaagctacttgagctttacagcagagggccagagatagcag

SEQ ID NO: 37341 - DNA, 2300 bp, Homo sapien
gatacaaaagatggaaggacaaaaaccataaagacaaaacagcggcccacacccatagaacagggtcaggatgaactacagcttctggagaaaggtgctgagaaccataaaaggcttgtaggagatgatgttctaataaagaagatgatgaaagggagaggtcccttgtttgtctgcactgttgaatcagaatgattctgaaatagcaaagtctaaagcacagatgattaacaaaggactacatcaaagtatgcctaagctcagtgcacctgcctcagaccccatctggaatcccccactgcaccatgaatggaggacacaagcagaatactaatcggattctctgaagactaagatccaggagatcattcagacagcaaagaccagaccccagattcagatccaaaagatctggaaaggctggctgaggcaaagggctgaaaggaagagaccactagtgacgtggctcccgagagagccggctcagctgtcccagcagcacagcccagggccacctgctccttccacatcagcaacacctgcccctgcagctgggtgactggggcagcttcaggaaggaaacatggagccagaggggtgcagaggtcacatccccagcacaacgtgaaagaaaagaacaatctcagaggggaggagacggccgcctgcaaagggctatagggtagacagagaaaaaaactcattttgtgtagttcacaacagccaaaaaaatggaaacaacccaaacgcctgtcacctgatgaagggattaacaaaatgtggtctagcaatacaacaaaatatcacttagcaaaatgaaggagtgaagtactgatcccgcgacaacctggatggaccttgagacatcacgctaagtgaaagcagacagtcaccgaagaccacacgttgtgtgactccattcacacgaaatgtccagaccaggcaaatccacggggacagagagaacgttagtgattgccaaggactgtgggggagggaatgggaaatgatcactaacaggtttctttaaggggcaatgaaaatgttctggaacagaatgactggacagctccacgactgtgctaaaaaccactgaatgggccgggcgcggtggctcacgcctgcaatcccagcactttgggaggccaaggtgggcggatcaccaggtcaggagatcaagaccatcctggccaacatggtgaaactctgtctctactaaaaatacaaaaattagctgggcatggtggcacacacttgtaatcccagctacttgggaggctgaggcaggagaattgcttgaacccgggaggcggaggttgcagtgagccgagatcgtgccactgcactccacactccagcctggtgacagagtgagtctctgtctcaaaaacaaaaacaaaacaaaacaaaaaaaaaccactgaacgtacgctttcattaaaagggcaagcaaactttctactttgataaagctgttttttttttgaaggtatccattagtatcttcatttaatattcacagctctatgaggcagctattttacagataagaaaactgaggctcaacaaaatcacgtgagtcaatgatggaggcagcgtgagaacccagctcaccgtccagtctaaacccccactcctcatcactatgctggttatactgactcctaatgagtggaaaggggagatttcagctggacacaagaaaggacagtctaacaattagaacagtgccctcccactcaccggcagttcgggcagagactgacgaccactcacaggggccagagaagggggtgctgtgtctgctaaccccttcactgccttgcagctgaacacactatatactctctattctaaatctcagacacctaaggtttgcccaatctctatgatatttaagctattcttagttctatatacttaagaaactgtagttttcctataatttttaaaaactttacaagtcctccactgtccaaattaacattatttagatgctgagatgtatttcaatcattgaacaaagaatgggaactagaacatgagccatggaaacgtgcagtcagctggtatacttactgtgaagttcattcccttgatggggagcttcaggtgttcaaatcccactatcactgtatactgagtgtagttcaggtagccaaggtgagccacaataatctccgcacatttctgcaaatacacagaaagatttgcctttaaagaaagcgagactcacgctcccgccaaataacccatgaagtaacacgtttcaacagcagatgggcagaactcattgtctcc

SEQ ID NO: 37342 - DNA, 2300 bp, Homo sapien
cgggccccgcccagggatggggtcactgagggtccgggcagcgaagggcggggcccgggagctgggcatgggcgaggcaggcgcgagaggagaggggcgtggcaggtccggggcggggcctgagtgcgcctgcgcagtccgcgccactcagggagccggaggggacgcgccggaggaaagatggaagactaccaggctgcggaggaggtaaccgccgggtcggcgacggaagggtggaggcctagagccctggccgcggaaggacacgcggtcctgcccggaaaggcctggctgcccacctccttcagctaggccagtctcggcagcccacggcctgagcttcccggtcgccggcgctccgcccggccccattctgcccggacattgccgccgtttccccggcgcggggggcgggaaggggattgagcttcttcccgcgcggggaggcaccgggcgtgactcggagagagcgccccggtgagcggtgccgagaaaccttcccgcagggcctcgcctccggcccgcagccaagctcgccgagaggatgacatcaccgccccttgctctgcggggctgaccccagccccagccccagcctggagcggggcgcggcggccgggctgggagcgccgaggcttggacgtctccccgcggaggtgcgggtgacgctcccgccgccagcccctccgccccgggctggcgtcccggccatcccgcgcctttgtctcgggcctcacctggttctgcaacgctgggaatgagtagcacatttcatttccgtttaatatgtctgtaagaaagctcattgttgtggggaaaaaatcatcttttatgcctccttgaggaagtaggataaagcccacgatgtcgccaagcagaagacacccatcggcaccgtgtgcgttaaatggctttccttcaagctcacggtcattcggggaatagagctgatgggcgcagctgagatacaacactcattttcttcttactgaataatccttgttgaaattcagatagagccctatggatttattatgcagcctgtcaaaaatataaactatagatacatttggtaaggttggatatcttaccatttatgaaatttagtggctgggcgcagtggctcacgcctgtaatcccagcactttgggaggcctaggcgggcggatcacctgaggtcaggagttcgagagcagcctgaccaacatggagaaaccccgtctcttttaaaaatacaaaattagccgggcgtggtggcgcatgcctgtaatcccagctattcgggaggccgaggcaggagaatcccttgaacctgggaggcagaggttgccgtgagccaagatcgcgccattgcactccagcctgggcaacaagagcgaaactccgtctcaaaaaccaaaaaaaaagaaaaaaatttcgtttaaggaggaatgttttcagggaaaataaaactaaaacttaaggactgattctagagtttcagttttgatctgatttcctaactagcacacacttcctgtgacagtggcataatcagtgtttgaatgctgatggcaaccaagtgaataatgacgagaagagctggttcaggagcagttggcaaagaaaaaagcctttccccttaaactgttactaatataatattggaaaatgtcttgtattacagtaatatcgagtaaaacttctaaaaaagaaatcgctttgtaaaggaaagcgcttaatactgcagtccgattctgactcccacaaataaggtggctaagtggcttcattattcgagatctcaatcgcatatgtgtaaaatgaaggggctggacagagtgatgagtgttctacctgggatggaggccctgggaggtggagaccatggctgtcttgtagtaggcatgtcttaggtatttactgaatggcccgttctggtcctcccaccagcctcttagcagccttttctgcatctcttctaacttcgtgtagatgcctgggcctttgtaactattctctcaactcaccattcatctttcttggagacgttaaaactatccactggattcaatacaactctgctttccactaaaaattctttaaaatgtccctcaacctttttcgtactgtaaccatatgggaggtgatacagtgcctttcctttgtgattaaggtcacggtagtcacttggaaggatcctttaagcttccagaaatgacttaatctctaagatattgcaaattgttcttcactcagtgagttggttttgtttccaagtccgacttctgagtacagcaagtgaggtggcttcgggcagt

SEQ ID NO: 37343 - DNA, 2300 bp, Homo sapien
gggcaggcaggcaaagcaatgtcagcatcagaatcacatgtggactgaggcgcacgactgaaacaccaggacaggggagttgaagccaggtaataagaaaggaattcaaaaggtagataaagttcagaatccaaggagaggaagaccaggtgtggtaaagcaaccagcctgcccagcaagtctcctcgctcaggccgaacacccagggccaagcagccttgtgtcagtcagggctctgccctcctctcgccagccctgtttccctcaaggaggcaggtagttgcatcttcctccactccccagttctctccatttgggtctgaggcaaagctaacacccatgagggaaatgattcatgcaataaattttaggccgggcatggtggctcacagctataatcccagcactttgggaggctgaggctggaggatcccttaagcccgggagtttgagacctgcctgggcaacacagtgagatcccatctctacaaaagacatattaaaaaaataggtgggtgtggtggctagtgcctggaatcccagctgctcaggaggctaaggcaggagaataccttgagcccaggagttcaagctcttagtggtctttggatgactaaacttcaacacatcttagctcaaaatctccgatcacaccactgcattccagcccgggcaacagaatgacaccctgtctctaaataaataaataaataaatgttaattgtgtagctattatgtgccaggcacaatgtggaaggaaggggatacattagtgaataaaacagatccttcctgcatggtacttagtttctaaatggagacacaccatcaacaagcaaccataaatacgttcttgcaaactgagagaagtgctatgaggaaaatgtacaggatgcaggggtggaggatgaggaggtcggctaccttagatgccgtggtcacagaatggctctctgtaggagattttgagctaagatatgttaaaagtttagtcatccaaagatcactaagattagtctatagtctgacaacttagtaactattgacttatggcagggcagaatgggtgaggggagggaggagtcgttgggttaggttcctcttgaagggctctaataagaccctgatagaccgaccaggttacagtccgatggtcataatccagatgagagatatcaatctttaactggggtcccgagcatatggggtagaaataacaagggttgttgatggattagatgtgggatttgaagtttaggtctaccaaatccctgggacccttgcagtcagctctttcttggggaatgggaagtgggttccagcaacctgaattcaagtgcatgacgaaaccagaaaaagcaaacgccaaaatcaaaactcggagcctcagaatacctgccaatagatgcatatgccccagctttccgtggagggcagtttaccagagcccagtgcaattcctaatttccataaagaacccacatacaaataaagtctgtctagttcactatggttaaggtagtcaggaagtgtgccacattttacaaaattttccacccaaaatgtttttttttaatggtgcttaaaggaaaaattctcatttacctggaaaacttaactccccaaagggaagtttcgttcagatagctaaagcatgccaatcccagtccccaagggaactgcaacaacgtctcaccgggcgcactgccttcagcagtcactttcgagtttgttgccaggtgtccgagcgggtttgaacgtccgcgtcaatccacacagtacaaaccggaggaggggccgggaccacgcttcccctccaggactgccttttgtacgtgtgttttgtttctgttgctaaggtttagggagctgcccggctaccctcacggattcccatggaaactaccacctcccagaggacaggaggagaggcgaattcagggtccacccacgggccccgcccagggatggggtcactgagggtccgggcagcgaagggcggggcccgggagctgggcatgggcgaggcaggcgcgagaggagaggggcgtggcaggtccggggcggggcctgagtgcgcctgcgcagtccgcgccactcagggagccggaggggacgcgccggaggaaagatggaagactaccaggctgcggaggaggtaaccgccgggtcggcgacggaagggtggaggcctagagccctggccgcggaaggacacgcggtcctgcccggaaaggcctggctgcccacctccttcagctaggccagtctcggcagcccacggcctgagcttcccggtc

SEQ ID NO: 37344 - DNA, 2300 bp, Homo sapien
aatcatagcaatcaatgaactgtcacatcaataaataacatcaataatatccagcagtggctgggcgcagtggctcacacctgtaatcccagtactttgggaggctgaggtgggcagatcaccagaggtcgggagttcgagactagcctgaccaacatggagaaaccctatctctactaaaaatacaaaattagccaggcatggtggtgcatgcttgtaatcccagctacttgggaggctgaggcaggagaatcgcttgaacccaggaggcagagattgcggtgagctgagatagcgccattgcactccagcccgggtaacaagagcgaaactccgtctcaaaaaataaaataataggccaggcgtggtggctcacgcctgtaatcccagcactttgggaggccgaggcgggcggatcacgaggtcaggagatcgagaccatcctggctaacacggtgaaaccctgtatctactaaaaatacaaaaaattagctgggtgcggtggtgggcgcctgtagtcccagctactcgggaggctgaggcaggagaatagcgtgaacccgggaggcggagcttgcagtgagccgagatcgcgccactgcagtcccgactgggtgaaagagcgagactcggtctcaaaaaaaaaaaaaaaaaaataataataataataatatccagcagtgttgttctgctataatctgcagcccttcatagtccaaatgccatcctgtggattttccattttttcctttcttcccctgtgccaagaagtgtgttactatgagatcatgctgagtcaaaataatagtaacagaagaagacgatgaggacgagggtgctgttgaaacactcatggctgaggaatttaatgttgtaaaggaaaagaaactctggctgacacatatctaaagtgagagtcctgtgctgagaaaagctaaagagattagctaagaagtgcctatatttagatctgctattgagctgggaagcggaggcacagttgtgctgaaatacctctgtaccccatgaaacagtggctgctctgagcttcttgggtccctcttcctctcaatcctggtgactgcagccccttccctgggacctcatccccaagatccaataactaaaggataactcgtggtatagcagggcctccgctggcatttgttccaatgggtaaatattcatgctatagtagttattaaatagtttggtgctcagttctgtgtttgtgaaaacactacacactacatcagcagaataggctaggttagctgcagaaacaaatggccctacactctcagtggttgatgacagcaaacatttatttgccactcacactccatgaccatcaaggatcttccatggctctgcttcatgtcttctccatgctgagacgaggttgctggagcagcctgtgtctggagtcatcaagggaaagagaagggaaagagaatgaatggtggccccagtactggctcggtaggtgccaagcctacgtggcacgtggcacctttgcacacacttcattgtcttattgctctccagagcaagtccttggccatgcctgagttagcagggcagggacacttcacggtgctgagtaatactacctagtacacgcacagcattttgaaggttccccttggtgatttcattacaatcttcatcgctcttggcctggctgtccccctttcttgtaaattattcttgagttaatagctgttctttgagatgtggttagtcatttacactgaagtcaatgtgaaacccttcacaaatgtgagaacatttgaatatttgaaggctgtagtctctgtagggagtttccttaggaagggtgaaacatttcaccagcatcagcctggtctttcctccagctaaaaatgtaaaatgttggcatagaagagctccttgatgtggttttggggtggctttgctccctgggtccctagtgatgtgggagtagccaccgaggcatgtaaggctggccacacagggtgcactgcgtcagcctgtgcccgacaggaagggaagagaaatacgtcagttactctaacaagaagaattgacttccttctctgcagagccggctctggtctcttctcttgaagcagatgcgaaggtaggatgagaaggcatggctggccgttgcagcaggtcgttttaggagtgggggagtggggtgggtagagattatagttattgtaacttttcttaaatttatgacattgaaaaggtaggaaacaaaacataataaattagataaaagatatcttgtaattttattgaataacata

SEQ ID NO: 37345 - DNA, 2300 bp, Homo sapien
cttgtaaattattcttgagttaatagctgttctttgagatgtggttagtcatttacactgaagtcaatgtgaaacccttcacaaatgtgagaacatttgaatatttgaaggctgtagtctctgtagggagtttccttaggaagggtgaaacatttcaccagcatcagcctggtctttcctccagctaaaaatgtaaaatgttggcatagaagagctccttgatgtggttttggggtggctttgctccctgggtccctagtgatgtgggagtagccaccgaggcatgtaaggctggccacacagggtgcactgcgtcagcctgtgcccgacaggaagggaagagaaatacgtcagttactctaacaagaagaattgacttccttctctgcagagccggctctggtctcttctcttgaagcagatgcgaaggtaggatgagaaggcatggctggccgttgcagcaggtcgttttaggagtgggggagtggggtgggtagagattatagttattgtaacttttcttaaatttatgacattgaaaaggtaggaaacaaaacataataaattagataaaagatatcttgtaattttattgaataacatacatttaacatttgagataataatgatttaagtgatatggtggaagtgacttcagagttaattaaaaaccaaaacaaaacagaaaaacactatccaaaagctatatggtgtgatttttttttttaaagggtagagtgtcatttgctttcttctttggtttgcaaattcttatacttacagtttattactattttgctctctctgaatcgactttattgttttgatcatccgtaatttctcgtttggaggtggaacataaatatcattttggaattataaaaaagttagctagggtctaatttaaatttcttttaattaagcttccttaatctctaaattgcttggtaagaaagagactatgagaggaaagtgcacattagatattaaagatttattaaattagaattgggctgggtgcggtggctcacgcctgtaatcccagtactttgggaggccaaggtgggtagatcccttgagatcaggaatttgagaccagcctggccaacatgatgaaaccccatctctaaaaaaaaaaaaaaaatacaaaaattagctgggtgtggtggcaggcacctgtaatcccagctgcccaggaggctgaggcacgagaatcacttgaacctgggaggcggaggtggcagtgagccaagatcctgccactgcaatccagcctgggcaacagagtaagactccgtctcaaaaaaagaaaaaaagaaattagaattggtgtagaaaagattatttagccaagatagttggagattctaacttagctgctttgcctaaatgaagcataaggttttggagttaaacagacccagtttagagtgtgagtttaggtaagttacttaatcactccaagactcactctcctcatctgtagaatgggtacatttacttcataatgtggcaataaggattagtagagataatgtatgcaaagtacttaaactatctggttcagagtaagagctaaataaatagtagctgttggcacaacagaaagcataacaacaattgtgagtagtacctagaaggatataataatattaattctcggccgggtgtgatggctcacgcctgtcatctcagcactttgggaggcctaggcggatggatcatgaggtcaagagatcgagatcatcctggccaacatggtgaaactctactaaaaaatacaaaaaaattagctgggtgtggtggcgggcgcctgtagtcccagctactcaggaggctgaggcaggggaattgcttgaacccgggaggtggaggttgcagtgagctgagatcgcgccactgcactccagcctggtgacagagcgagactccatctcaaataaataaataaataaataaataataatattaattctcatttctttgctcttccatacaaagaggtcaagtttaaagtatgaatgccatggcttcctatttcagtcatgaattcctatttctgattctaaagtaatattttttgttgtttttgggtggtaaaaggctccccgaatgagaaagaatactcggaatcagcggtgaattgcagtgatctttcagagaaagcgcctgttcaactttgtcctctctcaggtaggcttcaagttttatagattcaagcccacgtgtgagtcttctaatgttttatttatttatttatttatttttatgtatttttatttttttttatttatttgaga

SEQ ID NO: 37346 - DNA, 2300 bp, Homo sapien
ttctgcctgttcatctggaacctggatctaaggagggaagaggcgttgcccctgctggcatagtcaggtaccagcccagccaggtaagaacctaaagtccttgttgctttgtgattttcccttcatctagagaggaggcctttggagaacaggtcttgtgggtgctttgtcagagactagaagccgagaacatcccttttcagagctctgggttttctgttcctcatgcaacctctgcagttgggatgaataatatattttaattttattttacaatagggaaactgacaaatattgaattcctgaactgagcaatcttggcctgtaggcccatgaacttggagaaaaaattaaatctttatttttattaacctttaactcaaatttagcattttcttaaaatatggatataggcaagaaaccacagtagaatcagcagaacttgtgactttgtcaccaacagaaatcacagatattttcataccacatgatatgttgtagctatctcaagacattgtttctattcatcactactttgaaattctgggagtccttagatcactgctagatcttaatatttcatgcatcaaggaacacatatattactatattacaatttttaaatatttcagtataatcaatttcttcctatgtaacacagcataccttattttatgcgtttaaatacgtaggcttcaccagactaccaaagattaagaaaaaggttaagaacctttgcttaaaggaaatgctaccttagagctctgttagcctctcattcactaatttgccatggatcataaattaatataatgcagattttttttgaagcctagcaaaggaagtttagcttttaaagcattgaaaggacgtcttatcactaagggattcccatagatttaataacaaaaatggtactataggaagtatattgatttgatcttctgcattttctggataaaaggatgtatgcagaacctttcagctgtcattaaacaaaaacaagagctaatgcataaggcagctcatgaaacttattcaagactgtaaataattgataggctgagcttgtggtggtgctgcttcatacatccttaattgattaaacattttttgagtgttgaagttaatggtaaaaataatagccaacagttgggaatgtcatttttccagtatttcttcaattagggtaatgtacattaaacacagacttttacgtcctctgaccactaaagttatggaatccatattaggaaaattcaagtttggaagtttgaggcttttagaaatatgagaagtgttatttaagcaaatttaaaattttacattatcaccgcgagcagaaaatgcaagggtttgtgtagaatattttgtctttttggaagtaatgctgcagagatacttaagccaagaaaaatgttgccattttttgttttcttttctgcaggtattgaacgggctgagcttttcatgatggttcctgctgacctggaaacatcttaaatggaaggttagcttctatgagtcactgatactctttttattgctatttctaaatttccttggcttgaaaattacttctgctttgcagaaattatctgcttgcagctgtggataatttataacaatctctggtgaaacctcagaaaagagatatgcttttgtcttagatggatgtcagcagctgctgcagaacccggtgaaaacaccccccgggtagcacgaggctctgcgagccgtaactccgacaaacgcagaacttcttgaggctttcttcttctaaggagtatgacacagttaaaaaggaaaaaagaaccacaagcaaaacagttgccagtgaaataggagagggagctctttaaacaaggctggctgcagctggcctccgccgctcatctgcagggcgtgagcgcttggtccatgcagtgaagctcttccaacctgggtcaacgaaaacggagaagaaatggcccaagaaatagatctgagtgctctcaaggagttagaacgcgaggccattctccaggtcctgtaccgagaccaggcggttcaaaacacagaggaggagaggacacggtaggctgcccttcccggggggtcactttgggtgtttagctttctctgcttggggcctgccactccgtcgccaatgctgtttgcttacaaatcactacccacctgctgctgggcttcgtgcctgagaagggtcctaacgaaggtctgttggtggagatgatcctccttatgtaactaaacgtagaggacgctcaggaggaggagggaggccgctcttgttattc

SEQ ID NO: 37347 - DNA, 2300 bp, Homo sapien
catgtcctatatgtgatctcttaggaaaaaggaaatccttgggctttaattttccaactttggtcaagaattaaaagttctttaactcaaaagtgagtcataattttcatgtttaacctttttgttttgatactgcagttatgcttatgagtggctatgaattgttatatgaggtttcaaagtcctaagaggaaaaactttctaggcacaccagagagccggaggcctaaattttctaaggtcagaacctgttttgagagtcctgtgtagagacaggagccggagaggggatcccagccccttgaagtttcaggatgcggcacgctggctcacagtgctatgtgctgtgggcggagcctccggagcttggatcctagcttctctgttggtgccagcaggctgctcttgtgttttgggagaaagtgctccagaagcaacacatgcctacctggtgccactttcacagcctttcaatgtaaggaggacataggctgaagtcagtagcagggcaaggtggtatctggagttcccctttaatgctctgaaacctgtaaagaaaattacatctcgaagataaaagaacaaactcattgcatgtctgtttgaatgccaggtgtgtttttttttaatggggattggtgattctagagcatagcactgtaaaagaaaggatgtatacaaaagctttgacatttagaaccatggtctggccagtgtcctgccatcattcctgcaggcacaccatgactgactgcgctaattccccagaagggccatgtcaggcttacatgtttgccctcagcctacagagtccaccccactgccttgatctagttgatgtgatcataacgaaacctgtattgctcatcagtattgaagctgttggtaggccatagattgcttgaccttcctgctacttctaaaatgaaggtttttgtgggatgttggaaaggactgctttggagggcagcattgttggatggtggttttgaggatttgtcgttatttccagaatggcattatccctggtaaaatgtgttggaagaatagggtgggaagtgtcaggtgagcagagcaatgtggtcttgaagtcacatgatgaacttgggaatgctaataaaagccagagtctggccagtcatggcattgcattggttaagtaggattagccctgtggggccttcattagggcggttagtttgaaggctgtcctggaagttggagagtgacatgggaagatgtctgtccagccaggagaacacacactggaatgagaaccagaggagcagaatgcatagcaaggcctctgtccgtttctcttggcaagctctgttgagtatggcacgtctaggaacgtgatgggatcttggccctccctgttggtttcatagaactaaatgatcagtaacttaaataacattcaacagtctgtagcagaagagcctgtatgttaagagaggcctcaagggaaagggaggcagccctggggaactgtgtgttgaaaggtgggtctgaaccgtggagtttggggctggatttgacagctcttggatgctgagttaaggactgtgttgacatgggaggagaggaaattaatcagatcagcagactgaaagtagggctgctccagcacacagcttgagagtgggctctggcaggatgagaggtaggtgagtgtggtgatgtgatgtgggaatgaacagcagaagatacctgagggggagggtcaaggtacctgggtaggaatttcagttgacctcgagatcaccagcctgggtaatcataggtgccctagactgaggaaaaaccaaaggaaatgggaacagattaaggttgcagatgccttgcagccaaccacttggcttaacctaggacaggtgggaactatttgataatagcatataacacattgtgcctcttgggttagcttcatattattttaattgaactaataagaattgatttgcgaatctctcttagccaatccaagaacatatgtatacatctaaccatccacttcttctttttaacctcaggttaaccccaaagattggctttccttggagtgaaatcaggaacatctctttcaatgacaaaaagtttgtcattaaacccatcgacaagaaggcacctgtaagttccaaaggattctattcaggggctactgtttttcattcttatacttgtcagggtaacggacaagttatactgtgacgagtagccagtgatagtccaaactcctcatgaggttacattgagggccagagatcctgtgggccaggcaattgctgcaggggaga

SEQ ID NO: 37348 - DNA, 2300 bp, Homo sapien
ttcctgcttccctgtggtgtcaggagaatcgcagggtaggagacacggcccctaggatactggacatgggctggatgctgtattcgagggataaaccatgtatggttcttgtgcttaaataagcaaaaacctggccgggcgcggtggctcacacctgtaatcccagcactttgggaggccaaggcgggtggattacgaggtcaggagatcgagaccatctaacttaacatggtgaaaccccgtttctactaaaaatacaaaaattagctgggcgtggtggcacatgcctataatcccggctactcgggaggctgaggcaggagaatcgcttgaacccgggaggtggaggttgcagtgagccgagattgcgccactgcactccagcctgggcaacaagagtgaaactccgcctcaaaaaacaaacaaaacactaccaccaaaaacctaactagccatagtcaagtagaagtatacaaatattccagaagaactaaactataaggtgtttgtaaatatttagatgtgaatgagtataaacaacgcatcaaaaaatcataaaaattgatatttggtaaattttcctttctgccagacttgctggcagttaaaatttgaaacagtgactgtaccgaaagcctttttattcaggttaaaagttgtactcccatttcctaaaataaggactgaactgagaaactctagctacagctacttggttttccatagagttaagttggctccttagatgctgaagtctgtagttatgaccttgctttcattagtaattagcacctgggcaggtactaaccaatgaatgccctttacacctggcaagaaggaatgggtggggaggccagattgtttcaatctaaagggcactacgttgtggtgggttacgttttttggtagacagacactgcctacaggcaactaagtcattccattaactgtcattatcaatccatgtgtggccaagcttgaattgtcctgctggtttagcttcctgatggggaacaacagctgtcgcaacgcacagtgtctgcagctccatcatgggccccaggacgtcccacagcagctaacactggtctgtactcggaactctgccacctggccagtgacttttgtgcgtcatgttcctgggaatagtatgactgtccatgattcctaggaaagctagaggaataactgaggatgaggagctagcactttgacccctgtggggagtgctggttatagtggttatcagggttgtgacaagtggactcttgtgagttccaacactggatgattttattattcctattactcaggcagtaaaagactagtacatatcctggtgttatataattatatgaaaacttatcagaatgagttttataactagcgtacccatgtttttgttattgtgctgcagataaaatggcgcactgaaatgttactgaattatgtgacaatttttgttacaattctgtgcactttttacaagatttgtggagcttagatagatggctggcctttggcatctgaacattttcctgagcccgatagacaagcagattttttttgtttgtttttggagacagggttctcatgcctgtaatcccagcaccctgcctagttcaagaccagcctggctggcaacatggtgaaaccccgtctctaccaaaaatacaaaagttagctgggcatggtgatgcacgcctgtaatcccagatactctggagactgaggcaggagaatcgcttgaacccgggaggtggaggctacagtgagccgagattgtgccactgcactccagccttgacagagcgagaccctgtctcaaaaaaaattaaaaagacagggttctgttacccagtgtggtggcgcaagcatggctcactgcaggctcgacctcctaggcccaagtgatcttcccacattggccttccaaagtgctagggttacaggagtgagccactgtgcctggccaagatttctttgcctttgcgctcatgttcttctttaaccttaaaagaagaggtcatataaaataatcaggtataatttaagatacagaaagcttgatagaaaggagtagccgtgttctacatcttcatccattgcatttgcagatatgcctcaggattattttattagtacaatttttttttctttttgagacagtctcactctgtcacccaggctggagtgcagtggtgcaatctcggcacactgcagcctccacctcccaggttcaagcgattgtcctgccttattccctggtgtatctgggattaccaatgtgcaccaccaca

SEQ ID NO: 37349 - DNA, 2300 bp, Homo sapien
gtttggaacttcgcccaaagtcattggtttctctttctaccaggatagatttaagtgcttactaagtgtcaggtactgttccaggcatcgtacatgtactaactcattatcctcattagaaccctctgatacaggtgccataattatgccgctttacaaacaagaaaactaaaagcagaaagggaggagtaaacccaggagaggaattcaggagaagctctggtctcaacctttagccaacatcacaatcacccgaagggcttgtaacacactgattgctgggctcagccctagagtttctgaatcctaaggctgagcaacacctaatttccacttatgcaagttcccagtgaatgctgttgctgctcgtctggaagccagacgttgagaaccccttctagagtgagctctcccgcagcaaattctactggcccccaaagtatgtgttttgtgtgtcttaaaaatttgttgagaaccattagcaaaaaaacaaacaaaaaaacttaattcctagaatttcagagaaatcccatggagctttttgccagtcacgtcaaaagaggccacaaacgtgccacttaaccagagcttcggaaaggcggcggctgggccggccacgtgcaccgagactcggggccaggtgcagccgccccagggccgaggcctcggaactggcccccggtcccggccccaagcggtccagcgattcccccaagccgtccgcccctccagatttatttacgttttcctgacttccccctgcccgctgtgggacaaacagcctccccacttgcatctgcgaggggagtagcgcgcacttccgccaagttccgcccccacccagcccgaggcccggctgccgccatcttgcggggggcgcacctcacaggtcgggagctgggcgggaaggggcgtggtcccgggacccgccccgccggggcttttgggagcgcgggcagcgagcgcactcggcggacgcaagggcggcggggagcacacggagcactgcaggcgccgggtgaggcgtgcggcggccggggtcgggacgggggttctgggcggggggttcctggtggagggcccgggcgggcggcggggttcggcggcaggtgcggcgggcagcctagggggcgcggcgcggggttctcgcccggcacccccggggcaggtggagctgagccggcccgcggccccgcgaccttcccctcggcgccgggtcccctcaggtctctcccgaaggaaacgcggagcctgggtgcctgggcgccgtccctcggcggctcccgagcggttgcagtttttgaaagagtttctcaaaggcttgacggttgtgactgcagccgcggggcaacggttgctacacaaagtgaaacttgccgagtgctcggcttctcacgggcttcctggcagccccgggaagttcctcggcggaccccgagcccgcgccccctctccacggatccctccccagcgagtgcccccccgcccgccctgtgccccctctcccctgacccctccctgtcgggtgccccgcgggctcgcgctggctgtcccgggactccttcctcctaggtgttcctcctgcccctcgccctctctctcccaggcgcgcgctccctctccccgggcctttccccgccgggtatccctgggcccgcgccccctcttctccgcctctctccgctgggtgcacctcgagtgtcccccagacccctccccgcccggccggcgctctctcccctgaccctcctggccgagtgttccccggggcccgcgccccctccccccgatcctccccactgagtgttccccctgccctctctctcccgggcctgcgccccccaccagccccttcatgctgggggtcccctgggtgcgcaccccctctcctcggacccacccccaactggggggcacctccagtgcccgccggctgccccttgggcgcgcgcccccgctctcgggcgcctcctcgccgggggcccggcccggccccgccccgcccgtgccccctccccatgcccgcagtgctgggcggggcgctgactcacccgggcccgggctggccggttcttaagcggcagcgcgctgcgggcgccgagtgtcgggcgcggcaggaggacgaggcagggcgggcgggcgctctaagggttctgctctgactccaggttgggacagcgtcttcgctgctgctggatagtcgtgttttcggggatcgaggatactcaccagaaaccgaaaatgccgaaaccagtaagttgcccagtttctgggccgggcggacgggagaggcttcattg

SEQ ID NO: 37350 - DNA, 2300 bp, Homo sapien
ggagcgagataaaaattagattagaggcatatcctattatgagagttgggaacccaaactggctaaccaggctccaggcagtgataaggcagtggaggtattgatgtccagttggaaacattatcagtgcaggtaatttaaatatctttcatagttttctttctactgcagttaccattatatcttcattttatttatttatttatttatttttgagacggagtttcactcttgttgcccaggctggagtgcaatggtgcgatcttagctcactgcaagctctgcctcccgggttcacaccattctcctgcctcagcttcccgagtagctgggactacaggcgtgcgccaccacacccagctaattctgtatttttagtagagacggggtttctccatgttggtcaggctggtcttgaactcctgacctcaggtgttccacctgcctcggcctcccaaagtgctgggattacaggcatgagccacagcgcccggcctataacttcattttaataaaaaagaaattcaggccaggagtgatggctcacgcctgtaatcctagcactttgggaggccgaggtgagcagatcacctgaggtcaggagttcaaaaccagcctggccaacatggtgaaaccccgtctctactaaaaatacaaaaatttagctgggcttggtggcgggtgtctgtaatcccagctactcaagaggctgaggcaggagaattgcttgaacctgggagatggaggttgcaatgagctgagattgcgccaatgcactccagcctgggcaagaagagcaaaactccgtctaaaaaaaaaagggaaagaaaagttcagtctttcagagggaatacacttacctgaatagaggtcaaaatctcagaagaggcctccctcctctctctgacctctgaaatgccctggatctgcaagtgggagataacaggccctgacaaagggttgcccaaacagcagtgtgtccctaggaagacaggttaagcatcaattactatgaggctagcacgagttaagcattccacatgcacgatctcatttaatccttacaagtctatgtaggtggggctactagtatgttcactcaacaaattgggaaacagagtttggaacttcgcccaaagtcattggtttctctttctaccaggatagatttaagtgcttactaagtgtcaggtactgttccaggcatcgtacatgtactaactcattatcctcattagaaccctctgatacaggtgccataattatgccgctttacaaacaagaaaactaaaagcagaaagggaggagtaaacccaggagaggaattcaggagaagctctggtctcaacctttagccaacatcacaatcacccgaagggcttgtaacacactgattgctgggctcagccctagagtttctgaatcctaaggctgagcaacacctaatttccacttatgcaagttcccagtgaatgctgttgctgctcgtctggaagccagacgttgagaaccccttctagagtgagctctcccgcagcaaattctactggcccccaaagtatgtgttttgtgtgtcttaaaaatttgttgagaaccattagcaaaaaaacaaacaaaaaaacttaattcctagaatttcagagaaatcccatggagctttttgccagtcacgtcaaaagaggccacaaacgtgccacttaaccagagcttcggaaaggcggcggctgggccggccacgtgcaccgagactcggggccaggtgcagccgccccagggccgaggcctcggaactggcccccggtcccggccccaagcggtccagcgattcccccaagccgtccgcccctccagatttatttacgttttcctgacttccccctgcccgctgtgggacaaacagcctccccacttgcatctgcgaggggagtagcgcgcacttccgccaagttccgcccccacccagcccgaggcccggctgccgccatcttgcggggggcgcacctcacaggtcgggagctgggcgggaaggggcgtggtcccgggacccgccccgccggggcttttgggagcgcgggcagcgagcgcactcggcggacgcaagggcggcggggagcacacggagcactgcaggcgccgggtgaggcgtgcggcggccggggtcgggacgggggttctgggcggggggttcctggtggagggcccgggcgggcggcggggttcggcggcaggtgcggcgggcagcctagggggcgcggcgcggggttctcgcccggcacccccggggcaggtggagctgagcc

SEQ ID NO: 37351 - DNA, 2300 bp, Homo sapien
gggactgcaggtgtgcaccatcacacctggttaattttttaaattgttttgtagagatgaggtctcttcatgctgcccaggctggtctcaaactcctgggctcaagcaatcctcccacttcagccttccaaagtgctgggattacaagtgtgagccgcccggccttactttttttttttttttttttttttttgagacagagtctcactctgtcgcccaggctggagtgcaatagcatgatttcagctcactgcaacctccgcctcctgggttcaagtgattctcctgcctcagcctcctgagtagctgagactacagatatgcgccaccacacctggctcatttttatatttttagtagagatagggtttctccatgttggccaggcagatctcaaactcctgacctcaggtgatctgctcaccttggcctcccaaattgctgggattacaggtgtgagccaccacaccaagcccttactttcaaattattcaagaactaaaaagttctttgaattattcttgcaacttttctatattttttattatttttttaaaccaaggacttcaaacacactgaggctaacaagtttttgccacaattgctagcatgcattcactaacctggaggcaggcacccactttgtgccaggcagtgtgtccagctgccttcttgaacctgcgctactgacagaaaggatgtgaagaattggatctggcggcattaatttactttttgaggtcacatgtgtattgaagtcagaatctacagtacagtgaagacaaaccacttcttaacattgaagcctccttacaattaggagccatgttcaatcaaaacatgattaattgttgccaaggactgaagggcttactgctccaggttgtcatcttcagatcagaaacatattccaggggtagagccaggtcttacgatgcaggtctatgttttgtgccccacaccatttaagaaaagtattatacaattatgaatttttaaaaaatcggtacaggaccttggaagaggggcacacaggcaaggaccctggagctcatgcttgactggcttctcaggaaatcttcctctggctatgcacaaatcggacagcaccaccgcagcttgagaggcgagaagaccaatcatgtcctccgtgctggtgtcctttcatctatgagaatcaaaatgcttctaggacttttctctcaagataaatctaaggcctgagttgggctgtccctttaggcactctcttggtgtcagcagaatgattggacccagttttgaaggagaacgtgttcagtggaatgccagagttctttttttgtttgtttgttttgttttgagacagagtctcgctctgtcgcccaggctggagtgcagtggcgcaatcttggctcactgcaacctctgcctccctgttctttccttgagactttcatcacttcaatctcagtggtctattccccgaccatcgtccctagtggcctggagacagcagaggcggggtccacatcttgctcatccctgtagacctaattcctagcactgtgccttgcatgtgaagccaggttgcttgctaaatgcatccatgaatgtagctgttaaaatgcatgtatgggccaggcgcagtggcccacacctgtaattctagcactttgggaggacaaggcgggtggatcacctgaggtcaggagttcgagaccagcctggccaccatggcaaaaccctgtctctactaaaaatacaaaaaaaaaaaaaaaaatagccgggcatggtggcggattcctgtagtcccagctactcaagaggctgaggcaggaaaatcacatgaatccagagggtggaggttgcagtgagctgagatcctgccacttcactacagcctgggcaaacaaatgagactccgtctcaaaaaaaaaaaaaaaaaaaaaagcatgtatgactcaaggagagggtagagggctctgggaggtcttctccccacagtacatgagactgagatggcttgtcgtcttggatgacacctgcctggcccttgagggactgagatctgggatgaggaagtacatggtgagggaggcaggggcttctgcccacagcacactttggtcagccggaggccactgtaggagcctccagggagttctctttgaggtgggctccccagaagggtggggcagcgtggggcactggatcaaggacagcaggccacagttgaggggctctccagccatgctgagagaaggggaggggacctgcggcatcgtgaggaagggtggccttgtgttttttttgttttg

SEQ ID NO: 37352 - DNA, 2300 bp, Homo sapien
ttttcactgctatatccccactaacaccaggggagtggggacgagggacaagaaaacaacaatgcttggcacatactagatacacataactatttgtggaatgaatctttcagtttcagatcatccaagagttgtccacaaaatagtcagatatccaggactgtcacctgagggagaagtctaggttagagatacatcctttgctaccctgagtatataggtggtactagaaattacagacgtgaaatgggactgccctgggagaaagtacaagaagagaaacaggctgtggataaaaacttgtacaggccaggcacagtggctcacgcctgtaatcccaacactttgggaggctgaggagggcggatcaccaggtcaagagaacaagaccatcctggccaacatggtgaaaccccgcctctactaaaaatacagaaattagctggacggggtggcacacgcctgtagtcccagctactcaggaggctgaggcaggagaaccacttgaaccggggaggcggaggttgcagtgagccaagatcgcgccactgcactccagcctggccacagagcgagactccatctaaaaaaaaaaaaaaagaaagaaacttgtacaagaacctatagtggctatcaatttctttataaagcccactgtggctggtatagcactattgtttacccacttaatacccactcaattctgccccaacatcctcctaacagaatttgttctcctcctccctggccaagtgtttcttggaggcctagaaagaccggttacctggtctaatccaaatatggtggtcttatatagatcctaagcttaaatcaatatgatgtaattctggtcagttgggagtttacgagggggttttgctcttccaataaagacaaaagagcagatacttctattactactttgttgaagccaacaacccaggtgacagagtggaaaggtaggggaaaaaacgtgttgttgataatgtgctgagcccccaagttaccctccaggttaaccaacctggggagtgtaaaataatgaattccttattatttcagccacttggaattggttttttgttacttgagggaaaaaatattctaattaatatgctagtgtttactgtttccacgatgtggtgtcagcctgtctatatatatttctacaactcatctacacaaaccttgcttacagttttccaaatgcaccttgggcttcttgagcctttgatcaagccattccgaatgcacttcccccaagaggctggccagttaaaatactatcatttatcaaacacaacttaaatgtcactttctcctctagccctttcagaaattacctcaaaattaaatgatcagacctaaaatatgttgggagtgttttcacctctagaatttaccatacacctttatgctagtgttacttatagaatgcctacatctgctttaggtcatacacttcaaagcacagaacggtccagatcttaatataaaggcttgccatttaccaggcacagctctaagtattaacggttttaatcctcaagacaaaacctaaagagataaattcttctattgccactttgtggattaggaaaatgaagcacaaaaacatttaacttgcctgaggtttcggagctagtacattctagaacctggattcaaatcaagacagcaattagctgaatgaaggtgtaactgcaaatgcaaataactgatcacaagggatacacattcactcatacaagatagaagatttttaacgttgctggtactaaaaccaaagcgtctgcgtttttaagcgcagccccaccccgcaatactagagacattctttagagctggaagcctgatagattaaggggaactatgcctttgtattttttaagactcaataaattgctcacttctttcccaaaatgaggtgtctgtgggggaggcccctgtcgctccgtgtgccaagggtcctccgattgctagcacacagcggtgagcagagaaggtaggtgaggaactgcactgactcagctgcagagggcggcggcagcccgcccctggggcgggagaagggcaggagccgggagacaccaggaagctcttccccgcccgggcacgtaacagagctgggagcctggctgccaggggcgtgttatcgcgggggcagcctgggagcgctgctgcgccgcggcaggagaaacagccgaggacaccctggaagagcaggagcacgtgggcctgcgagaatggcgccaacaccagccctgcaaagccacattccaaagccgggccaaggacag

SEQ ID NO: 37353 - DNA, 2300 bp, Homo sapien
atccctcaggatgcagccagacagtgtggtggggggcagttgttttgttcataaaacttcacagcatatttcatcttcttataattaacccaaatgaaaactatataataacacattccagtgagagtaaaaataataacatatgcaatggaaagtgtgatctgttagtgactagagaattctaaaacccaagctttgaaatgtcagcatggttgtcacatcctatgaaagtttatctaaatgttataattgtcccacatggctaaatactttcaatgacatatgtatagaattgaagacattaaaatgtctgtcccaaaatgaaaattctaagattatcacaatgagtttctacctagacataaggcatttttataacaattccttcttctgagaaatgaaaataatcaccatttcgtttttgaaaaagtgagactttaagaagtctaatttcttatcattagaaacaatgttgcgatttaagtgccgccttatatgaacatgcccttagaaactgatttagtcttcataaagctttctcagaatgttgtaaaaatgtgtcatcttcgtttggtaattatagttttgtttccgtctttgttttaaggcaagaaaaccagtctagtcgtgttagaaacagaaagaaattctacatgactaaatgattactcaacaaaactattttctaaacataaaggcaaactatggtgtttaatgcagattggcttcataatttaagctctgtataaataataaagggctgtgttattggtgtcccaattacaaaggccagtttcttagctcctcaagaccttgtggttaaccagtctcactctgtgtcagttgccactggaagtgtctgaatgagcatttcacaatattacttgtgaaaatgcaccttcctcattttaaaggaagtctggtttcggcagaaactctcagcttgctacactgaagaccattagcctttttgaaaactaacatcccttcactttattccagggttgcagataagctcccccggcccaacctcctgctactcaagcacttggtctatgtgctgcacctcatcagcaagaactctgaggtgaacaggatggactccagcaatctggccatctgcattggacccaacatgctcaccctggagaatgaccagagcctgtcatttgaagcccagaaggacctgaacaacaaggtttgttctgcttactgatgagaaatccccaacttatgatctcaccatctgtttgccaagtccaggcaataaaatgcttcagaatgtctccaactgactcagaatcacagtgaaaatataaaatgcaaaatgcttttgtcatagttccactctctcagatacatgtatctaatgaaactgaataaatccgtgtcttctgtcatctgtgagacagatgagtgctgcgagtatttacatcactctctcccgatataaaaaagcccttttgtttttgtgttttgtacaccacagtctatcagtctatcaatctgggacactacttacttaaatgaaaattttattaatactttaaatttttttaagttcttaaatttaaaatgcatgtctcaaaacaccaaggagtatctaactttaatgtatgtgattgttggcatggtggctcacgtctgaaatctcagcactttgggaggccgaggcaggcgaattgcctgagctcaggagtttgagaccagcctgggcaacatgacaaaaccccgtctccactaaaaatagaaaaaattagccaggcgtggtggcgggcgcccgtagtcccagctgctcggaaggctgaggcgggagaatcgcttgagcccgggaggcagaggttgcagtgagctgagatcaggctactgcactccagcctggtgacagagtgaaagcctgtctcaaaaaaaaaaaaaagtatctgattgttaccaaatttctgtatgctcttttcagacacataaagatctcagattctcattttggcacctgactccagtgtccccattcttcctcacctccaaaaaaaaaaaaaaaaaaaaaaagtcttcaagctgacaaattgcttacttttcctcacaggtgaagacactggtggaattcctcattgataactgctttgaaatatttggggagaacattccagtgcattccagtatcacttctgatgactccctggagcacactgacagttcaggtatggaatgtgctatcatttgattacgattgtagggaaaagttcatgccagtctgccagtcatgtaaagcatctctgatatttgaggcagaagttaccttc

SEQ ID NO: 37354 - DNA, 2300 bp, Homo sapien
tgttattatttttactctcactggaatgtgttattatatagttttcatttgggttaattataagaagatgaaatatgctgtgaagttttatgaacaaaacaactgccccccaccacactgtctggctgcatcctgagggatgttttatgggagaactgttgccttgcatgacaccagtcagtgtagcttaaagataatcccgaatttctacactttgctggtgagcctgtgttaaagttctcaggtctgattttatctcatacctttttgaacatcttacattttcagacttccctacctcttgggatttgtgaggattgaagttcgctttctactttttgaagaaatatttcatttggctaaaattaaaattcaaaagtccagggcaccctctggtttttgttctgggagtggacgagcaattccactcggattccctaaacatcacaattctcatggaacagggatcatgaagcatttagaaagctgtgtaaagaatcaaaagacggaggtgatgtggcctggcaatgaccgatgactttgatgacttactgtttcagggcctcgattctgtcctcctcgtcctgcatctccagagcacccatccactcctcaaagaggtcgcttgaaagtagcttccgggggatacttctgaggaagtcctgggggatgagagtgggctgttggcctattggtactgtatgatgtcccatgtccttgttttcacccggttttcgttccatcgcagggtgctctatgcttagcccatcatagattgtggcccttcattcctgcatttgatgaatccagggaaccctctctccaacacccttggcctctctgcaactttctaacatcaggcagagtcagaggcaccatccccaggtgggtgtgttctgaggggccactggattttgacgtatggattctgccacggaacaatcaaattgcccgtacttggcaaagttttgggagagcagaatgcatcactttctgttggaatctgaggtcacagaaacagaggtgcttactaaataaataaataaagggcttaatgaaaaaaattaaactccaagatcagtgtaccttgctgtgtggggagaagagcctatttcttgcatcctgagaatgagtgtgtcagggccccttggcaggttatttggcgcaagtgtgttgaactcaccttaaagaccacagcgaggaggtgcacggggagcctctccagatccaccgcatccccagagttgagctcctccttcagctccttacgggctttctcgttggctgctctcctgaatatcccttccgttgaagggcctttaaggcatagaatagtgagaatgtcctaaaggaaacagcaataggaacaggaaagggttacccttcttctttagtatactgagatagtcttaacaggaatattgatgtcagattttgctttcagtccagttgctgtcaatggccttcctcaaccctgctatttttctaagaggaggcaaattgtgaaagctctaattttgcactttctaaaatcactttggagctctctcctttcaaatacttccatatgaacattggatttcagatcacaaagtctatattctgtttcccccttttgacttttcagaagctacaaatcttcagcattctccactctgtgaagtcagaggaatggcgggaccatagctctgagctcattggcaaatacaactaatttcaatttctggaatggaagcagtcagatattcttctgactgcacgcgtatgtgggagtgccatgttgaagagtggaaaatatggaagatcagtccctacaaacttaataggagaatgacattcagatttcccgagtattttgcatgtccaactgaaaactgaagtaggtttatgagagaatgcacgcctacctggatgggtctggggagtgtgtcactgtcaccgcagataattgacaagggctgatcaaatagcgatgctttcaagtctgtctccaaagccccagaaaaatctgatgcaggggagagccttctcatgagaaagggccaggacagcaccttctttctcttcttaacttctacagccaagaaaacaaggcaacgagaaaaattagactacagtgttaagaagcaaagatccaggtaagaaaatgggtatcgttggccgcataatgtggtcaatagtatgcgatgtgagaaaaataattttgaaaacttgagaaagcaaagggcgtgaatcttaatctagaaaaaccaaccgataaacaaccacactgttaccagggcaaccagttccctaaacag

SEQ ID NO: 37355 - DNA, 2300 bp, Homo sapien
aaaacatatttctgtttcaaaaaatggaggggccctaattctgttgccgtatttgctactaacttttcatcctagatagttccctgggtgcttaactaggcatggtaggtcccagaagaaaaagaaaagtccgtcgatgtaaccatttctgcaggtcatcaaaccattcatgttatgtatttttaaaagatgctgaggctgggcacagtggctcacatctgtaatcccagcactttgggaggccaagatgggtggatcacctgaggtcaggatttccagaccagcctggccaacatggcgaaaccccatctctactaaaaatacaaaaattagccaggtatggtggcgcgtgcctgtaattccaactactcaggaggttgagacaggagaatcacttgaacccaggaggcagaggttgcagtgagccgagatcacgccattgcactccagcctgggtgacaagagcgaaactccatctcaaaaaaaaaaaaaaagaaagaacagtaagtacattaagtttcttacaaaaatttgaaaagtccgtttgtcgggaaaaaaaaaagtttagaaaatacatactagcaatgaatatacatcacatatatattctatgatatatagaacattatagtaatattctattttggctattttataaggaaatgtatatattcagaaattagttatttagtacctactatatgcctagcactaggctgggcacagcgtaaatgccctttttcaattaaaaaaatcagtgagttcactttggaggtttataaaggcaggagagggatgctgaaagagtggtggcctctacagctgccctgggaacactgggtgaactctggcactgtggtggctttcagagagggagcccccagctggaagcctgaaaaccaggatctgtccctaggtccccaccgagccgctaagttacagagcaaatttcgacctctctgtgcttcggtttcccaaagtctgccccataatcacctcctttcagtaaaatgacaaaagaactgacaatgcggaaaagtcttaaaattaaagatgctgatgataaatgaagccaagttattttaaaactttttattgaaaaattacataaatagggaagtgtgcacataagcctagcaccacccagatcaagaatggaccatcaccaagccccccgctggcccctggaagtcattaccatcccctctgggaaactgctactcttgcttccaacagcacagacgacttttgctaattttgtgctttgcattaatgggagccggcaggatatacactttcacgtctggcttcttttgctcagcgtcatattatgagatccaaccatattgttggctatagtcataggctgttcattatcagtgctatacaacattcattccctatgtgaatggatcacaatttatgcatccattctcgtgtcgaggcatttgagtggtttcatatatagcccttgatctacagaaaagatcagaaattctcttatgcagaagagtgatccacaaatgaaattcaccatctctttcctactttaagttggtctgatcaaaggaatttttttgtttgttttccttccgtgtcagaacgacagctgctctgactgtaaattaagtatcaatacttttgaccaggagttacagaaaggaggagggggttactatattgacaactgactcgagggagttttctttctacttccaaaggaaactaacctggctttggacggtgattgttcctcaaggaagggactgtcttgggtttctttctggttctgtaacagtgtcccacatccaggggtgctaatcaacgtgtggtgctggtggacagagcagatggcacgtgggaggggaaagagcacccaaacaggatgcaaaaagaggcacttgaaattaccactttagaaaataaagtgatgtttatgcacagaataacacaatttcttgttcacacatcccacctatgacattaatcagagccttcacctatgggctgaatgtcatgttttccactcctagtagtttacagattttttactttgaagtggaagacacaaaaaaaaaaaaaaaaaaaaaaaaaaaaaaagacatagctgccctaaaaggaatgaggaagcgagagctctccagtgtctggctggctccgtccgtgtgacagcccatgatgttctttccggtctctgtaatattctgaatttccacctgcccgccccttcgcttataatgcagagcatgtgaagggagaccggctcggtctctctctctcccagtggactagaaggagca

SEQ ID NO: 37356 - DNA, 2300 bp, Homo sapien
gaggctgcagccagagccacaggcccatcctggctactgcactggtgttcggtggccgctgtaagaagtaattacaaacggggtgggtggcttaaacaacagaaatctgctctctcagtcttggaggccagaagtctgaaatcagttccactggcctgaagtccagcacaggctctggaggagcctcttccagcctctggtgagggctgccagcatccctgggctgtgggtgcatcgttcccatggctgcctccgtcctcacctggatttctcttgtgtgcgtcaatctccctctcctctgttttataagttacatacatgactgcattagggcccacccagataatccacgataatctctctgtctcagcatgcttaattgctttttaataaaccatgtaaggtgacattcacagggtcagggactaggacaggaatgtctttttggggaggaaggctgtgtttcagcctgccatggctaccatccttccaaatccacgaatgatgggagaaagagacctttccaccagcccgtgttagaagagtcccaactctgagtgaccctgtctaggccactgcagagccctgagccagtggggaagtggggctttgggaaggagtgggagtaaggagggggcctgtcacttggttggagttggggagggagctaccattcccccaaaataggcagagccgggtggctgctggtgagacagaaaccacacagctccattaaatggcatgtggggaaacatgataacataagggagtaatgcaggaaagtgtgtttgggctgggcgtggtggctcacgcctgtaatcccagcactttgggaggccaaggtgggcggattgcttgagctcaggagttggagaccagcctgggcaacgtggggaaaccctgtctctacaaaacatacaaaaatgagctgggcatggtggctgaaacctgtagtcccagccacttaggaggctgaggcaggagaatggcttgagcctgggatatggtggttgcagtgagccaagactgcaccactgcactccagcctgggcggcagaggcagagggagaccctgtctcaaaacaaaaagaaaaagaaaaacaaacaaacaaaaacctttgctgggaagcaggagagtttcctggaaaggaaggcggtaggtttacacctttcctgggtgctcaaattcaaagagatactgtatttctggttttcatctctttgcaattcatttaccttttttttttcctctctgcagaacacaaatccggtcaagttttgggttgtcatgagggagaactgacatagcgctgggcggtgagttcagccaggttatctctgcgaggacaccggtcggcggcggacagcagcacgcggcgtccaggacccggccttcctagagcttaggtcactgtagcctccaggggcgctccgagtccatctggagggccgcgaggcttccaggctggaaggaggaatagggagaaggaggaatagggagacctggggcagtgttacaattacagaaaagggagaggcgaggtccgctgagtccttggcctgggcaacaaggcacactgaaaactgggttccttttcgacccgcatcgtgcgcgccctagaaatgacagccagacggagcagggtctaaggacgctgaaaacccctgacgtgggcgcgccgggtgcgggtagggacgtggaaggactgggctagccacaggaactacagcgctgcggaccgggtgaggggtcccggcccgagtccccacttggggcgcagaggtgtttctgtaaggggacaaagggcactcctcggcgcgatgggcgacttccccagccagaaaatgagagggttagacgaggggaggaacttcctcagccacttggcccggcacagcgaccgccccaagttcagaaccgctaagtcagtccggggcgctccggccccttcgtcccgcgccccgcccgcctccagcccgggccccgccgcccccgtcgcccctgtcgcccgggtcgcccccgccggccctggccccggccccgcacaccggcagggggcgcccgagcgcagctaaaaggctcggcgggaggtcggcggcctcagtggcggagcgcggctgccggtgtgcggccgggagcgatcgccgcggggcaggggcgcggcgggcaccgcgcagagcgcgcagaacagacggacggcggcggggacccgacggcggcgcctcggcactccccagactccggccagcgcccccctgccagccgcaagcacccagccccggcccaccccgggctctcg

SEQ ID NO: 37357 - DNA, 2300 bp, Homo sapien
accctgaggccgccaagtagacacggccactcggtggttgctcccggcaggactgcagtgagggcccggatgccagcgctgccccgaagggaaggcgtagataagcctggcttttccctggccacgcagccccgcccaggggcgcccccctcggcttcggcctctcctgcccaccacgcgtccacccagggcacctctcatcgtccttccctgcctgccagcttgaatgacaacgacttggtggactcagacgaagatgagcgcgctgtgggctccctccaccccaagggcgccttcgcccagccccggccagccctgtcccccagccgccagtccccgtccagcgttctccgcgacagaagctctgtgcaccccggcgcaaagccagcctcgccggcccggaggaccccccattcaggggccgcagaggaagattccagtgcctcagccccaccctcaagactttctccaccccatgggggatcatctcggctgctgcccacccagccacacctgagctctccactttccaagggcgggaaggatggtgaggacgccccagccaccaactccaatgcgccatcacggtccaccatgtcctcctccgtctcttctcatctctcgtccaggacgcaggtctctgagggagcggaggcttctgatggtgaaagccacggtgacggcgatagggaagacggcggaaggcaggcggaggccacggcccagacgctgcgggcccggcctgcctctggacacttccatttgctcagacacaaaccctttgctgccaacgggaggtctccaagcaggttcagcattgggcggggacctcggctgcagccctccagctccccacagtcgactgtgccctcccgagcccaccccagggttccctctcactctgattcccaccctaagcttagctcaggtatccatggagacgaggaggatgagaagccgcttcctgccaccgttgtcaatgaccacgtgccttcctcctccaggcagcccatctcccggggctgggaggacttaaggagaagcccgcagagaggggccagcctgcatcggaaggaacccatcccagagaaccccaaatccacaggggcagatacacatcctcagggcaagtactcctccctggcctccaaggctcaggatgttcaacagagcacagacgcggacacggagggtcattctcccaaagcacagccagggtccacagaccgccacgcgtcccctgctcgtccgcccgcagcacggtcacagcagcatcccagtgttcccagaaggatgacacccggccgggccccacaacagcagccccctcctcccgtcgccacgtcccagcaccacccgggaccccagagcagagacgcgggtcggtcaccttcccagcccaggctctcactgacccaggccgggcggccccgccccacgtcgcagggccgctcccactcctcctcggacccttacacggcgagctccagagggatgctccccacggccctccagaaccaggacgaggatgcccagggcagctacgacgacgacagcacagaagtcgaggcccaggatgtgcgggcccccgcgcacgccgcgcgcgccaaggaggcagctgcgtcccttcccaagcaccagcaggtggagtctcccacaggcgcaggggcaggtggcgaccacaggtcccagcgcggacatgcggcctcccccgccaggcccagccgacccggcggcccccagtcccgcgcccgggtacccagcagggcagcgccggggaagtcggagcctccttccaagcggcccctgtcctccaagtcccagcagtcggtctcagccgaggacgacgaggaggaggacgcgggattttttaaaggcgggaaagaagaccttctgtcttcctctgtgccaaagtggccctcttcctccactcccaggggcggcaaagacgccgatgggagcctcgccaaggaagagagggagcctgccatcgcgcttgcccctcgcggagggagcctggctcctgtgaagcgacctctccccccacctccaggcagctcccccagggcctcccacgtcccttcccgactgccgcctcgcagcgctgccaccgtgagccccgtcgcgggcacccacccctggccgcagtacaccacgcgcgccccacctggccacttctccaccaccccgatgctgtccttgcgccagaggatgatgcatgccagattccgtaaccctctctcccgacagcctgccagaccctcttacagacaaggtagtttattttttcaaacagtctt

SEQ ID NO: 37358 - DNA, 2300 bp, Homo sapien
caaaatacatgatgcttctggttttgataagcagctgagacttgattcaatccctactggaaacaattaggagaaaataatttgctgttgtaagatcaagcaggggaaacagtccctgctggaaccatgtgtttcttttatctgggatgcccgtaacctacagagcccacattccttgagttggagggaagagggattatctacttcccatggctccagctccactcagacctggcagctcactgccgtggacagtccagcgtgttgtactcacaggtgtggaccttggagtcatacaaatccagattgaaaccagctgtaccgcacagctgccttgggaaagttgattaacctttataagccacatatgctcgtctgtaaactgggaacactactctctaaagatattgtaaaaattaactaaggttatgtttgtaaagcaattaacacagcaaatgagaaaaacggcccaaaaatgtacatcagcagaaatattactattttattgcagtgttattaaaatggaagcaaagactttataaacctatgtttctcctcagaaatagcaggtagctttaagtccagcagcccctaacccaagatgggccaccaaatgtaactttcagtctttcaagcactcatgggacatttaaaaatacttcatgatgtacttgacgataaaggaaatctcaacaaaatcaaataatttaatattgttaataacacaagtctgactgaaatagcacagaatttaagagcaacaaccaaaaagatagccaaaaagatcatgtgttttatcagtgtttcaaaagctgaataaataattctaaataatttataaatcaaagaaaatatcataatagtgaatttaaatattttgaactaaataactgtaaaaacactatcaaaaattgtgggatgtagttaaaggaatatatggagggagatttttgactttaaatgtttaataaaacagcgagttgagtttcaatttaagaagtaaggaaaggcgggcagatcatgaggtcaggagatctagaccatcctggttaacacagtgaaaccccgtctctactaaaaatacaagaaattagccgggtgtggtggtaggcacctgtagtaccagctactcaggaggctgaggcaggagaatggcctgaacccaggaggcggaggtttcagtgagccgagattgcaccactgcactccagcctgggcaacagagtgagactctgtctcaaaataaataaataaataaataaataaataaataaataaatataaaaaacaaaaaaaaaataaaaagaaagaagtaaggaaaaaagcaacagtgcagacccaaaaaagacagggacagaagtaataatgataagagcaggagtaacaaaacagaattttaaaaagccacaggggactaacactaaactaaatctgagcactcccagttttctcatctatagaaaggaggggatagtattgacctcaaagtaaaggtgtgagggacacatgccgtaatgggtgcaaaaggactttgtgaaccgccgagaactattcgcatgcacttccatttttattttgtttattcaacacatatttactaattacctgttctgtgccaggtgacttgtctggctgtgcgggtacaatgcctccttggaccttactctctataggagttgtggatcttaagcgggtcactgtatgctgtgcaggagatgtgcactgtgtaaggagagcgcatggtggagatatagcctactcaaggatgttaggaaagtttggctggaaaatgaggttcaagcagagatcaggaggtggagtggagggagaagtactgtgagcaaagggaagaccaagtatgtgtgtaaagagcaggaggctgggcccaaagtgtgtagtgtggtgggagatggggttgcaggtgctggaaggagctgtgcaggctctcataggccgtgtttgggttcttgcattttaagagcaatgagaaactgttctgttgttttaaccaggggacaggatggattggaaggagacagaatgaatgtaggggattatttataaggccatgcatggtccaggtgagagatgagatgacagtggcttgaattaagatgacaaaggtagagatggggagaggtggatgaacttgagagctatttcaaggataaaatctaaacgcataccctggagttcagggacgtggattaggacaccctactggatcccatggagaaggatgattcaagggatatctccctgggggggtgtggttcttgtttgtggacccactggtttat

SEQ ID NO: 37359 - DNA, 2300 bp, Homo sapien
gtaatgatgtagctgatgacaggtgtgatgttggagattcttctacctgactgctgctatcagtcctaccagcccccaacgtttggtgcttgttctaaagggcatgtcctaggagtcgctttaaactctcaaagtatcactctctatacaaacaagaagtgcaagtaagtagcctgagctcagcctcccaataggaatatttcattatcactagatcaagtctttccattacaatgactgatctgtctctgaatcctgtggattcatccttcaaaatgcccttttcttccagttctcatagctagtgccctaaaagtgacctgcagtacctcctgctgagacgaatgtaccagcttcctaactagcctgcactcccttcatccccccaagtcagtgccagaccaccttgcctgaaaaaccactttcagtgtgtctcacctcagcagaaatgtttctcagcttccaattaacaatcacatcaaacccctgctcttgtctgcgttttaagggtatctataggccgggcgccgtggctcctacctgtaatcccagcactttggaaggccgaggcgggcagatcacttgaggtcaggcgttcgagaccatcctgaccaacatagtgaaaccccgtctctaccaaaaatacaaaaaaaaaaaaaatagtggggcgtggaggtgcacgcctgtaattccagctactcgggaggctgaggcaggagaatcgcttgaacccgggaggcagaggttccagtgagccgacatcgcgacacagtactccagcctgagcgacagagcgaggctgtgtctcaaaaataaataaataataaattaaaaaaataagagtatctataacctggtcccagcctgaatttcctttttcaccccaacacgtagccctagttacattcttctgacgtctgtaaacaagcccagcccttcctgttgtgaagccaagttcaggtggttcctcttcgcctgactgttttcccattccacttaccggaagcctagtcatccttcggagggctgtacgggggttgcaagaagcaacggaaacggttcagcacctgctaccttccatcatattcttttcaataaaggggcaactcccgccaatggcagtgtagatttcctaacctctacacatggaagattcacaccattcaggattgttgtttaactgttgagagagcacttgatacttaacagcttactaggctacaagacagcgcaggaaagaatcctctgttgtccttttatgttatcctgaacagttggttcacagagttactgtaaacacacaaaacatgactgccagggcttagtagtgaggaaggtgggaactagtcctgactcagttaactgtgcccaggagaagctgcttaacctcaaaggatttcactattactagaatcaataataccaaccctaggggtaaaaataaagataaatgtgtgcaaatcctgcctgcagtctcgggcacgtcgtgggtgtccaagaactgttcttaggcagccggtggggacaaagtctgtgtgcctcctgtcctggaataggtcccaaggtcggcttacttgcaaagcaagggtacggcgcaagagtactgaatacgggttggaagggcgctggctctaccctcagctcataggccggctgggcggcgctgaccagcagctaggccccgtcttccctaggaacggccacgggggccctgggagggtatgaatgtctttttgcagtgaggcctctggaccccgcggccccccggcagcgcaaccaaaactcaggggcaggcgccgcagccgcctagtgcagccagatccccgccggcaccctcaggggcggagccggaggcagggccttcgggccgtaccaactccacgggggcaggggccgcctcccttcggccgcgcgccactcaagtacggcagacaggcagcgaggttgccgaggccgaggctagcctgcagcctcctttctcccgtgccctgggcgcggggtgtacggcaagcgcgggcgggcgggacaggcacgcagggcacccccggggttgggcgcggcgggcgcggggcggggcccgcggggggggggggcggggcggcggtgcccttgcggcgcagctggggtcgcggccctgctccccgcgctttcttaaggcccgcgggcggcgcaggagcggcactcgtggctgtggtggcttcggcagcggcttcagcagatcggcggcatcagcggtagcaccagcactagcagcatgttgagccgggcagtgtgcgggtgagaagaaaggggacccggtc

SEQ ID NO: 37360 - DNA, 2300 bp, Homo sapien
tgggatgcaaaacacacctacacaaagaaccaactttccctatgctcagctccgggactttagtatgcagatttctgtatatgctcgcagaaggtcctaaatccaatctcctgcatataaggaaagactacactatcacaacacagatacactactagagtactgtgttcaaaagctcagaggggccagtggtggtggttcattcctgtaatcccagcactttgggaggccaacctgcaggcggatcacctgaggtcaggagttccagaccagcctggccaacatggtgaaatcccatctctattaaaaatacaaaaatcagcaggggatggtggcgcatgcctgtaatcccagctattcaggaggctgagctgagagaatcgcttgaacccaggagacagaggttgcagtgagctgagattgcaccactgcactccagcctgggcaacacagtgagactgtctcaaaaaaaaaaaaaaaaacccaaagaataattattttttctgtgtatcttagttatattagttaacagttaagttcatttgtttcaatttgctttcaaccttaggatttactttgtttccttttttatttacttttttggctatgtaaaactaaaagttcaaagacagagaaatcttgtctccaccccccactctttataggcaactaaaaatgttaagtttccaggatatccttccaattcctccccgaaaataagcatatacacataaatattcatattaaatataaatatatatttttatgtatttaagtaaatacataaaagcatatatgcttatttttgcttttgaatacagtgaatacttactacacttaaatatttaagtgaatacttaatacaacctgagactcattccaaagcaacacacgattatttcctgaatctttttaatggttgcattgtgttctactgtatggatgcaccattcccaatcagttccctattaacggatatttgggttatccctaacttttgctatgacaaatagcactgcaataaccttgtatacctattgtttccatgtgtggagctgcaccttcagaataaggttagggttagaagtataactgcaaggtataagaataaacacaagtaattttgtactccgtggaacttgaaccatttttccactcccaccaggaaaggtaatttcaacgtgtatttccattgtaagtgaggtggagcgactttctatgtttaaagaccattacggtattttttctgagaatcatctgttcatgtccttccccattttctcctttggcttttgcactttttgttttcaatttttgagagctcttgtgatacgagttgcaaagattttctccagaccgatctgattcactggaaatatactacgaccatctggaatgtactttaatcttatcctaataaatcaccttactacaagacactcctttggggatgaacaggtttgataaagccggctaaggacagaccaatcaaaagaattacgtgctcttctagtaagtgtttagagactgtttcacgttctccaggtaacaccgccattactcggcggtccagatggcagtcttacttcagggagtctactccacttgcaggacctctttgattgagttcactaaacctcacagggccgccttccccgtgttccagttagcaaggggccctcaacgccgcggacacagcgcaacctccgacgccagagaacaatagctcctcgatgcgtctccagagatgtcaaggaggaacgaacccagcggccaggagactgcgcctcacgactgatgagagggaaggcatcggtttctaagttctcaaaacttacaggtgagcttctgctaagagtaaacgcccgcggctcgccgcccacggcctctctcttgaggtggcacctggtcctccgacacgcggaagcatcacggatgagcgtcacgaacacagagcggccaatcacgcgccgccttcgcccagatccctccgcacgaggcagccccgcagccgcaggtggccccggcgagtacttccaccttcccttcccgtgatgccctggggctgacctccgacctcgctggcccgcccctcccctcggccgcttcccttactgagcttgctgagctccggggcccgcggagctcgcgccaggctcctgggaaaggacggggagtgttaccggggagcagctgctccattgtgcctcgaggccccgatcgggctaggccgacggcctccctcccttcacctttcctctcctggcggggttcggcggcgggcgagtgactgcggccac

SEQ ID NO: 37361 - DNA, 2300 bp, Homo sapien
ggcgggaggcgggaggcagtggcgctggcctgcggcgcgttcggaccggctgtggggcggggcagggcggagcggagccgtgcggcggggcggggccgggcggcggggcctggtttcctccctcagcgccattttgtggcagcgagacccacaaataaaggggagcgcaggggttgcggcgggactaggagcgcggcggggccggcggcagagctgtccggctgcgcggtggcccggggggcccgggcggcagggcaagcagcgcggcctcggcctatgcgaccggtggcgccggcgcggcttctgcctggagaggtaggcgcgggccggctggcgggagcggacgcgggggacctccggggcctgagggctgatgcgcagccgcccccggcgggtaaggggcgggcagggcccgaaaggccacacgggcctggtgcggcaccggtctctcgtgagccgctctaccttcccgcctgcggggaacacttccgccgcttcgaggccattttatctctgtcctccgtccccaaggcccgggttgagaggggtgctctggcggccggagagaccggccactcacggaggccggaggatgccctccccgggctgagcggcggcgctcgttttttcctcgcctcggggtcgcccccttcacctcccttgggcctctcctgaggacctggcggcactaacgagttcagcaaggaaaaaaagaaacattcgttccctacatttcatgtcacgcagtaggatgttactacgttctcttgtagacttccatttttaaatgagtataagcattctgaggaaagaaactgaattattgcagatttttgtgaaatccaagtcttaccttggatccctgtgagacagttactagatttttttttcaccgtttttcataagtctgtgtacacgtaatggaaaagcccgagttcttgttttgataagaaagtcacttggttgtttgatcccaaaggattagcttaacattatcaaggactagcataactgtgattatgtaaaaaaaacaaaacaaaacaaaaaaactattatttagtctggtagggaaatacttctatgagtatgttacaattggaagttgtatttgtgcctattttatctagttttagttaattccattgcttcggaagataagtggacgtcatagatccatcgcaagttctcgttttttggattttaaaattttgaccattaagttttctacgatagataaacatgttgtggacatttaaaaccgtaatttaaaactatgagcgaaaaatcttttcaagatggatacattttaattcattcaagtagcatctgattagccaagtcggggaaagattgcagtccgcaaagctggcttgtgataaggttgaggttacattttaagggtttgggtaggtgtgtttcttacagtgcttttatatgttaaggtatcttaagcagacacatggtttaaaagttcagtatttttagtactttttcattggcagaatttggacaagctaccagaattgctaactcctaaaggataaaagtaataataatagtgtgtcccaggcactgcttatttttacatggctcttttatgtctagcttttccaattcaacgttgagtcatgtttgctgaaaatatttttgtgtattgtttgtcagaaataagctggtagagatgaaacacaatgtgtaaaaagccctgtgatgtggagatgagcattgtcacaatttgtacagtacattaaagcgttcaaggtctcttatggtcttgtatgtagtattgaatccccttgaatatattgtttagcagttttgatcattatgtatttgcttcttgctcctcaaaattgtacgttagttagtaggtccttcagcaaaagaagactgaagatagtattttggttttattcttgtttttaatttttttagttgtctccaacttttctgcctctaaatattttgcttcttgtagttactaagcttaacacagaaaaacttttcagtatctccacaatagtaaacttcattgtgtattgtgtataacaagatgttccatctgactaaaatatattgctgtaaatattttctgcctttgaagatgtagttaatagaatttaatcttttctaagtgcacattgaagttgccttttatgttcatattatgttcatattttatttgaaaaatctatagcatttttattgtgctgaaagcattaatatttgcagcactttgtgagacaggcaaaattatctttttgctgacttggaaactgcaagagttaaaagacttgctt

SEQ ID NO: 37362 - DNA, 2300 bp, Homo sapien
ttttcttgggtatcatcaagataatttctatgcatatacagttattttatgtatattgttttaaacaaatgtgatcataccataaacacagatgagttgcaccttgtttttttttacttggtctctttggcatttttccattttttaatgtatctagacaactacatttttaatgcttacatagtatatttccgttatattaaggaatcataatttatttgaatcacttataaatggatttttttctataaaattggctgtaagccagagtatatcaggtactataaatacatcactaatttgaaacaaataatggctcaggcaatcccgtctggaatatttccagtggtggaatgggttttgctttgggttgcgtgcacgcgcacgcacgtgtgtgtcttcgctttactgtttttctgttctaattttgaggaagaaagattcccagaaataacctgtccagttcagttaaaatatttcattcatgtgagaatgcacacattttagagtgtttagaggtatatctttcaaagtgctttctattatgtttgtgggttaatcgattttaggaatgggttgatttttttgtttgtaattttaaaaaattatttcaaaaacaactacttgtaattaaattattttttcaaaactgtgattttgttaaaatttattttactaatcactagttttaaacgtgatatgactatcttagcttagacatttatttattaaaaggtatgactttttaaacgaaaccttttttgcattagaatttgtgacatttttatatggggttaagtcaggtcacagattaatgtatcttacagttgtctttttctactctttaaaattcatatagtaagaaggttagttgtaaacaccaatgaaatatatatactttgcaagaagacagttttgagagcataggcagtaaagtggaaggaattccattgtttttgacaatcttgcatatctctcattttcccattgtttaatttctaagtggatgttcagtggaggctaacgcctgagagtgctgatgggaaatggtggaaatctggagctacagtagcagtgaacaagaacaccagctaataaagttatcatatcaaagaataaagcctttaccacatgctcactggtggctttcaccctcgggctcctctgagcagtagtaacccaggttgaactcttcaggtattttctggaagaaagcttaattacaaacttttccttgaattacattaggttagaaaacatgcagccaggcacggtggctcatgcctgtaatcccaacactttggaaggctgaggtaggcagatcacttgagcttaggagtttgagaccagcctgggcaacaaggcgaaaccccatctctactaaaaatccaaaattagctgggggtgctcgtgcacacctatagtccccaggtactccggaggctgaggtgggaggatcacctgagcctggggacgtcaaggctccagtgagctgagatcacgccactgcactccagcctggcaacacagtgagacccccatctcaaaaaaaaaaaaaaaatgctgtaggtgaaagaaccatgcaacacttcaaagattgataaaatatttacaaaatgctctcatttttaaacttataaggcatactgaagtagtgtatcaggcaagtgaaagcctcactagaagaaggaaagactagaatttaaaaaatgttttaacccataaggtcatcctggacttaccccaaggacaagaatgtcacactgtctttatccaagtctcaaaggtaaatatcacaattatttacttagatccctttaaaagtgatcatttctttttttttcttttttcataaataattacaagaacaagcaaataatttctccttttattgctgaggctaaagaaaagcagtaaaattttattgggaaacatttgagcttttcattacatatttgcaattgctatgtatgtgcacataggttcagtagtatgttgcactagcatttggaaactataatctgtggaaagtgtgacactcctagattggcagatatttgcgtgtttgaattgtgatacgtgaccactggtcttatttttgtgtcaaaaggatgatcttttccaataaagtcttaagtctttaaaaaaaaaaccttaactgctgaatgtgcctcaattaatataatagataatattcttgagagttatggaagatggatgtaccagaaaacttccctctctcctcctcttttttgagacagggtccctgtttccgaagctggaatgcagtggcatggtca

SEQ ID NO: 37363 - DNA, 2300 bp, Homo sapien
ctcattcaaatgtgctaggcactggccataaagaatattggtgttcattcataactgcctataatgtgctaggagctgtgcataaagcagtgtaacaggatcatcttggaaagcttatgtagtcagtagaggagacagataaactaggaattacatggtaagttgaaagaggaagttaggggtaagatgctgcaccaaatgcaggagattggaaggtttttctggaagaagtgatgtttagggggagtttcagaggtaaatttctggtttggttaacagaagatagtttcactgctcactgagattacagaagaaacaggctggaagagtttggtttcaatatgtcaaatttgatgtgcttataggaaattttatttatttgagacagtttctctctgtcgctcaggctggagtgcagtggtgtgatctcggctcactgaaacctctgcctcctaggttcaagcgattttcccatgtcagcctccccagtagctgggattacaggcgcacggcaccacgcccggctaatttttctattttatggtagaaacgggatatcaccatgttggccaggctggtgtcaaactgctgacctcaaatgatccgccctcctcggcctcccaaagtgctgggattacaggtgtgagccaaggtgcccgacctgatgtgcttgtaagaatttaaatgaagagggtcagtcagcttaggagacgaggttagatgtaaggatttcagacttgtcagtatacaggtggtgattgatgccgtaggaatgactggtattacccagggagctggtgcaaagtaggagccttggggaacatgttaaggggatgtgagagtaagcccacaaagactcagaagtggccagggagtaaggggaaaatgggatagaatagagcaaaagccacgggaggcattccttgaattccttggactcagatatgttaggggacaggaaacacattgaagacaactgaagagacttcagtgtgctgctgagttcttagcagagtagacagctgatttcaccactattccagaccctaaagatttctcctgaaattgcactgttatgcaatttttttccttctctattgccccacctctggggcctacactctttaccttctctgatttatctgacccatccgcatatctctgcaaagtcttaatgtaggtttccaggatttaatgattctttcaatcaactttaaagttcttcaggaagattctccaggtccgtcaacagttttccccttcatgactttgtgacaaagctttcttgttccactatccaggtgttcccaacaagttgctgtaacggtggcccctcataagcttgcctggaaaccctagaaagctcagaaaaattatgaactttgcccagtaagaggctgggaagtcagaaagggttttaaacaaaactgaccccacttgttacatgctcctttcactgtccaaacgtcaaccaaaggaacttttgtgacgctaagacgctcccggcgtcctcacccgttcacagccagagttgatcttagaaggcagggggctcgcaccgagacgctcctagcaagcccctcacgcgagcgaatgactggcgccaggagaaacgcataggacctcccgaagccgccgagagcaaaaggacccatcagagctgtgctgagacccgccgcgggccgggctcgcactcgagattctcgcccgtgggattccagtcctgagctgaacgagagataagtctttgtcaccccccagtctttactgtttcgagaaaccctaagattttttaaaaaaaagcccaagacgtcaagtcggggaactccaacattggggtgtccagaaacactggggtttcaggcgctctgtaaatgcgtccgaggtccgcggttctgcccgcaagcccagaccccggcctcacttccgccccgcgccccgcgccccggcctcacttccgccccgcgccccgcgccccgcgccccgcgcgcctccgcccgcccctgctccggccttgcgcctgcgcacagtgggatgcgcggggaggtggtgcgcggggaggtggagggcgaggggcggggctacctcaggtcccgcccgcggcaggcctgtgggctgcgaggaggagctttgcctagcttgcaggcagcgcagggcagacggcggcaggagaagcaagatgaatgcaggctcagatcctgtggtcatcgtctcggcggcgcggaccatcataggtgagtggccggcgggagccgcgcagagtccgaggcgcctgctgcttcggcaggagcgccgagggc

SEQ ID NO: 37364 - DNA, 2300 bp, Homo sapien
acaaaaaaatttaaaaaattagccaggtgtggtggcctgctcctgtaatcccagctactccagaggctgaggtgggaggataccgtggagcccaggagtttgaggttatagtgggctacgattgattacaccactgcattccagcctggacaacagagtgagaccctgtctctttaaataataataataataattaattaattaattacgagtgttcaaacccaaagaatcagaagatgggggcactctcaggactcagctatattcctctggggagtgatatgccccatttgcaaggggcatgatgtggcacctattttccaagctcagaactgagccctaagagggcagggaacttacctgtattgttggaaccatactcccagcactaagcacagtatggggcacataggaggaactgaatacatttttgttgaatgagtgacactttgaggtagtaaggaggagcaggcatactttcctatgcgtcaggctggccctgctgctgcttcttcttcttctttttaaaaggagtctcactctgttgcccaggctgaatggagtgcagtggcacaatctcagctcactgcaagctccgcctcccgggttcacgccattctcctgtctcagcctcccaagtagctgggaatacaggcgcccgccaccacacccggctaattttttgtatttttagtagaaacggggtttcaccgtgtcagccaggatggtcttgatctcctgacctcatgatccgcccacctcggcctcccagagtgctgggattacaggcgtgagccaccgggcccggccggccctgcttcgtaagaatgaaaaggcagtgggccgcctgtagtcccagctactcgggaggctgaggcaggagaatggcgtgaaaccgggagacggagcttgcagtgagccgagatcacgccactgcactccagcctgggccacagagagagactccgtctcaaaaaaaaaaaaaaaaaaaaaaaaaaaaggaaaagaaaaggcagtgtaggtggtgtaggtcagtggtctaagttcattcacaaaaagcatattaatgaagctaagtctttttgtttgtttagagaaggggtctcactctgtcacccatgacggagtgcagtgacacaatcactgcagtctcaaactcctgggctcaagtgatcctcccacctcagcctctccagtagctgggaggcacaggccatcatacctggctattttattttttgtagagacggggtcttgctttgttgcccaggctagtctcaaacttctggactcaagtgatccttcctcctccgcctcccaaagtgctgggattacaggcgggagccaccctgcctggccaagaagctgagtctcaagctggatagaagctactgacagggctggaagaagggggccaacaggaggaatcataacagagggaactctgagcaaaagcaaggaggcaagaacttgagtgagtgagagagtgtgtgagtgtgtgagagtgtgtgtgtgtgtgtgtgtttatgggctgtttctaataagcctgacttctcctggaatcactgagacttacctgctgccaagacatgtccaaagatgacctcagacacatcttccggagccacagtggccctcttcaagacttctttgatgacagtggagcccaggtcctggacaggaacagcagctaaggcaccattgaaggaacctacaatagaaaggcggagagcgtggacatcacaagcctgcgggtaatacgggaaccacctacgagcaggggagcctcatgaccctgtttggcaaggccacgcgaggaggcagtgccctctcctcccacacgttcctacacctgctggtctgagcaaaggtcaaggtgggtgccacaactcgcagcagccgagggctggacaggcgacctccagaacggcctagggacgccgctgtagcccttctatttccccaaatccgaaggactggatgcgaccccatgcttcccaaacaaaaggaaccggcgggtcaagggcgttgaaaaccatgcggcacgaaggagacgaagtcacgacttctagccattgtgtgacagcccgaccccagcccaaagccgggctcagaccacctagcagttccgcccctgccgcaggcattaccgatggcgcctcccggagccggccaatcaggggccccggaggagaacacctccctacgccaaccaatgggagaggcaggccacgcgatggctctaccccgggagccaatccaagcacgagggacggagtgcgcacatcgggagaggagag

SEQ ID NO: 37365 - DNA, 2300 bp, Homo sapien
acggaaagggagaagaatgtagcttgtggtgttaggttgcattttggagaactcaaaatgcagtatgaactcaaggtgttaccatgagtgtgtgtgtatatgtaaaattataaataatacatatggaagtttctactgaacagacctagaaacaatgacaaaccagtaacaacaagcagtcctgacacccagatcttctaaatacatttatccactaaaaggaactaaggttgtttggagaaatggccctttccaaggctagggaaaaaatgctaaaaaattaaggacatgctcagggacatgttgaaagcacacaggaggcagcctacggggcttccactttcctgtagtggaattttgaacaatttgagcatcagagtcagtaatgatagtaatgggttgtaactgcccaaattttgaacaatttcagcgtgcaaataagttatgatagtaatgggttgtaactgcctaaattttgaacaatttcagcgtgcaaataagtaatgatagtaatgggttataactgcccaagtattgaaaaatttcagcatcaaagtaagtaatgagagtaatgagttataacttattcaataaaatgaaaatgtatgagtccatcctgatataaataactgaataaatgggagaaaaggaaaaggttttctttgtggtaaaatgccaattaatatcttaccaatagaaggaatgttggagttagaaagtcatgaatgaatgctaaaactagtgggtgaaaatatgatggggaagaagatatttggataatccaaaaagaacctctgataaattattgattacttataaatgaaaaaatggtacctttaaaagctagaaacctggtgaataccaaaccattttaaccaagtgatcaaagataacatcacctgggataaactgattgtcatttgtgtcctaataagactcactgagaaaaatcatactatcattcagtggtatacctgccttttggcagaatcttaatctaattctgaggaaacatcagacaaatcaaaattgatgacccttaacaaaagaactcgcccatgttcttcaaaaatatcaagcttaagaagcatagtctgaagaactgttacagacaaaagcaaactagagagattgatagttgtacaatgcatgcttctttattggctcaaataaaggagctagaaggacattactgaaatataggtgaaatttgaatgtggaccaaggattagataatagtgtttgattcatgttaaatttcctgatttttgttttgttttgtgagacagggtcacccaggctggagtgcagaggcacaatcatggctcactgcagccttgaactcctaggctcaagtgatccttctgcctcagcctcccaagcagctaggactactagctacatggcacacacaccatgcccggctaaatttatttttaatggagacagggtctcgctgtgcccaggctggtctcaaactcctgggctcaagtgatcctcccacctcggcctcccaaaatgctgggattacaggtgtgagccgccacacttggcccaatttcttgagttttataactgtgcttatgtaagaaagtggccttgttttggggaagtatacactgaaattaaaatttaagagtaagaaggcattgtatctccaactttctctcagatggttcagaaagaaaatattaaagcaaatggagggaaaatataaatggtgactctgggtgaaggaaatttctgtaagtttacaattatatagaaagggaaggagagaagtatgactcctgagagtcactgcaacatttccaaaccaactgccagtggcaggcagggccaccccacacagagcattgcacaggccaccatgagcctgctagcatatgtggtcagtcagtgcttggtcaaatgtggacgacttgagctatcaaatgccagttcatgaaaatgttagttttttgctgtttttctcctttcccagctgaaaatgtagccaaaaaatggcaagtgagtagagaagatcaggacaaggttgcagttctgtcccagaacaggacagagaatgcacagaaagctggccattttgacaaagagattgtaccagttttggtgtcaactagaaaaggtgagtatatcatagtggtttaaacatcaacctatttataggtaagagtaacatctaaaagagtaatacataggaatctttagaaattatatcttagttatgtttttcaggttgcaaatatatgtcctggatacatgaatgtggggagggggtatgctgggtttacaggaca

SEQ ID NO: 37366 - DNA, 2300 bp, Homo sapien
tcgcttgatgccaggagtttgagacccctttgggcaacatagcgaaacccatttctacaaaaaataaaaacaaagccggatgcggcggcgcggacctgtgcttggagaatgcagtgagctatgatggcactctcgtctgggcgacaggtgggaccctgtccctaaacaaagcgagcctatttggcacagctttgatgcggggtggaatctgatggcggggaaaaaaaaaaaaagtaataaccaccaatttcatgctctgccacttcgtacagctataccagccttttccttcagattctgcaagttttttgctcattaaaactctctttatctgtgaggagagaaatcggtagtcaacggggaaggtggtgactttcagatttgtttacgaaaaaaattaggaatctatcaagaaacagtaagctctgtaggtatccaaaggcctgacagcaaacgctctgctaagttagcgctgccgtctcctggggtcaatgcactcgagtggcgtttcctgggctaactctactgtaagaagctgtcaacccggatacggctggacgccggacgcccgacctcgactgcagctgcgggcggacagggcaccgggctcatccgagggcgcgcggatggacctactctttttctggtaaatggtcctaaaataaaacctggcgtttaacatggacactcagggggtcgccctgaaacaaaagggggtgcgaggcgtggcccgcacgtgcgagcccgggaggcccgctttcccgcggagggcgcgtttccaacgccgccccggacaccacatccacgcgttgccggtctcaaaaccctgccgcgcgcggcggggctcctcctcgctgtgggaaaagtggggccacagcgccctgccccagagaacggcgggtgggctgggtccggctgcggggccccgaggccctttctgcggaggtaaaggagagaaacgagggcagccggggtccggtcgcggtgggactcggccctccccggccgcaaacccgacccaggcccggcccgcccttaccgttttgggagcggatcgtttccccagtgctgcggtcaccgaacacggacaaaggcccctccatcttgacggcagcgatacacgtcgaattctgcttacaccgcgggcaaccagtatcgcggcccctcggccgaccggcgaccacagcagtggctgcgacggcgtggagcgtacccgagcgatgtcccaggagctactgggtaacacaccaccccacccgcttcccggctgccccggcccggccgcggggcacggcgggaaggaaaaagaggcagggacaacagggagagaaacaggactgtgacggaagtgaggctccggggaaggggcggggtcggcatttttgtccaattagatagccgatgggaagggcgcgaaagcggagaacggaagtcggatgttggaccgctgggaagaggttgaaccttcgcctcaaacgatgttgcgcagacgcagtgggccattctagtgccttctagaaaaggttgtaagaagggtggagcttggagctggggtgtaactggaggggcgggcccttctccaagttagagttggggttctgagcgagtcgtgcgttttaggtttagtgtcttttccttgtccctgctcggggagcgtgaggcagatcggccggctttgctccaggcctcaggagtgtaagtttaagggcgcgaacctgggtgggacggggcagtttttccagcgggccatacgggaaaatttttggttcgaggaagacaaccaccctttttaaggagaaaactgcatcttgccctgccttattcctacgcggtgcccaggtggggtgtgtgtggaccagtcgatgaccgcccaagctctccgagtagaaaacccaaacatggttttgtggggtgtgtgcctttgaccccggacttaagcaacaagcgtggtcttgggcgtagctacgaggtggttggtgggctccagggcctgcgtgcccctcgacgtgagcgatgattggcgatgaaggataacagatcgccttctcggccactcagtggcaggggacttgctacttccgggtcggtggcgtctggcgtggagagtttggggatctacagcagccaaaggcttgtccctgactttatatggctgctcctggcgagcgactgagtcgtccgtgaggaaaaagaggcgaggcttttccgagatcgtctcagcgatggcgcttcggtcgcggttttgggggttgttctcggtttgcaggaaccctggtaattagtcttgccccccttctccc

SEQ ID NO: 37367 - DNA, 2300 bp, Homo sapien
ccactggagtagctgggattacaggcgtgcaccaccacgcccctctaatttttatatttttagtagagacggggtttcaccatgttggccaggttggtctcaaactcctgacctcagatgatccggcttcttcggctggctccctaaagtgctgggattacaggcatgagacaatgcgcccagccagaatgatcttgaaaaaccaattcgggctcaagctttaaatcctctcgtagtttcccactataatgaaaagaaagtctaaagtgctcatcttgacttacaaagctaatcatctgtcgcctccttacccctccatgttcatcttgggccattcatcctctgcccattgagcttcagatccacaagcccttcagttcctcaccccagcagtttcctttgctaggactgctctttctggcagatgactaggcttcttcctctttcagatctcaccttcttaaatgtcacctcagacaggcaggtatcctgtccgctactgtaacatcctctttaaatagcccccatcacacctatttgttgtttgttccagcccctccgcgaaccctgcctctacccgccgcatggcagctacctgggagagtgcctggagttgaatgaatgaaaatagtctgtagggtgcactgcccttgtcaatcacaagcagatttaattacctgtgccagaactcacgggagggaaacaccgtccgccagccccgctctttcctggctacagataaaagctccaggttccgggggttccggttggtgaattctggggcgacagcttcattttccacagggtccacttcaggtttcgctgccggctcggagctggttgacagggctgcgaacctgcaccctgggcaacgggaaaaaccgcacagggcttaaaaatgacggatatggacagcgcacgaacccgctctaacgtctatccgcttttacacccccaatctttaggcccgaggggacgaaaaatacgtatgcccacagggtggagtcagcactgaccccgtccttaacttcctactgtggtcttcgcagtgccgcgagctctatttcgatccggcacgtcgaatacaaaatagaacccgcacgttccaatgtactgtgcaagcccaggcgagtgagctgggagaaggggggcaagactaattaccagggttcctgcaaaccgagaacaacccccaaaaccgcgaccgaagcgccatcgctgagacgatctcggaaaagcctcgcctctttttcctcacggacgactcagtcgctcgccaggagcagccatataaagtcagggacaagcctttggctgctgtagatccccaaactctccacgccagacgccaccgacccggaagtagcaagtcccctgccactgagtggccgagaaggcgatctgttatccttcatcgccaatcatcgctcacgtcgaggggcacgcaggccctggagcccaccaaccacctcgtagctacgcccaagaccacgcttgttgcttaagtccggggtcaaaggcacacaccccacaaaaccatgtttgggttttctactcggagagcttgggcggtcatcgactggtccacacacaccccacctgggcaccgcgtaggaataaggcagggcaagatgcagttttctccttaaaaagggtggttgtcttcctcgaaccaaaaattttcccgtatggcccgctggaaaaactgccccgtcccacccaggttcgcgcccttaaacttacactcctgaggcctggagcaaagccggccgatctgcctcacgctccccgagcagggacaaggaaaagacactaaacctaaaacgcacgactcgctcagaaccccaactctaacttggagaagggcccgcccctccagttacaccccagctccaagctccacccttcttacaaccttttctagaaggcactagaatggcccactgcgtctgcgcaacatcgtttgaggcgaaggttcaacctcttcccagcggtccaacatccgacttccgttctccgctttcgcgcccttcccatcggctatctaattggacaaaaatgccgaccccgccccttccccggagcctcacttccgtcacagtcctgtttctctccctgttgtccctgcctctttttccttcccgccgtgccccgcggccgggccggggcagccgggaagcgggtggggtggtgtgttacccagtagctcctgggacatcgctcgggtacgctccacgccgtcgcagccactgctgtggtcgccggtcggccgaggggccgcgatactggttgcccgcggt

SEQ ID NO: 37368 - DNA, 2300 bp, Homo sapien
ccactacagccatcaaaagagagcatctggaagaacagccagcttggaagttttacagcaataatgttgcagtggaatattatttgtagttaaggtcatcctcctcccctttctgtttttttaaatcaagaactacgttctgcccctctcttgggcttcagaagcatctaagaaaagcagtcatcaattataattaactttcaaagggcaagtcagaagttgtttataaattacaaaataaaggcatattatgaactcttattttctggttatatgacattgtctgagctcactgtggcagtggagcacatatgaggttgatgtaaagcacttattactgtgtctagttcatggcgagtgatctcagtgaatgacagttgtttgctgctcggagtgtgggttgttttttaaaataggaaatgtcagtatcaatctaatactatagaacagtcagtatgtgaaaatgaaaggaccaaatgccaacctcacttggactcttggttcccaacagtaagagaaacaaatttgaaagaggaaggaggtggcatcaggagctgaaagcagaggtggaaatggttggggttagtgggcgctcaatttgccatgaagtgaacattttattagataggagatgaaacttgaaatgcatgcaagttaatctaaaatttgagcttgggtagatgggaatcatggcagttctctgaaaggagctgattaaggtgttaatttttggctatttgataaatgtgagaaaaaacctgtaggcagttaaggtggcttctagagcattgttttccagtttttttaatgtataccccaattaaatgtttgtttagaagtgaaatatgttacttctgccaatttgagtattcaatgtgttattttaaatggaacacatctgtatgaagtatgatttgttctgagaggtcttcagaatcaaatggcttaatagtccccttttgcttaattaatgtcccggagaggcatttaaaagtataattgaagatcggatgcagtgcctcacacctctaatcccaccactttaggaggctgaagcaggtggatcacttgtggccaggaattcgagaccagcctggccaatacggtttaaccctatctctactaaaaacaaaaatgagttgggcgtggtggtgcatgcctgtaatcccagctgttcagaggctgaggcgggagaatcgcttgaactcaggaggtggagattgcagagagccgagatggcaccactgcactccagcctgggtgacagagtgagactgtctcaaaaggaaaaaataaagtataacggtaatgttttctccgctaaccttaaagattgatttgagcacctcactttgaggaccatagttccaaaacgctgttcaagtagaagcctagaattcaagggaggacactgtaaggaagaccatggactagttgcactggaaacagtaacaaaagtaaaaattaagctcacatgtatgtgatgatgtaggtagggatttccgcaaggagtgagtgcacgagataatccctggggaccaaggattccttcaatttaatgggcagttcttgaggctttgcaaagtttgattgcaggtgtgaagacagtggtaaggtggacagcagaatgaggaaaaagatgtccaggggcgtgggagagggaatggggacagacatactggcagtgatggagaagttgggaagaggtgatttagaagaccgtgagccgcagcaaaggatctgcttattgcagttgcgtccggtgttgttcctgctccgcttttctgatttcaccctttctggactctgtcttcgtctcctgccacgcctcttaacattctaagtccatgtaaatgacattctcacgttaagggctgcaaagaaattgctgaggagccaggtaaacaggctttgattgcaattgcaatcaaacctctgtagcaaatcgtacaattaaaacacccgcaggcaggtgtgggcgacgccagcagcacacggggaagctgggcacgtggggcggaggcagctgcctggtttccatgtgtgcgccctttaagacccggcggcgcgacggaagcgcgtgggcagcacgtgggcagcacgtgatagcgctgggcgactccgcggagctgcacggccatggacgtgggcgccgacgagttcgaggagagcctccctctgctgcaggagctcgtccaggaggccgacttcgtgggtgaagagcctgggattcgcggctgtgccggacagagccccttgccccgggcgagcttgaggagggggtggcgggacggttgcca

SEQ ID NO: 37369 - DNA, 2300 bp, Homo sapien
tcccacctgacctcctccttcctgccatggcccctagagtgtcacctgaacacaggggccataccgaggctgttcacgcctcagtcccccaagttaaccacattcctcctctcagaacctcctgtggtttattatctcactgggggtaaaagcaccagcccacaaagcccgtttggacctggtcgccaaagacccctgccttcagcacctgactgttctccttgccgggccgttcctgccttgctggcctttctgcggttcttcactcctggctgcctcctgcttctggaacttcgaacttgctgtttcttttgcctggaatacttttcccccaagaacctgctggcctcggtcgcctatttccttcatgtctttgcccaagtgtgacctcatgagtgagacgtttcccatcacactatggacgatggaacccccaggtccctgccactcctttcctttaatgatgctttacttttttccatagaactgttcacgcactgacatcagtttgattgttgttgctgttattgtattttgcttgactgcctccctactgggatacagactccaccaggccggcactttgttttatttactgccatgtcccagtgcctagcacagtgcctggcatgggctaaatgtgtggggggagaatttggggaacatggtggtcttacttgcaaacttctaacaaggcctggtctctacagcagggctttggttaggcatgacagggcatgcgagctctcatcctgtgtgggttcttttccgggtctctgtctactaattatgaagtaaaaggaagctctcctccagtgaaagtaatttcctgcatcccattagaacagctgagggaagtgtcaatgggataggtgtgattgggaccacggaggcagtgtcctcctgggtgcctggatcacatcgctggaaggaaacacctgtttcaccaacccaaaggctacctgctggtccagggtccaggcccggctgtactgagatcacagctcagggccctgcacatgctggggctctgctgacttgattctagaaatgtctaatatcaccagaaccattcaagtgccacgaaataacacatttatgtattattctgcttcaggtgagctcaggaggaaaagacagatatctattcactaaaaatattcttttgattggccggcacggtggcttacacctgtaatcccagcactttgggaggctgaggcaggtggatcacctgaggtcgggagttcaagaccagcctcaccaacatggtgaaaccccgtctctactaaaatacaaaaaattagccaggcattgtggcacgcgcctgtagtcccagctactcaggaagctgaggcaggagaatcgcttgaacctgggaggcggaggttgcagtgagctaacatctcaccactgcactccagcctggtgacagagcaagtctctgtctcaaaaaaaaaaaagttattttgatcaacttcttatggacaaagttcagaaagcaaagaacaatgttttactacatacacatacacatgcatgcacacaaactagaaaaaaaaatttttttgagtgctttgtctggcatctggcgatggtgtttcccgcaccatctggcctgtggtctgtggggacgtacatacgtcttgttagggctctccatccagtccacacatcaatggcttgcctggcttacgtagtctgagcaggtgcccagctttgtcgcagatattgaagccgtgtaaaataaatgccttttgattgttcacactttaagcaatattggtacaatattaaacccattgtcccaggcactccctctccttactgcttatggcacttcatgtattaaaaaatgacagtggcagcattgcccagacatgcgttttgtcatcaagtcttaatgcagtccacctggtccctcaggcaaatgaatggaggcacagaagatgaaatgattttcaaaatgccattaggaaagctcaggccagaactggaaatgggtcccgcacagggcactcggccactcttgcctggccatctcctttttggcactaagccacaagcacacaatgatatagaatgaatggttatcactggggatccagaagggtcattcaatcagttctcagtcttatcaggtctaagttcctttcttatcaggtcctaaaggcctaatcttatcattgtgacaaagataactgtagagtctgttaaacttttttttaataacatgaagattatgatttatagctgaatttctcccttttattccaattcaacaattttcatggcttttt

SEQ ID NO: 37370 - DNA, 2300 bp, Homo sapien
ttttttgacctatggttactgaccaattttccatctatagacaaccttatttcagcattcctaactgcttgaatatttgttggattctccttggattttcctttgaaccagctgtgacatgttaccggttctcacattaatgaatgagctaaggaatacctttgatacatgttcattctacatctgagtcatgattataccatcttttaaatattaccctttagcattttttattgcatcactttagaaagcagaaaatgctagttttttaaaaattggtgatactagttttaattacttgattaaggtggttctaccagatctttccattgtgaagaggtattttgtgttttttaaggaagtatactttgaaggtgatactttgagacaaagagaatattccgcttcacaataatttttcaccagatggttttagtatttactgatggtctttgcctgtatccattataacactggagttgcaaaacacaaaccctttttctttttttttttttttgagatggaatctcgctctgtttcccaggctggagtgcagtggcacgatctctgctcactgcaacctctgcctcctgggttcaagcgattctcctgcctcagcctcccgagtagctgggactacaggcgtgtgccaccacgcccggttaattttttgtatttttagtagagatgggatttcactgtgttagccaggatggtctcgatctcctgaccttgtgatccgcccgccttggcctcccaaagtgctgggtttacagtcgcgagccaccgcgcccggtcaccacaaaccctttttcgacgtccacagtttacacctgagctctccctttgacccactacaacactttcttttcttgggcaatatattaatagcacggtggttatgtcacaggcctgtgactggcttgggctcaaacccgggctttttcacttactagctgcaagactaactagttatttaatttctccattcctcactttccttatctgcaaaacggatgcaataaaggcaccccctcttacaggactgttaggattaaatgagctaaatcacagtgtccgaacacttcagtacttcgtacataattacttgctcaagaaatgttagctattattgggtcatgattatttatatgtgtttgaattccagctttgccacatcccagagtgtctttgagtaagtcactgagtatccttgtgcctcaattcctcatctataagtaggttcccatctcataggtttttaaagattcatgcttacatgcttagcagtgtctggtatggaataagcactaaaaaagatgagcttttatgatgatgatgattactattttcagtcatgattattttgtatatttactctaaaagaaagtgaatttttttagttcaagacttttagattcatcgttctactttcattgtggctagctcatggccatccacgtagtgaattaataaagctttgttgagtggcacttgcttgacagcgacacttttgtccactctttcaccttgctggatttgtgctgccttccttgctgtaggaagcccacgcttgggaaataacattcccacagaaggtctgagaggctctgacgggccaaggttgtaaacccccatgatttgactccacgggcagttaaagtgtgttcccaccccccacggatccgctgccactaggctgtgcgaaggcatttacctccctggcactttgatccaagttccctattttcccctactggtcgatcgaggttgggaacagttgctctaacctgggaagcacccgccacgatccagcagggcgcggtgggaggggaaactgaggcccggctaggcacccccgccgcgcccagcccgccgagaggctcaggccccgggaggcacctggagcctgcgccccgcccgcgccgcttcctgtcccgcgcgctgcgctcacgtgacccgggcctgggaggagccggggcgggcgggggtcacctgaacaagggagtcacgtgagcggggggcgggggtgggggggcggtgccgggcggctgtcacgtgacgcggttccggggccgccgctgccgctgtcgctgtcgccgagcccagtcgagccgcgctcacctcgggctcccgctccgtctccacctccgcctttgccctggcggcgcgaccccgtcccgggcgcggcccccagcagtcgcgcgccgttagcctcgcgcccgccgcgcagtccgggcccggcgcgatgggggccgccgccggccggagcccccacctggggcccgcgcccgcccgcc

SEQ ID NO: 37371 - DNA, 2300 bp, Homo sapien
gctgagcgcatcgctgagaaggagcgggtgctctgtgccctggtgctgagcgcatcgctgagaaggagcgggtgctctgtgccctggtgcggctgagaaggagcgggtgctccgtgccctggtgctgagcacatcgccgagaaggagcaggtgctccgtgccctggtgctgagcacatcgccgagaaggagcaggtgctccgtgccctggtgctgagcgcatcgccgagaaggagcaggtgctccgtgccctggtgctgagcgcatcgccgagaaggagcaggtgctccgtgccctggtgctgagcgcatcgccgagaaggagcaggtgctccgtgccctggtgctgagcgcatcgccgagaaggagcaggtgctctgtgccctggtgctgagcgcatcgccgagaaggagcaggtgctccgtgccctggtgctgagtgcatctccacgacggcagcacctgatggagggaagctgggtcagcatcgctgctcctggtcacagattgtagacagcgccctggtgcatctgctcatagcacctgtggcccctgaatagaactgggaaagtgaatgttctgctttctgggtgagttgatgatgggaaagttgatcagcctcattcacttgcataactccacagcacggagctagcactctgtgtttctctgttctctgccttcctcacacttcggtgaatccttcagtcattcagaatcagatgttgcatgtcacaggttgtgccttctcttgctgtcctctttcccagtgctcggtaaatcttgattaaaggaaggaaggaaggattgtttcagaagccttcaggggccctatcatgcagagaaggaaagtctaggctctctctgacacagcttgaagatgtctgagaggctcccatgtaccagggtagccttgcaagctgctgctcctacacatgcctcagccatcaggttattcactagttcccaaagtcaccctgtaacctggtgggtttacatatgctgctcttggtgctggaatgccttggcccaccttcctcatccttccaaacctacttctagtgcccctcctgggaaggcccaccttctcatagcagggtgacaccgctggtgtgtctgcaggattccaaacctacctccagtgcccctcctgggaaggcccaccttctcatagcagggtgacaccgctggtgtgtctgcaggattccaaacctacctccagtgcccctcctgggaaggcccaccttctcatagcagggtgacaccgctggtgtgtctgcaggattccaaacctacctccagtgcccctcctgggaaggcccaccttctcatagcaggtgatactgctggtgtgtctgcaggagtcttcacgctccatcgcgcagcactggccacttgtctggttacacataagacctccacgttcacaagtggtatgtctagcagacctttgaggatccccagctttcagagtgcttgtgcatgcgcatttagtcattcttggtaaataaaatccctttcagaccttttcactttcttcattcaccagccccaggaagtagctttagttttaagacatcttttcatctttcatgaagaaatgaagtttctatctcttcctgaggcttgccattccttcgggagggcagagctgtctctcatcaggacgtggagctgctgggcggtttgcttccccacatcagccctgtggaacagtccattcagcagcccctgcttcagctactcccaagcgagaatgtggggccctcccggagcggagccgcaccgcctgtctctgggccccatctgtgtgtggacatgtccgtctcctaccctgcactctcgcctctgcattcctggcacccagcagcaccagccacaaagattttcagccagtgacaaaggttgggagcagcagagttcatgcaaggagtccacacaagggttcctcacttctgacagcaacagcacactgaaggggttcccaagccaacttcagatttaccctttcaccataactcacagagctccctggaagcagttacacttatagttatgatttactgcagcaaaaagatacaggttaaaatcaaccaagatgcacacagggcagagtccaggagggaattgaatgcagagttcccaccagctctcccgtggaatcagatgtgttgtgttcccagcacccacgtgtggcagtgcacatggagtatcatcagccggaggtgcttccccaagccttggtgtccagagtttttcccggggctctgacatgggcaggattggtccattgatcactcagg

SEQ ID NO: 37372 - DNA, 2300 bp, Homo sapien
acaaactcaggcatcagaaatctagaaatcccatacaattttgaaacacacattaacatttttcactaaaatataacctgaagatcaaacaccttattttggtaatcctatgtaactaaacttgtcaaataaccctgtttacctctccctttcgatgctccaggtgtcttctgtagcatccaaaactcaggggttaggaaagaaaattttgaagctgtaaaggctcaaaacacttaacagaatttttggttactataagtcattcatttaaatgactcaaagcaaaaaccttcagtcactaagagggaagacctaattttccaaacaatctaacttttaaccatcgcactcctttttaagaagtccttttaagtctcttattatccaactttagccatgccaaatggccagttgaattcatggaggggcagagaatatagtgatttttttattgttcctgcaaccagtttgcacagagagagaaaccaaaagtctgactggtaagaacttttaccctttcgccagcatgtcaggctgctgagctcccttcccctcagctatggagccctattgaccctggagtcctgttgatctcttgtccttcccttcttgtgtcagtagcttattcacaaagaaaacaaaatctttcattgcatgaaaatcttgttcaagtgaaagccaaattttacccttacattagtctattaatgtcaaccccaattaaaaaaaataaaaccttacagagaaatccatccaatcttaatcagtttgatcatgaactgagattgttataaatcttttataaccttttacaaattttttttgttaaacagcatgtaagtgcttcaagaaaaccttgttgtgcttgtattccattgttcaacttatggaaaaccaaataatatcctttttagtgtagtcaatatgtttacacacaggattccttttacaagattaattttttacaaaccttccataacttgtttgaaccttaagctttatcttatataatttaaaacaatcatttaaccctctgaactaggcaaaaatttacattcccatgccttcttatattattttactaatgatacattttactctccttactcacctcacgtgtagatctgttttcagtagtcatcactacatgttataatggtagctcttagtaattgttaattttggtgaaatacccagtaagttattttagttacgtacttaggtgcagatgaggtctaactatttccagcatagctagggcaggccctaccaaactgcaaagcaggaaagttgaacaattttcaaaagccaaagcagtttatgaccttaaagcatttagtcaacctagtttctgacttgcataatttagaccatgtctatattttgaagacatttctattttcattttactgataatttaaaagacagcctatttagcaaagtcatacttaagtgaatttgaaaattgcttagacttatttacttaatttatgaacactcttttacttataagccaatttggtagacacaacatataacagtaagtgtacatacaagtaaacacatctagacatgtatacacacacacaaatgaagaggtggagcttaaaacacccaaattgggtgcagtgtatactgcttgggagatggatgcaccaaaatctcacaaatcaccactaaagaacctgctcatgtaaccaaataatacctgttccctcaaaacctatgggaaaaaaaaactaaaaaaaatacttaaatggtatcacagaactaattagccgaatacagtatctagtacctggctgtcacccaatacttgcctcataccatcacatctagaaaacaagtagatattctttttggaagagccctgagggagctactaggaggtttgcacggcctgctctcctgccctcttcttgctctgtggctgaacttcaattctcttcgggcttagaccccactgactcgctcccgggcaaagcaaacgatttgatcagatggccacgtgcattcttccttttcctgaaaccagcaccatagggtaaaagattatttctacttggttgccttccagatgtttcacacttggacagcaaactgatttcaaaccactccttttcaaagatctctgagggagacattgcacctggccactgcagcccagagcaggtctggccacggccatgagcatgctgagccatcatgcccaccgtggatgacattctggagcaggttggggagtctggctggttccagaagcaagccttcctcatcttatgcctgctgtcggctgcctt

SEQ ID NO: 37373 - DNA, 2300 bp, Homo sapien
tgactcgtgcatccacagaacaatgttgaatgactgtgtaaacgcattgctgtaagcaacctgaggtctgaacttctccttatctgattgttccctctaagtaatttgtagcaaatttcaacattgtttcccattggccagcaaagctcttctggcccttaccttgtgccccttgctcatgacgtgaagatctgatgtcttgacatgttaagtgagtcaaacccaagtgcacgtgtctgcaaatttcttgtaagaggcagtcaggagcatctcttggcccttggggtagagtaaagtttgacaacctctgtcactttttaactctttaactcgccctcctacagctctttgacggggaacaggtgcagacagagcagccttggcttccggctcatgcactcacgatgctggctgcgaatgggaagtccctaaacagaactgagccccctcattcagctcagagcaaacggggctggcagcagcccagggcaccacgaagcagagtgcctctgtgtgcccaacacagccgcagtggaggtcaatggatgtccttgccggcgccctgctttttgcttttttaagaaaataagaagcctgcagctgcggcaaggagaaagaccccgtgggtcgctccttttagactacgctattacacctgctgactatccaatagaaaaaagaaggagaaggaaaatcgggttaactttctggtatttagtttgcagatatgtcagcaggccaccttctctacttggcaggatcacgatgtattaagaatccttttgtccaccaggaaagacaaatttcctgtttgtcttgcatttagatgcaacaacatcatcctaaagagatgcccctgatgtgtgagagcagaaaggggtgatccctttcttccttatcctaaggctcacggccaacacccctataacaaaagacaggttaacaagagaaaagcatgacaaatttatttgatcacgttttacatgacacaggagccttcattcagaatgaagacccacagatacagggaaaactggatggcagtatagaactgtagttggacaaaaagggcagcagcccatgttcgcaggctgaggggaaaacccagcaaggcctgtctgttcagatccgtcttggcccctctgtgcagcactccttcctccaggcaccggggacaagactcctctggaatgcgggtctggatttctttacggcccactgttacacagaaaggcagcggggaagttacagtggtatttctaggctttctggctggctttggggagaaaagagtctggtttccacgagctgctttgaggaagaaggattctcagttctatggcttgccccgggggagaatgatgggtgagagaagagacaggagggcaggagaaggtcagagagagagactttgcttctgaggcctccaccttggggcatggatttctgagccccaacagaccttgacagaaaaatctaggacacaaagatagtggcttggacacacctgcctgcatttacacttgacctgtctgcgacgtaaacactttcctctttccctccagatgggttaaggggaaggacacttcagggttgaaacgcaggaataccagattggagcaaacactttttaaaagcagagttataaaatctggacaacatcaaaacaagcagccccagcatgcatcccgacggctcttgttgttggttggagaatgagcccagcagtcaggcttgcaacccacttcgaatctggaccagggttctgacacggatcctggttcacatcacgctgggccttgtggccaaacacgtgtgttttctccatagggccttgaagaaaagctggcggtgcgcatgagataggagtatattaagttcctggctgctcggggcactacgggaagattactgggctgtgatatgggccagcactcagattccctgcggtgggacacagagggcgggttgtttgtgctgctggcgtggagcaccgacaagcctgtggagaaccagttataataaacacgacaggcatcctgggagtgagctcagggcatttgggaagtgcagaaggacatgcacccccgctggaggggtgcacctttgaagtcagctggaccaaggaaaggccctgccctgaaggctggtcacttgcagaggtaaactcccctctttgacttctggccagggtttgtgctgagctggctgcagccgctctcagcctcgctccgggcacgtcgggcagcctcgggccctcctgcctgcaggatcatgcccaccaccgtggacgatgtcct

SEQ ID NO: 37374 - DNA, 2300 bp, Homo sapien
agaaggtatcgatagaagaaaatacaaaactgtctgccctcatgaaacttgagttgtaatggagagacacagataagataaataaataaaatgaataagtataaatataaatatatgataaatgaataaaaacatatctatgacaatatatggtgatgataagtgctttggagacaaagcaggaaaggggggaatgtgctagtgtatgcagaggttggggtgggttgttgactggtcccagttccctgaaaattcactgacaagaggcagatggctagaagaaaaggtgtacttatttatttaaggtgtacatgggggccttcagaaggaaggcccaaagatacaggggaaattgcctagttttatgcttaggttcaacaaaacatggagagccctgtcgaaataggattggaccaaaagggtgtgatctgatgctgatactgagtgaggaaacccagcgaggccggtggctctagattcttcttggcctctctgagcagcctttttttccttctgggtaaggggcaggttcttctgtggaatgggaggtcttaggactgcaatcaacaaggtagaacagttgatttctttatggccagtttttacacagacaagtgagggaaaatcacagtgatatttttgttttatgactggctttggggaaaagcgttctggtttcgatggctagcctgggggagaatgggaccgagagacaggagggcagaagatgacacagagactgcttctgaggccttcattttggcgtattgttttctgagctccaacattggcaaaaggggttccaagccgagatgacctaagagtacaggcctgaggagtgagtggtgtccccgccatactgaggttctgagtctgggcccaggacatggttgcaccgaaaggcagggcaggaaaggggagctgggttggagggggacagactgagtctggggtccagcgggcagttgaaactgctggtgaggacatgaggccagtttgaatccaagcagcctggcttcaaactccttgttccggaggaggaaccgcaagtcctcccaaggccttggagaaaagtgagctaaaggcagaacgtgggccgataacgtgggggcgtggggggaccgcgacccagcccggggaaggcgtcccagcatggacccagcagcctgggcagcctgggcgggaagttctgatcgcgctctgccgaattggcaggcgcaataagtaagcggaaaaaccaggattcaaaccaaccaccaacacccttccctggcgttcagaccgaaggtgggtgggaaggccctggcgaaggaggtctgcatcaggcctggccttgaggcgatcccttctcaccccaaacctcctggacgctgagcaagccccttcgcctgtgtgggttgcccggctgccctctggggaaagttgggtgatcaaatcccaagttgtagctctcgatgggtcgagggcgatggccagcgctgtgctgggaacgggcagccctgccctgccctgccctgccctgccctgccctgccctgccctgccccacatgggcgcaggaggcctccgcacgcgcaagggccaagggctggagggggctctcccgggcacaggcaccggacccggggcgcgcgcgcgcgtccttagtccccgggctgcactccgggccgctgagagatcgggtcccagaagttccgggagtggtcgggtgaccctggaactttcttcttctggagcccgacctggggctgactgcagagcaggctgctggcagggaccaaaaggagctccgcgccaggccggaggctgcgcccgtcactcgcggtcccggccgggtccctggcgcgtagtcaggccgcaccgcccgagccccaccgcgcgcccaccccggccgggtgcgtccggctcgcggccgtccctcccgcgacctgtggcccggggctgctgcgggcgcccggggaagagaggcgggggccgcggggggcaggaggagcggctgcggccggcacagcgccagggcgagtgaggcgggtggcgcgggggaggcggcggagtaaagagaggccgccggctgggtccgcgggtcactccgaggcgcgggctgcgggcggcgggcggcgggcgcaccatgccctccttcgacgaggcgctgcagcgggtgggcgagttcgggcgcttccagaggcgcgtgtttttgctgctgtgcctgacgggcgtcaccttcgccttcctcttcgtcggcgtggtcttcctgggcacgcagcccgaccactactggtgccgcgggccaagtgccgcggc

SEQ ID NO: 37375 - DNA, 2300 bp, Homo sapien
ttgatttcctgaagtgagggttgtgttggccttttctatcttggatctcgaagaaagcatatgtgcatatctatggagaggtaaatctctatctataaatatctatgtatctttcaatcagcagaaacacactgggtcctgagcaccagtggtctgaataggtccaggtttccaagaagagacgaacaaaggcaaaaagacagatgagactcaggagagagacagagactgaaaagtaagcgagggggttagatagatgcacagaagctggggtcccaccatccaatggcaagtctctctgccataagtggctaccaaagacatgaaaaaaatggtcatgaccacaaatgaccaactactaacttctccatagctgcctaacctcttcagatctcatagtctattcatccatctccgtttatgccttgggacccactgttccttcaactcatcccccattccctcagtcccggagtggctgcggccagtagaagatggactgagagcaggagaggaggtcatgtactgggacccatcctagagatactgcattctgcctggaagctagttttgcacggaagctttaataagtcttgcagaaacaaacctttctgacccacctgatacggtatcgacagacagtaacactatttgcatgatggttttccatgataataacatagagcctttttgctacattttgagcacaaagagttagaaagctgacctgggattgatatcatcctggataccattatttctttgaggaactctatgttagttccacctctcacaatactatatgaagtcctatagagagagataaagacagctagacagatcgagatactcttgtatgtgcataaatgattccacaatacacacgtcaaaatccataccagttattccagagagatgtattggccaaaggtggaaggacaatattctgatcccttccaggccacatggatgtactatttcagtgtttccaagaagcattgcaaacaacaaaaataaaacagttaaaatccattaattattggaaatgtgcagagtggatgagaatttgagaaccattcatgcttgtggcaattgtatggtacttttaatgggaatatttcaaaggccctggttatgaccttgttacagcaaaacggagagggtgctgggtgcccctgcatattgtcccacctcttgtgacgtatatccttttggaatttccagtgacttgatcatgaactactgcaggaatccagatcctgtggaaggcccttggtgttacacgatggatcccaaagtcagatgggagtactgcaacctgacacgatgctcagacacagaagggactgcagtcgtgcctctgactgttatcccggttccaagcctagaggatccttccaaaccaggtaagaagtctgtggccagacatctccacacttggacactgggtagaaaagcctttgaaactcccattgttgcagaagccttcagtgctacgcacgtgctcacatgttggttgatggtctgtcatgttggaagaatcctcagggcactctgggggggagccagacgagtgatttttggtgcaacgtgagtgggctgtgtctttaggataggcacgaaccctccaggttggtggacttcaccactcaccttgttgtcaaaggggttgggccagtgtcctagccaaaattcctattgtcacatgctgtcagatgtgtgactctttcgaagcgagtcacttgtccagggatttcttaaggtagacagcgttcattgcaatcttcagcactgcagattccaggaaatgtggctctctagcttgtgaatctcgagaaacctaacaggcggcattaattccatatcgccctgggtctatggagcagtacatgagcttcctcagtcccaggcaggctctgcagtcctaggctttgaagtgagtgatttcttagtgttctgacacctccttctgatggaacttgtacctgtgtgtgcatagtggggaggggtctggagagaaagattagtagacttctgctttattacgatgcagaatgcgggacacgagaggattccatccctcctccaaggggataagattttggcctccaaccatccctaagaggcaaaatgtttttgcctgcagtcttagttgcagaactgttttctgcccgattgcccagaagctgaaggccttggctcccgtgatcaacactttagggaaatacgcaatgtttccatgtctgtccccacctccacccttgatagccaatcaccacctacagcccacaccgccaaat

SEQ ID NO: 37376 - DNA, 2300 bp, Homo sapien
acccatatggatttgctgccagtaacaatatgtggcagctaaaaaagcttatatcaaagaagtaaaaagtaatatggaggatgttccaggtctggaagagtggggaaagggggaatagggagagatttgttaaaggctacaaaattacacctaggtatcagaaatatgttctagtgttttatgccgctgtaggatgagtctagctaacaatattatattgtatagtttcaagcaactagaaagaggatattgagtgtttccaaaacaaatgagtgataaatgtttgaggtgattgattgatatgctaactacccctctttgatctctgtacatcatttgtattgaaatatatctgtgtactccatgaacatatgcaattattatttatcaataaaacttagtaaaatcttgatttcacagaattagacagtagaatagtggttaccagagggtgagcagggtagtcagggagaggagaatgaaaaggggttggtcaatgtgtacaaatttctagttagatagaaagaataagttctggtgttctattatacactagggtgactatagttcatgattatgtgttgtgtatttcaagataactagaagagagaattttgaatcttctcaccacaaagaaaaaatgtttgaagtgaggagtatgctaatcaccctgatttgatccttatacagtgtatccatgcattgaaacatcacactgtaccccataaatacgtacaattactatgtgtcaattataaattaaaacttcaaaagtgagtacaatgccaagcatatagccattaatcaataaattatagccattactattattattattctttcctcccagtagtaaattgtagtgcagtggttgaaagtaatcacttgaggccaggcatggtggctcatgcctataatccccacagtttgggaggctgaggtggggggattgcttgaaatcaggagtttgagaccagcttggccaagatggtgaaaccccatctctactaaaaatacaaaaaaatagctaggcgtggtggtccacacctgtaatcccacctacttggaaagccgaagcgggagaatcgcttgaaacccatagatgaaggttgcagtgagctgagattgtgccactatattccacagtgggagacagagtgagactgactcaaaaaaaaaaaagtaatcatttgagatatttgcattggaacctggctttcccaatttcctttgatataactatgggcaagcaaatttcaatgtcctgatctataaaatggtaatgggaataacagagaaaaatctggtgattatagcatggtatgggtaattcatagtgttgtttgtatctggcacagatagacaaacctacaataaatggtagctagtagtgtagtaaagattctaaaagagcatgtttagactaacctctaatgcttagttgtcccatgaggtaataatgtctttatctaatttcacctttccatttattagcttatcagaaagttgagtcctagaggattgccagagtgtcagaactcaatgacgccttcccatgtgaaggtcaagaactatctgcagccctcggtgggacccttgattgctgacatcagtccttctacttaaagcagttcttgtgcaatctttgatgcaaagtaatttcaaaagaattgcttcaaggatgttcaatggtgattattattgattgtggcctgggtaggtggaaaagctactcagagaccgaatacagcaacccaagctcccatagttattcattattggaacttggttttcaaactaggtcaaatgaaactgaacaacgtttggaataatccgtcactggttgtggacagggaagggttctagaagggactgggctggagaaccctgcaggcttacagtatgttatgggttggtgctcccctacctacagattcttttaaaaaactgtccctacaacttactgaactggaatgtcagctcagtggagtccttcttctctggccactcttaggggactgagggatggttggattcagaaaagggcttctaaaaattcaggtaatgtttgaactctgctgagccagtggcatgggtctctgagagaatcattaacttaatttgactatctggtttgtggatgcgtttactctcatgtaagtcaacaacatcctgggattgggacacactttctgggcactgctggccagtcccaaaatggaacataaggaagtggttcttctacttctgttatttctgaaatcaggtaagacatagttttttttgtgtaataattattt

SEQ ID NO: 37377 - DNA, 2300 bp, Homo sapien
ggctttctcaaggaagcccagctccctgtgattgagaatgaagtgtgcaatcgctatgagtttctgaatggaagagtcaaatccactgagctctgtgctgggcatttggctggaggcattgacagttgcaaggtaagaaaagatcaagagaccaaagttagtcttgtgctctcctgtctcagtctcagtcccttagacttgagtcccaaagtagcgaattcaagtaggatttaatcaatggaagaccccagtctaagtgttgctcagaaactccctagatctgtcccaaatgtatattcagatcatccaaggggacttcttggggcttgagttccagatcagcagcaagggagccataagtgccataactacctcagaccactcaccctcctggggtgtcccggtggccagggactaaagtggtgatttttctggtagggaaggaggtagagggtacaggacagagactaactgcacacaatatctgagactggagctcagatattgctgatgatcagagttggcgtgtctccccaattgatttacaactggggcttggatactgttttaaacgggaggagcctcctaaccatcttgacacaaccactgacgtgactacactagagatagactctttccacttaattctaccactcttgctttacttcatgagaacgaaaatgtaagattgcaccatgaattcatttgcggaaagattgatactatgcttttattttattttattttattttattttattttattttattttattgagactctcaccccggttgaagtgcactgacgtgattttggctcactgcaacttccacctcctgggttcaagtgaatactccagcctccctagtagctgggattacaggtgcccaccaccacgcctggctaatttttgtatttttagtagagatggggtttcaccacattggcctggctggtctcaaactcctgaccttgtgatccacctgtcttggcctcccaaagtgctgggattacagagttgagccaccgcactcgaccctatgttttatttttaaaaatatttatttatttatttaagccacaactactagaataggaaggattgatattttattaattttatttggtatttattatttttttttctttcctgagacattcttgctctgtcacccaggctggagtgcagtggcacattcttggctcactgcaacctccatctcctgtgttcaagcaattctagtgcctcagcctacttagtagctgggatgactggcatgtgcctccacacccagctaatttttgtattttttgtagagacagggttttggcatgttgcccaggcttgtctcaaactcctggcctcaggtgatccatctgccgtggcctcccaaaatgctgggattataggcatgagccaccaccccctcctggaaggattgatatcttataacataatttataattacagaaaacatgtgagttcactaggaataaataaattttgaagataataaaagattttcacttatgttgtcatttcggcacagtttggtataggatgtggagatgttaacatttatacctagcttgctcgtaaactaagacctgaaagggttgtgtctatcagctgcacccctgggtagcgacacaacctcgggaaggcctcagccccctcctcgtacagcactgcctgttggaaagcttgagggaggctatggatgtgcagcacttggcagagggtctggtcatggaagttaccagcaaatatgagctacttttatgattttattttatccaaaagaaagagaatgaaagaagaggggaggaaacaagactaatcaggaaagatgaaggtctaggggtgagggaaggagtaaggagacataaaggcaatgtggagcagctgaggggggaaatggctttcaccacttcccagcatctattgacattgcactctcaaatattttataagactctatattcaaggtaatgtttgaaccctgctgagccagtggcatgggtctctgagagaatcattaacttaatttgactatctggtttgtgggtgcgtttactctcatgtaagtcaacaatgtcctgggattgggacacactttctgggcactgctggccagtcccaaaatggaacataaggaagtggttcttctacttcttttatttctgaaatcaggtaagacatagtttttttaaattataagaattattttttctcccacaatgtagtaaaaatacatatgccatggctttatgtgcaattcatttaatttttgattcat

SEQ ID NO: 37378 - DNA, 2300 bp, Homo sapien
agtgtgccaacccctgaaattgatcaagggtcaactgtaatcctaaaagaatctaatacaatattgtaaacagtaagtggtcaataaataaggaattgaactaataagaatacataaatcccagaatatgtgcaacctgatcatagtacacagagatctctctatatatctcttttcttagttcatgctgttctttcaggtagaaagcgccttattttgaattagttgtctttagagcaaaaatccctccaagagtgctgtgtggtttcctatgcacaacctggaatagtccattgcttcatgcctaccctggacatgaagggccatgccgcagcggaagtctctatgcacccacccccgtctatacctgagcaacacattcctctttgctgctctcttacaggctacagagtgcggtggcgccagcacagagctctgctcaacgtccctctgtgctttcacgatgctgatggattatgaaggtagggaagaatgtacagccaggaggccattaggagggcaactaatttataaaatcacatttgtagaatttaatgcatccaacaactaccaggggaaaggtgggcaaaagctataccaacaccacccaagtcaaaaccaaaacaacaggaaaagaaaattatgtggatgtagaatttctgataacatcattcccaaggtgccttatccaagaggaactgctacaataatattttaagtggaaataaatacatgctggaagcattatatattagtagagtatttttttttcccagagtactttctcaagcacatcaacatgagccccctaagagacatttcacattaaaaataaaatgtctgcccactgctggtttctcaatctgcctccaccttctgtcccctttaatgaactgggccatgaggtgagtcagagaggataaagggagtggtaagaatttgaggagagaagagagtgaggctaaaataggaaatcaggaaaagcgattcggtccccctgtccctcacatggggccaccctcttgttgcccagtgtggcttcttcttgagggttctgcatggttcctcaatcccagggaattccgcaggacattccacccaagaccattgggctcccacctctactcttttgccagttaatgaataggcaggaatttcactgcctggaaagaggaacaatgctttctggtccttatttcacatctaaaatagagaggtcaattgatttattcctaaatatctttgaacactaaaatagaagttttacagcatatatactacctggttgctctagacttaagccagggaaaagtacagattcaacatttaaaattgagatagacgctttccacttaatgctaccagtcttgctttatttcatgagaatgagaatataataatatggcatacgttcatttgggggaaagattgatgtcttataacataatttataattacagaaaacatgtgagttcactgggaataaataaattttgaagataataagatactttcacttatgtcgtaatttctatgtcatttggtgtaggatgtagagatattaacgtttacacctaacttaagtttgtcatctaagacctgaaggggttttgtctatcagctgcacccctgggtagagacacaaccttggggaaggcctcagccccatccctcgtacagcaggaatgagaacagccctgcctgttgggaagcttgagggaggctatggacgtgcagcgcttggcagagggtctcgtcatggaaggttccagcaaatgtgagatacttttatgatttcattttctccaaaagaaagggaataagagaagaggggaggaaataagactaattgcgagagataaagtacaagggtgagggaaggaataaggagacatgacggcagcgtggagcagccgaggggggagattgctttcaccacttcccagcatctattgcagattccaccctcaaacatgttgtaaggactctttattcaaggtaatgtttgaaccctgctgagccagtggcatgggtctctgagagaatcattaacttaatttgactatctggtttgtggatgcgtttactctcatgtaagtcaacaacatcctgggattgggacccactttctgggcactgctggccagtcccaaaatggaacataaggaagtggttcttctacttcttttatttctgaaatcaggtaagacatagtttttttaaattataagaattattttttctcccacaatgtagtaaaaatacatatgccatggctttatgtgcaattcatttaattt

SEQ ID NO: 37379 - DNA, 2300 bp, Homo sapien
ctctatctggagacagtgtcagatcccataagttaaggctcagtcccacaagaccgccccactgcagatgccaatcccaagttccaggcggtgacctgtacttctgcccaactggacaaaaatctgtttttctacttgattactttgctagagtggctcacagaactcaggggaacacgttacttttatttacccatttgttataaaagatattacaaaggatcctggtgaacagccagacagaagagatgcacggggcaaggcatgtgagaaggggctcagagtttccatgccctctccagtgcaccagcccccggtaccccaagtgttcagcaacccagaagctctccaagtgcagtcttgctgggtttttatggaggcttcattacagaggcacagttgaatacatcgttggccattggagaccagctcaccttcagctcctgttccctccctggaagttggacgtggggggctgaacagttccaaccctgcaatcacatggttggttcctttggcaaccagccccatcctgagactatccaagaacccaccaagagttgcttcattcaaacaaaagatgctcccttcactcaggaacccccaagggatttaggagctccgtgtcaggaactggggggcagagaccaaatatacgtttcttattctaccacagtgtcatatgaaggggaggacaacactgcctttctgtgtcttgccccatagagggcgcacaatgcatggaaataaatgtttctgaatcaacagcaaacaggcttcatcgggtaggagagcgctgagccctccagggacaatgcacatcaatgatgtcccactgtcctttggtgctggggctctaaggcctccactgggtcaggctcctgaagggagacccattctccaaagacccccgagggtcaccactccctgtccaggggtgtggcctcatagctccttttgaacaggggcacaggaaggacggctttagagcattcaaaaaataactttgccaaaataataataataataatagaaaggaagaagaggctgagcatggtggctcacacctgtaatccctacactttgggaggctgagacaagcagatcacctgaggtcaggagttcgagactagcctggccaaaatggtgaaacctcatctctactgaaaatagaaaaaaaaattagccaggtgtggtggcgtgcacctgcagttgcagctactcaggaggctgaagcaggagaatcgcttgaacccaggagatggaggttgcagtgagctgagatcatgccactgcactccagcctgggcgacaagagcaaaactccacctcagaaaaaaaaaaaaaaaaaaaaaagaaggaaggaaaaagaaacactcctttatgtcttctaaggatagacatgaaatgcgtgagccttggaacaccttctccctctcctgccccacgtgagctggagcttacatgccttcttgttttcagtactgccgtaaccctgatggtgatgtaggtggtccctggtgctacacgacaaatccaagaaaactttacgactactgtgatgtccctcagtgtggtaggttgccttctttttggtaaggaaactgcttacttaatatggatttgcaacaaaaaaggaaaagggcttctgagcagactgcttctggggaggagatagctgccctctccatcagaccccactcttcatcatgggcatcttgaatctgccctactattggccacatttgttagaggaacacctgcccatcgccccaggcacacataaataaaataaatgtaaaattcccaaagagcaagcttagaggtaatctagtcagccccaggatggtcccactgaatgctgccatgtctagcgtgggatgcatgaaaaatttagagtcattcggatgaaaaactttccctttccacagctgagaagtaagaaagaaaatacaaacagcaggaaacaggtaagcatgtaacgcacattgtaaacctcagatggccatcctaggaattcaatgaaaggtagtgcagctctttagccccagatggcctttcttataagtttactactcacaagtcacattagtgacatagcttagagactgcttgttgggttccatcctcattgctctgagactcttgttgggagtatgaggcttggatcaggggaaggggagttgacattagttcttaaagaattggaataacaaatccatgggtatttctgaaaaaaaaaaaaaaaaaaagaaaggaagctacttggaattgtcccatatttaacattctgctgacca

SEQ ID NO: 37380 - DNA, 2300 bp, Homo sapien
aggctgaggtgggaggatcacttgagcccaggaagaccctgtctccaaaataaaaaaagaacattattaaaggtaatgagacaatgagaccaaccatgtgctaaacaagaataaaaatttagagacaaaaatctaataacttaaaaaaaataactatttcattaatgcaacaatacttactgagttctactaacaccatgttgggcaccagagacatttgatccctaggcaaaggtcagaagaaggaagaacagcttctttcctgaaggagcttacactatggtggagaaggcagaaaagaaatctgggggctgtgaggcgctcactgggagccctgaagacaaagtgggggcacggggtgagatgagagggttgtcagccagagaaacagctttcctggacccagcatgggggtggggcgaaaagtcacaacacttatattgaatatttagtaccagttaacttaggtttctatacatgatgcattacttgattaggtaagtgtaaatttacttggttcctgctaaaatacatagtatcctcaagtggaaattaaaacacaagaacaagccacaggtctcccgcatgctgattatatttgctaagtgttttgtgacttggacacacgtgtctgcattatcagctagcttaaattcggtagtcataccaaagaatacgtagtacaatgctgtttaaagaagagatttattttattatttaacttttaaagtctctaatatgccttctaagaagggttctggctcagaaaattgcagaagaaaatcgagtagagaactagaattacagaaacctaagaaatacttttactgagctttcttcacacaagaaaatgcacggaaatgaattatacatggataccaatttgtgatttttaaaaatttgtaattttttaaattaagataaaaattagtttatttttttgaatacttttttgttttgttttacctcaccctttactaagctgttagcttggtctgttgcgcttactgctatatcctcagcatctagtacagttcctgacacatatatgcacttaataagtatttgtcaaatgaatattattgagtaaataagatgaaggtcaattcagaaattcagcactatcaggctatatacataatacagactattataaaaaactagaatggagcagttccttttaacgacggagaaatgtcagtaacatactttgagcacaatatagctaatttcacaactggtctttaaatataacatacctataatcaatttaatgtttttctttgttaccagagttgttcaaaacgtgcgtttcacctatcaaagctcaactaaatgaggtttaagaaatctgcacatttgaatgtacttaattttaaaagattctggttttggattaactctggatttcaccctatgggaaattttgtaaatatttccaacttaaaaaaaaactgtgaagccccagcgctaagagtaaacgatgcattggaatttcaacaggatttctgtaactctgaaataatctttagcatttcttcttccccccatcccctcagtgtaggagcattccagtccaagtttctgggagatcgctatcgaatcttatgacactggggtgagaagttttgccgggttgaaatgagggggtcactttaataatctggaattccggagactttatgtcaagtcttaaaaattcgagcctgtggaaggctgcgctgtcaagagaccggagttgcgagcgtctgggtgacgtccgtcctcctggaaggtgggatccgggtggcaggtccctgggcggcgactccggccgggctcatagcgtcgcgcccgccccgctcatcggccctacccagcgtccctcccagaccgacgaccgcctgggaagcctcgagctcccagcccgctgcacagcccggctccgctccacagtcccccactgccaccggccggggcgacaccgggcgagctggcgagacccggctccaggaccgaatcgcgccgacacttgacggcgctccccgcccctccctgccgccgtctccgcccccgtccggtcgcattccggcgcccgccgccgccgccgccaccgccgccgatctgggaggcttgtccctcgccgcccaccgtagccccggcgctcggccggtcgccgtttccaagatggccgcggcgcgcacggctcctgcggcggggtagaggcggaggcggagtcgagtcactcccgcacttcggggctccggtgccccgcgccaggctgcagcttactgcccgccgcggccatgcggggctccgtg

SEQ ID NO: 37381 - DNA, 2300 bp, Homo sapien
aacagatcagtacttgagagaactctcagacaacttggcaagccccagaacaattaagtctcgcattgtcttttgtgtaagtaaggagggtcttgtaggttttcccattctggttatattttggcagaggatttcatcatgttctcctatcctaagtggaggaagagctgttgttctctctcaatttcacacttgtacctaagtaggaggaacgctgtcagtattcccatcttccaatgcaagtcaaaccaaactatgtagattgggggtatgtgatctaaaaagatcaacttctgatagaacccagggctctgtgttcagccccgaggagaaaatagtagagttaacaggaagatgatgcctggctttagattttaaaacagactaaaatgtttttacacttactttagtaacagtctaaaatttctacaaatatttgcagtcatttcactcattaaaataattaatacttctaaattttagtgagaaatgtctataacctaaaaagtaccaaagcattttacagcttaagcagtcaactaaaaaaattaacaacattgaacaaattcccatttagcttcctagtttttacgtttagagcttttcatggcaaatatcttcatatatgcttttatatccctgtgagggctgccaaaactgtcttctttattcatacagtacagactgaagagaagtgatttggcctaaaacacagtcataattgaggagggcattggccaccctgtgccccctgcatcccacacctgctgtgtccatgttcacatgagactgctcccgaactggacaatagggagtgacctccctctttttaaaggttgatgcactgtgttttaaggcatttgtaagttggtggtgtggtacattatgtgtattttagtataagagttaaatactacagttacccttttcatggagtttagtctttgcagaagcagtttttcagcatttcatcttaaacgcttatcagtagcatttcataagtattcatcttaagtttgtacatacttagacaatcgttgatgtttagaaattttaatagtatcatagcatggtatcttgaaggacattttttactcaggattcccgtttactttatgaccgtctgtgtgtgtgagatggtaggtagagaagagcacagccacgtgaagaggtgtggggtggttaccagactccctcctgcattcaagccctgcgtaagcctcagtgccttcacagtgagcctggttcatgggcccgtgagtcactggtggattcggcccactgctcccgaggcagacttcacatacccaagggcttgtgtctcaacacagctgtgggtttgtgaatgtgccacggggaggcagaatgacaccagtgtgtgcatccctgccacagccatggggtgtagcccttgcccgtcttacagatacatcaaagttcaacttcacttgaccctagaggtttcaataagtatttttaattgattttacttgacctaggaaatatctgttctgggcttaagttatcttatcatcgtttgtaaaaacactttgcagtggtgctcttgctgaggcttgctcctgctggctctcaagagctgatggcgaatgtttgagaaattttgcaagttgttataccacagaaattggcaaactctacaacccacctccccatccccgacatcccccaccagagctagtcgttcaacattccccaatatgccacttcatgagtatatgttcttgctttttacccgtgcaaaaatctcttaaggacatggaattggctagtctcacttgtgggaaatcggaaaaattagaggtgtttagtgacttcttggtctcaccagtggtctttgttgctgcttaggagtggagtaggcttcctcacttcaacaccagtggttttcccgtcagatagtgccgaattttttatgaactatatggcagtagaaatgtccccatcacttcagacttaacaagtgctatactagatttgagggcttagggaaataccagaaaaaaatgcatattttataatttgtaaatgtctgtgcaatagatcatgttgccttcaacctatcaatgtataataagagcataaatgctaccatacttcattataccattcacttaaaaatatatactaaatgactttaataaactaatgccatatttatttgaggttctttgattattcgaattacaattttaacacattccctatttagttttaatttttactctttatgggttcattctggttgctgaacatttcactttattctggaaaagcacctc

SEQ ID NO: 37382 - DNA, 2300 bp, Homo sapien
ttttaaaatgggtgagttctatggcatgtaagtgacatcttaagaaagctgttttttttttaaaaaaaaacaaggcacaaaaatatcaccccccttgtctagttatcaggtgccctgtggccccaacctgggataagaaaatcaccccgttctggtgggcaggcgaatgccgctgcttccctggcagagttgggtgccacctctctgggcattgcctgtgctgctgaccgtcatggtgctcacctccttgtctcctccaccatctgatcgctctcactgcttgagggtaggagtgcttggcacacacgttgattgttcttcagttgcttgatgatgtgacttcccctgagagcccccatggcttctcttggctgatgtccaacagcagagtcacgcgacaagtgacgcttcggaccaggcttgttaatgggctgcagggggccgaggacagagcagaggcacctgaactgcccagggaaggggttgggggttctccttccaaaatggcctagtgtgtggactattattaaaagtgcctctgagaggccaagaaagcctatgattcagtacaccctgaatgaaaaagaagaaaagtatgagatactttagacttttctatctcaagttgttaaaggaaaatattcagcatttaagtagtataagtttcaattataaggaagctcattttccagaaaactcgactccttagagaactgggacattactaggctagttcatgggacacaaactgggcctcactgtgacccacacccatttttgtgtggcgtgcatgctatcggccacgtgcagcttttacaatagctgaggcagctgcccaccatacaacctgggcaattccctgtggctgcctggttcagctctgctccctgcaggcagcttctgccctggcccctcctcacggccaggacctgcccttagacgggccagcgggcatcctggtgccacagctccttgttccccccaggtcctggctcagctcagctcccagccgcttgagcacgcctgctgacctgggttcctgggtccctcccttgtgttcagcagctccttgcggctgagccccagtccctgagcgggagctccgtgacatgagacacccagggaagagccaccgcgttctttcgcagtgcatttatgtggggccgtgagtcccctgttctcacccagggactgcaaggagcgccatgaggctctggagtaactgccctgcaagctgctcggtgacacacacaccctgtgggtggatgtggatgagtacatggttcccactaaggatctgcttagtggaaggacatgagcctgtttgtttacctttcacacggtctaacaatcacttagaagagtcaccctggacacccagtcctgagtgtgctgtcacctctgagagccacacccagcagccctccagccctttgtcattcatgatgccttgaatcacggccctcagagccctccagtggcaaacagggtggtaggtgcgggtgggctgcccgaggtgaactggctgtggaggccgggaaggcggggcatgtgccgggccgggctgggcgagctcctcctgactgcgggccaggtctccaccgagtgtcccctgcgggcagcttcggcgcagcatccactccattctcccgccgacctatcgtggaaggcactgctgccccattagacagactggggcctgggctcagggatgcaggtgcctgcccacagagggtggatcctagcccaggctggcctggcgccagggttcatgctccacgccctgcactcagtgacagctgcagcggccccaccactcccagtgtccctgtgggaggggcggccagatgcagctttgagaagacagcagctgcctacaaagtgctttctggaaggagctgcagaccccagttctgccgagccccggtggcacctgtgtatctctgcgattcccttggaagcagggcctcgggagggacctgccaccgagccccgtgtggcgtctgagggtcctctttcctgtcccccaggatgcctttcaggaggagtactacaggacgggcaccttcccagagacgcccatggtgcccccccggcggccctggaccctcgtgaactggctgttttgggcctcgctggtgctctaccctttcttccagttcctggtcagcatgatcaggagcgggtcttccctgacgctggccagcttcatcctcgtcttctttgtgggtgagtggagggcaaggggctggtgggtgctgacagcaccaccctgggagaggtggcatcagggctgggac

SEQ ID NO: 37383 - DNA, 2300 bp, Homo sapien
agcaagtcaacagcacgcccatcccacctgcagcatagggaccgcacctccccttgatttcatcggtgatattctatttataggacttcactcattactgtgaacacccaaacaactaatgctgtgtgtaagggggtctgcgccctgccactgatggtggagactgtgcttaggattagagtcttcgggggctccacttacaggtgaaataggcaggtctgggagcctggggccagggcgatgcctcttctcttctcactggaagtttgggagccttgctcagtgggggccttgggttttctggattcttgctaaagtgcttccttaagccctgagtcctctcttctccaaacaccacagaaacagccagtgccattgttatgcacattctcacaaagcaaggagctagagagagcaggtgccaggagaggactgagtggggcaggcacatggcaggcactggctggggcggatgggagctgccagcctgtaccctcccagggaaccccctccccatgtcacagggaacagctttgccatctactggagagctgtggcccatgacggtgggtgagatggctggtgctcatctctgccaccctggaagggggtaaagaacggcattgccttatattcattgttcagcaacatcttttgtctttaatgaccttcagaaaaaaaaaacaacctcattcatctctctgttttttcttaaataacacatgatgttgggatccttctggagtctgtggaatttgctttttaaagaggaaaggaacagaagaaggttcctgaccaggcatttttcatcctcacctatcacagtccaagaggaaatgagtttaaattgaagtcaatgaaatttgcagaaattcacgaaggtggcatttttaaatgtaaaattggtctttttggggaaagtaatggaattgtctttttaacaaagaggctttcaaccttttaaatgtactcaagatcccatgaggccactgctcattgcagtgcctgtccccagaggctctggttctcctgggagccagtgcttcctggcatgtgccagggctctgaaggctttggttgatcttggagtcacacgctgaaccttgcctccctggagatgagagtgacacgcagtcagctggggcacaggtcactaaggtgcccaacaaaccgtggtgtgcaagcgcaggtcaggttcctgaggcttcacgtccccatttgcttatctttttcccttagcaggtcccggctggttgcataagagcatgatcgttcagtgtctgggtagcgccaggccctggcaagcacaccatgagcagcagctattattatattatcaatatttatctgccgggccaactgggatatttgtcttcagatccttaaagaagccatgtggattagttatccatggcagcgtgatgagacccaaaacatagcggcttaaaacaacaagcgtgtcataaaggtcccctgcctatgtggtcaggaatccaggtgcagctgagcgggggatctggcagggtctctcgggaggggcttgtgtgtgatctgcctccaagcttgctcacgggtttgctgcccggcctccatccctcgccacacaggcttgttttaaaacacagtgtttcccggaatatggcaactgcacccctgaggttgagccatgcaagagagagagagcgggcgcccggggcaggagccatgaagcttctgtaaccgggacccgggagagacctcccatcctttctatccatactgttggttggaagtggatcagtaagcaccgcccgtgccccagggatgtggggtagggtgtgcaggggcgtgggtgccaggaggccaggatcacagggccccttggcggctgcccaccccacggtgacatgacatttggtctgagaccttcccttgccctcttagtaaatatgtaatacagctgggcctgaacacagattgagatgttgcatttctggcctggcacagtggctcatgcctgtaattccagtggtttggaaggccaagatgggaggatggcttgaagccaggaatttgagaccagtctgggcaacacagtgagatctctgtctctataaacataaatcaataaataaaacaaatgaaaaatagcagcattgcatttctttgcacagagaaaggtgagaggaggagagtggcattatccctcctaggcagagtgcctgtgcgtgagggcgcccataaagccctgtgctgcctctttaaacgaaggattttcgatcatgacaacgatagcaattgatataccttcaaaatacgtg

SEQ ID NO: 37384 - DNA, 2300 bp, Homo sapien
tagaaatagctaaataagggcacataaggatagactctaaatggcactcaataatgtgcatagggctgggcgtggtgactccctgcctgtaatcacagcactttgggaggtggaggtggatcacctgaggtcaggagttagagaccagcctgggcaacatggtgaaacttcgtctcaaccaaaaacacaaaaaatcagctgggtgtggtagtgtatgtctgtaatcccagctatttgggaggctgcagcacgagaattgcttgaacacaggaggtggaggttgcagtgagctgagatcgtatcattgcactccagcctgggcaacagagcaagactctgtctcaaaaaaaaaagcataggatttaatccatgaattttgaatttctatgttaaatttttagaaatagtaactttttctcccatatttctcagctatatctgagataactgggactgagcaacattgtctagacaggcaaagtgttagcaataataagtataataataattgtaatgtaataatggaatgaggatgttaaagtactgagatcaggataaaagttacaattgtccaaattttaaatttcctatcatttccactgaaatcactgactgtacttataacattatcaggaatttatgcaatttgtaggttttgaaataaattaccattcagaattcaaccgtgaaaaacagtgtaactctacttgaaaaacactttgaaaaactcaagtttccaccaaatctagaagcacatgggtcgtaaaacatagttcgaaaagttacgagagatgatgactacaaggaactttttataaaaatcttttataagcattactctgtggtcaaatttattttcacatggatattaaaacaagttattgctacaaatgggtttctgttctgatcctttttttgtttgcctcacatatcctttctcttccaccacattctgcttcactctccccgtctctcatcacagacaagaaaaatgccacctcccataggacccactccaaaccctgtttcctgaatgatcaatgccttcccccatcgcaatcaaaaaagcactttctattctgtcttcatgacacactggttttgacacttgcatagctgttagtaattctgcaatgtgcttgggctatttgtgagcacatgtatttttcctttatagattataaacatctaaagaacaaggttaacccaggagtcaagtaaatagttaaatattattttgacaatggctgtaatagtggacatttgaaaggaatacacctcagtattttgaaattgaaataattttctagatcctggcatttctggactttcaacagcccaccctttttaaaaattgtgaagacacttttactataaaggtctgcccagaccctctctgatacacctgtgtaaatgccacgtgcatgtgagcatgcgacagtacgtgtgtgcacgcctgtgcagtggtaatcaaccatggtgctaaggtttgaaaacagaaaatacatcaatcgacctccaagcttctttcatcccacttcataacatctcaatctcttgagtgctgaggcttattttgtttaagatgatttggactcttctgagtgcaacgcaatctccttccagcacagcggaccgaggagaggtgaggggagagttttgagggtgggcatattgatcctacgcttgctgaattaaaaatgagccaactgaggacaatttccaggttgcaacacagacggagccggagtctgggttgaggttagaggagccgttagggcgcagggatgcaacaggatttgggagaaaggggagagaaagcaaggccacttccagggggctttcattttttttttatcctggcagcttcccgagccagatttcaaaagcgatttcaaacgtgaagccaactgaagcactgccttacactaattggaaggggaagggagtgactcatattacaccagctcgctcttccctctcggcaactgctaacttgtagctttaaaaggaagtgacatgggtggggagagacgtcagctgaggaccactttttttttttttttcttcctgaagggtccaccccatgggtggagtctcgctttttctttccagtgttggctgacttacagctcttataaactagtggcaatttctgaacccagccggctccatctcagcttctggtttctaagtccatgtgccaaaggctgccaggaaggaggtatgtggtcctggtgccgttcgcaggcaccttccccgctgggtgtggctgatgtttgcattcctcttcccagcat

SEQ ID NO: 37385 - DNA, 2300 bp, Homo sapien
agctagcccacctccgtttgtgaagtgtgtataaaagtcaagtactgtctttattctgggcccagtcttttggatgtgagtcagctgggcctgagtacactcaataaagattctcctgcttcaacctgaggtctccctcatactcccgaatcccgcaacaaggtgagtgtaatagttagagaaagcataggcctgaaaggagcaagctttgagaagcactcttacctttaacagaaaatcccagatacatactatttacattttagtgatcactggataaagtctataatgtctttcctggctctgaatttttgtcacaaaaacacaaaacccatcactccaaggcttccttttaatggttttcactttcacctacctttagcactgttcacgacacccaaatcccaaactgaccattcagatgtttactgaaatgtggctaatgaggctgggcgtggtggttcatgcctgtaatcccagcactttcagaggcgaatgcgggaggattgcttgagcccaggagtttgagaccagcctgggcaacattatgaaactccatctctacaaaaactataacaaaaaattggcaggcatggtggcacacacctgtagtcacagctactcaggaggctgagatgggaggatcacttgagcccaggagttggaggctgcagtgagctgtgatggtgccactgcactccggcctgggtgacagagacagaacctgtctcaaaaagaggaaaaaaaaaaaaaaaagacgtgtgtctaatttcagaattaggcaatgcaactagttgaatattttattgcacattgtccatgatcttatatgtaaggcacatttcctagggaaagcaggcatggatttaatcatttatgttgtactgcacacttatttgcactatgtaaaaccatggctggagtgagagaaataacacttttaaaaaccaaccttatattctccatgtcattaccagtaattgataactgtttaatcatcaactccaaagatatttcttccttattggaagaattccagataaaactaaacagaactgtccaaacacatttcatcctaataaagttatttatataatcacttattaggtcataacttataactgagtaatgttctttagatcttaagtgcttgtctttatatagctttacaataaatttgtttctcttaaaattatctgtgcactagattaagttaaattaaaataaaatgtatttaactgtcttcaaaataaggtataggctattttcttcctgtagactgacagcacagatattggaaaatctcttctacttggttttctgattcagttcaaacttgtgcttgcaagtgaatcttacgtaaatgtcacctaaaaagagctcaagaagactcataaaaaatatttttttcgtaatttgattaactttcaagtcattcaccaaaagtcagaccatgctagaaagggaagaaaagttggacaacattcttgttttaccacaaagaccatgccagttagctggcttgattctcccactgatggggagaatgtttacattttaacaataacttcacaaataaacagatgtaagaagtgttttcagtgcataaagatcatatactttataaatccacctctcatctttcttctggacagaccacatctgacttcgaacgtacttactgcaatcaaaagtgttttgtaaaggaccctcctcaggaataaacaagctcactaaaccctccatacataacctggagaaacctccacaataatgaaaccccatctagcactgtttttcaaacatatggtgcatttccattaattttcagggatagcccctaaagtaacttttggctcaacaaccctggaagagaggacctttgctcatcttacacatcaagtgttcatgaacaactctgatgccactaagtttcgttcacaaacttgcacctcggtcgttcttttacaaaaaaaaaaaagaaaggttattttgcaaaaggcaatagatttaatcttggctactatttactcttaatgtttctttcatctcagccctccaatgagaagtttaaaaggaaacatccgagggagcaagtttagatctatctggaggagtttctgtggagccagccaccctcaccaggtgccttccattagagtttaatgctttgctgcggtttcctgaaagagccccacagagagtgggtctcgatgggtcctgaaccgcaccacaaccggccagtgaggtgaggggcgaaggtgaggggcggcggcggggcgaaggtgaggggcggcggc

SEQ ID NO: 37386 - DNA, 2300 bp, Homo sapien
aatcatttatgttgtactgcacacttatttgcactatgtaaaaccatggctggagtgagagaaataacacttttaaaaaccaaccttatattctccatgtcattaccagtaattgataactgtttaatcatcaactccaaagatatttcttccttattggaagaattccagataaaactaaacagaactgtccaaacacatttcatcctaataaagttatttatataatcacttattaggtcataacttataactgagtaatgttctttagatcttaagtgcttgtctttatatagctttacaataaatttgtttctcttaaaattatctgtgcactagattaagttaaattaaaataaaatgtatttaactgtcttcaaaataaggtataggctattttcttcctgtagactgacagcacagatattggaaaatctcttctacttggttttctgattcagttcaaacttgtgcttgcaagtgaatcttacgtaaatgtcacctaaaaagagctcaagaagactcataaaaaatatttttttcgtaatttgattaactttcaagtcattcaccaaaagtcagaccatgctagaaagggaagaaaagttggacaacattcttgttttaccacaaagaccatgccagttagctggcttgattctcccactgatggggagaatgtttacattttaacaataacttcacaaataaacagatgtaagaagtgttttcagtgcataaagatcatatactttataaatccacctctcatctttcttctggacagaccacatctgacttcgaacgtacttactgcaatcaaaagtgttttgtaaaggaccctcctcaggaataaacaagctcactaaaccctccatacataacctggagaaacctccacaataatgaaaccccatctagcactgtttttcaaacatatggtgcatttccattaattttcagggatagcccctaaagtaacttttggctcaacaaccctggaagagaggacctttgctcatcttacacatcaagtgttcatgaacaactctgatgccactaagtttcgttcacaaacttgcacctcggtcgttcttttacaaaaaaaaaaaagaaaggttattttgcaaaaggcaatagatttaatcttggctactatttactcttaatgtttctttcatctcagccctccaatgagaagtttaaaaggaaacatccgagggagcaagtttagatctatctggaggagtttctgtggagccagccaccctcaccaggtgccttccattagagtttaatgctttgctgcggtttcctgaaagagccccacagagagtgggtctcgatgggtcctgaaccgcaccacaaccggccagtgaggtgaggggcgaaggtgaggggcggcggcggggcgaaggtgaggggcggcggcggggagaaggcttcgggaccccacacggtccgggggaccgcgaacgaggagcgggggtgcggggccgcctggcgtccccgtcgaggcggtcttcatgagaacgctcagagcaggggcgggcaggcgagggcttcgaacgcacacactggggccccggacccgcgtcgctgagctggggagcccggcggcgcgggccggggacggcacgggcactttggccccgtcattgacagttggcaccgggggtcctggtcggccgaggcggggcgtggcgccataccggggcgtggggcggcgcagagaggctgtacctggcaggtacccacgtacctatcatggtcactgggtaggtggcggctgcgggccaggaacaggcccatgcgcgcagcggcgccagccgcgcctcccaccagcggctctcctgggttaaatcctccaggcctccccgcccccgcgcccggccctaggaatgcgcacgcgcggagggcgcggcccagggcctgctgggagtcgtagttctaacgcgtagtttctcctcacgcctcctgcccccagccccccaccgccgccctttccggcttcaggcccagcaatcttacgtcaccggggggcggggctatgcgcccgccgtgttgaccagtcgcttagcaaccgggaggcttacctttggaagcttgttgcagctctagccaaggtcctgccctcttcccgccccgcccctagggtccagctcccttcacctaggagctgccaaacatctggatcaacctgggcactacgaggggttgaatttctaccattatcgcgccttttgatatttttttccagacctcctgctcacatccgtaaagcccactgattcttttac

SEQ ID NO: 37387 - DNA, 2300 bp, Homo sapien
gtaggcatacttattacatttggcaatacagaaacatcagattttgcagaactatctctttaggtgtaagattatattaaagaattaatatgatacaagaattatgaatacaggtttaggaaaaaacagaaaagaaccccaaccagtaaaaaaaaaattaaagtataacattaaaaaacatcaaaattgtaaatattgtgtagaagaaaaactaaatgattaacctgaatggttatggtattgctgataaatgcatcatcttgactcctaggagaaccaatttatgtgaaattccatgaaaaagaattagttacaacaagcagaattttagtccatttccaagaattttaactactgtaaatcacctgacacacttcccaataattaggatatcgttttgcatagccacatgggaacctggcctagaggtctataggtaatctgtttcattcatgtattttaagtatgtcgtttaggaataagttatcaggtttgcaacctataagcaaaggaaataatgtgacactggaaaacaacactattcatttaacataatgaattgccatgtaataactcagatcttcccagggtgtaaattacacaaatttgaaagatgcatttattatttaatgcctcattcccagacagttgcttactcagtagcaaaatctgtcttagcataccaagtgtaaagctatttaacaaataggaaggtttaaaaaatatatactatcatgcagacagctaaaatatttgtatatatttttaatcttttttctctaatgatacttagaatattttatttttattactacaaataatagagatgaaatatgaattgtattagtagcagagatatatgagctaaagcttgtattgtttaaagcacatcatcttaaaaggcctgtcaggaaacagtgttcatattaagttggctttcagtactctaagaagatgacatcattttgtaagagacaagtgttgttagagcaaatgctaggatattctaaaatttcctaggttgaagtgaagaaatttctcattatagattatttcatgagtttatgttcccggttgtatatcagctcatgttaaattttgcaagagtttatgatttctaagaactcaccttctataaggccctttgctgagtggggctagttaggaattagtaagtaaaggggatcttttttcctcgtgtaaatagcttaagagtaattttgggcggtccagaaaccataagttatcaggaaggtgcttataaatgggcagagtacatcacttgcccaagattctaacaacctagcctgccccccacacactgtggggcaccgtttgctacttgccaagtaactgccttttttggcaaagaccacccaggacatggctcagagtccatcctaaggctggccaacctctgtaaatctcgtgtcccctgattcagagcgagtgcatttaattcaggaagatcacttacgactgagtttttcatcatggctttgactgtgaaaccctcagaaaccagagagtgaggctggtgcaccgggagcggctgttgtgccagcagcttggtcctcttcggcatcttgtctgggcatttgtttaagctcagggtctctttttctgccaccatcttcctagaaaatgtcttgttctcataaaaagtgtagtaaaagaatcagtgggctttacggatgtgagcaggaggtctggaaaaaaatatcaaaaggcgcgataatggtagaaattcaacccctcgtagtgcccaggttgatccagatgtttggcagctcctaggtgaagggagctggaccctaggggcggggcgggaagagggcaggaccttggctagagctgcaacaagcttccaaaggtaagcctcccggttgctaagcgactggtcaacacggcgggcgcatagccccgccccccggtgacgtaagattgctgggcctgaagccggaaagggcggcggtggggggctgggggcaggaggcgtgaggagaaactacgcgttagaactacgactcccagcaggccctgggccgcgccctccgcgcgtgcgcattcctagggccgggcgcgggggcggggaggcctggaggatttaacccaggagagccgctggtgggaggcgcggctggcgccgctgcgcgcatgggcctgttcctggcccgcagccgccacctacccagtgaccatgataggtacgtgggtacctgccaggtacagcctctctgcgccgccccacgccccggtatggcgccacgccccgcctcggccgaccaggacccccggtg

SEQ ID NO: 37388 - DNA, 2300 bp, Homo sapien
ggagaaagatgacctgtatcaatatctactacatcaaaatgcctagaaagtgaaagattttagagacacctttatgtaggtgtagctgtttccatcttcaaaataaatgaatggtttataatatgatatagttatttctaaaaattaacagtgcctcaggtatttatcttcatctctttctctcgaggtctctattgaagagaccgtttcaaaaccacttgtatgcttctcttcgctctttatttacacagcagaggtagagacaatgggccatgtattttaccaattcatatagcatttcttccctccccaggtgcccatatggaaaacctttacaaagagccccgtccccaccccgatcaccatcattagaagtgtgcgatttatattacagaaggacagaaaattaaaggatggcaatttaagatgagaaaactcaaacacaatttttaaaattccatcgttcatctgattatctgctttgtaacttatccagacagcttagctcttttctcacttgttgccaataatgtggatattgaagacagcaaaagaatcaacagtcgtatttcccaaatgttagaggggtcaaggaaaatgtagcaaaagaaacagattaacattttttttgtttaagtattccttatgcttttttataactacaaccattgataatcaagaattctttagtgatatttagaaaatgcatatttaaaaattaaaaaaaaagctattcctgggcttgccggtagatttcatattcgagatgagatttattcaactttcatagctcatgaacttgccattgataagtatatagaaattttcactacaaacattttgcaaaacgtttctcacatttactaataaatttatgatatgcatagaaaaccatgacaaaaaatccacagatgagtcccgttttttcactttaataataaaaattctaacacagtgatagccttctatctatctgggtagcagattcaggcatttatttttgactgccattatcttaatctgtagctgcatggtctaatatggtaaccacgtggctatttaaattaaaattaattaaaattaaataaaattaaaaattgagttcctcagtctccgtaggcacatttcaagtgcttaatcaccacatatggccaattgtaccatattagacggtgcagatgtagaacatttccaccactgcagactgttggatcagacactgctgcaatcttcagagatgccacaagaaagagacgaagctgcagagacgatgacacgcagcctgccacgttgttttggcatctggaactaatgaccacttccatgtgcatgaaactggtactgagagcagggcgtgggctgagaaacctaagcatgcaaagacatctgtctgtctctaactcttgcttctactttctgatgttaccatagagtgcctttgttatttcaagaacacacaatggttcctaacctggtgaagatcaggtcagctaatccagaacaaatagaagaggagtctgaggacctggggagggatccccagaccagcacattcacagactggaatgaccgtgagaggctggggcagcctgtgccggggtttacagccagtgcatcctaagtccttcggagccacaggctctggaaacactgataaaagcaacagacctgcttctcacttagttatgtgcatcatttcaggtgctcacaagtccacttggagtctctagggtgtctgaggagagttgagagagggccggtatcctcggagggaagcactgctcctcagcagtcctcagtgagggatgagctatgacattgagaccagaggtttgcatgaccagaaaccggtgctctgcccacacacaagagaagagtgcagggtcttggcctcttgcttttagttttttgtgggggacggatcgccctgcttccttcaacactcaagagttcttccttaagaatggcatcctaaaacaagtccctcctcctacttagcaccagattgtcctttcatcaaatgtgccacgaaataaatatgaaactatggacagatggttcccaagcctatgtttaacaatcttaatgtcttggctgggcgcggtggctcacgcctgtaatcccagcactttgggaagctgagacaggcggatcacgaggtcaggagatcgagaccatcctggctaacacagtgaaaccccgtctctactaaaaatacaaaaaattagccgggcgtggtggcgggagcctgtagtcccagctactcgggaggctgaggcaggagaatggcgtgaacccag

SEQ ID NO: 37389 - DNA, 2300 bp, Homo sapien
gattgacacatagactgctctctacatatatgcattcataacatatttaacttttgttttgtttcgttattttgagacagggtctcactctgtcacccaagctggagtgtaatgtgcaatcgtagcttaccgaagccttgacctcctgggctcaagcgatcctcccacctcaacctcccgcctaagtcccccaagtagctgagactacgggcctgccaccacacctggctaatttttgtagagatggtgtttcaccacgttgcccagactgtccttgaaatcctgggctcaagtgatctgcctgccttggcctcccaaagtgctgggatgacaggagtgagccattgcaccctgcactttttgttatttttttccccaatatttctaggctagaaggttcatctataagttttttcaaactgtaacaaatcaccaagaaattttccagtatgtttattgaaaaaaatccttgtataagtggaccagggcagttcaaatttgtgttgttcaagggtccactgtctgcataaaaatacatatatacatgcacacaagtgtaaatgatagatatagacagtaaattacaaagcaaattgggtaaaatgttaacagtaggtaaatctgggtaaagggtgaatgggatatggatattatctcaactatttttgtaaatatgaaattatttcctaacaaatttttttaaaaaaattaagcaacttatgactacttcatgaattttagttacaagcagtatgtggagtaaatgctttgtactaaatttgaacacaatggtgtttatggtgaacctgaaatataaaataacagtgttaacatgtcaccgtctcttctgtggagtgatacatgtatgcctgtgtatggtggttggcatttatgtgtattttcccagctccccaatgataaacctaaaaacctctaaacctaaaagtctcagcgctaaaaatccagcaaggtcaaacaaagatttcaggggcccaagctcatctattagcataatatgaacccagcccgtgtaacgtactgaaattgtgccatgccacttacacttaaacagacagaagttctctgctctgggtctctcaatatacattttttcagcaccctgcttcactttagaggtgaagttgtgggctcaatgttacccacatcacttgcccattaaaaaagccaccatcgtcataataccataattttctgcatgaaattttggtctccttacccttgtagaggttcctctatgtacaagtttgcacaaaacactgcagggattataaaccatgaagaaaacatggtttcctttcaatgctctgcagagtttggccttttgagtaacctttttttttttttctgggagctttctttctcttttttttttaattattttttgagatggagtcttgctctgttgcccaggctggagtgcagtggcacgaccttagctcactgcaaactctgccacctgggttcaagcgattctcctgcctcagcctcccaagtagctgggattataggagcgtgccacaacacctggatagtttttgtattttttggtagagataaggttttaccatgttggccatgttgatctcgaactcctgacctcaagccatctgccttcctcggcctcccaaagtgctgggattacaggtgtgagccaccgtgcctggcctaaataaggtgtctttgaacagaaacatgtataaaactgaattatgtattgatcgttgatgaaaatgtgatcagaggtttttgggaaccaaccctgtatttccttgaggagcagtattggctaattcagtgttcctggtgactttaccacaaataatgagagttgacttgcatgtgtgtgtgtgtgcgtgcacacgtgcatgtgtgtgtgtgtgtgtgtatatatataaaataattattactgtttgctgaatcatttgagagcaacttgcagacattatgatccttcatccctgtcttagagtgcatttcctaaaaccaaggacattcttttacataaagttactttatcaaattctgaaaatttaatattgttacaatattgttatttggtggtcattctaaattcaaatttttccaatttttcattagttgtaagttctttctgatgcagaatctagtccagatcacacattacatttatttgcctcctgagtagctgggattatcatgcccaactaatttttgtatttttagtaaagatggggtttcgccattttgtgcaggctgatcttgaactcctgacctcatgatctacccgccttggcctccca

SEQ ID NO: 37390 - DNA, 2300 bp, Homo sapien
ggtttcaattcctttgaatatatacctaggagtgcaaatgctgtgttgtatgggaaactgccaaactgctttccagaatagctgtaccattttatattcccaccagccatgtatgagggctccagtcactccacattctcgtcaacacttgttattttctgtagtcttcattgtggccatgctaatgtgtgtgaaatggtatttcctgtggtttagattttcattttcctaacaagtaggatgtggagcatctgatacatgacacaacatgaatgaaccttgaaaacattttcctaagcgaaggaggacagtcacaaaagaccacatactgtacgattccatttctatgaaacgttcggaatagacaaatccaagagacagaaagtggctgcttaagagctgggggaaaggattctgggaagtggctgcttattgggcatggggtttccatgtggggtgatgaaaaagttctggaactagatggtggtcatggtcacactgtatgagagtacttactgccactgaagtgtacacttaaaaatggtaaaaatggtaagttttatgtgtattttacaatgataaaaatgccaaagaaaaaataaaacaataaaaaacaaataacaacaaaataatagaataacaatttgccattatattttgagacacaaacttttttaacacagtagatacagttctacttcctacaggatgattttttgtatgtaaattccttttacatatcttccagggttcctttttattataataattttgttttcagtggatgaatttggcctaggctttggtaatccctcttatattacgtttatcctcaggcgcttgtttgcgtgtgtgtgcacgtgtgtatatatgtgagtgcatgtgtgtatatgtgtgcgtgtgtgtgcgtgtgtgtgtgcatgtgtgtgtgcacacctggatatgtgtgcatgtgtgtgtcttaataatatatctgacttctctttaagtactttttctgaaaagccactgctccatttccacactatccccagtcacggctccatttccacactgtccccggtccccgctccatttccacattattcttcatagtaaagtttttcaagagaattctttatcatcactgtccttgcttcctcattcccgttccctctttaacccactccctcaccatttcactgaagttgcttttatcaaggtcaccagtgactttctttgtgtctaatccttgaatctcctttctgttctcctcagcacagcacaattgacctggtgaagttgtacccccaacactggcaggtcaccctaattccctccctccaatccctggcctggcctgacctcgctggttctgagacagccaggggggaggcggtccttggagaaggtccaccctctccatctttcctgcccactgggaggagccacacaggttcacaccatttgccgcagggagtagcctggcccctcctcttcctgtgtggaaactgggatgcgaatggctggtgggaagccccaaaatgggatgaggatggctggtgggaagcaccctagcagggactctggcttagcgagagtccctgtttcccctttttcttcctttttcacccaacaaaaccctgtcttactcattcaaattcaaattgtctgtgagcatgaattttcgtggccatgggacaaaaaaccctgtcttcagccgaactaaggaaaagtcccgcagcagttcctccttagggactcttcgaacgcactgtcttagcccaggctgccttaacaaaataccatggacaaggtggcttgaaaaacacacatgtattttcccacagttctggaggctggaagttggagatcagggtgtcagcatattcgagttctgtggagggagagatcgcttcctggcttgtagacagtcaccttctcaaaatgtcctcacagggcccttcctctgtgtgcatgcggagagatcgctggtctttctcttcttataaagacaatgggcctactgggttaaggccccaccattatgatctcacttcacgtttattacctccatacaggccccatctccaaatacggtcacgctgggatttgcccaacataatgaattggaggggagcggtggggcacgattcagtccactgcacaccgttctcctctccagacctctcactggcaagtcctttcatctcaatttcagttctgtgaggccgtcctactattgtctatcaccctgtttgatttttttgtagcctcatcatttattcattacagtttcttaagttcttttttttagggag

SEQ ID NO: 37391 - DNA, 2300 bp, Homo sapien
aaaaaaaaaaaagaaacaaaaagaaacagtttcctagtccaacatggatttgaaaaagtctctgattctatgttttctccaatatgtttaaaatgtgtactacatttaaaatacatttttatttgaattacttttaggaatactttcaaactatgacgggctggtacaatttctaactttgaatattgaaacaaaaattatctctgaggaaaatttgtcgagttcaatataacaaaataaaaatattttttatttaataaaaataaagaaagaaagaaatcccatgtgttcacgtcttcatttagtgtttccctcccagttctcaggaggccaccatgccgccctgttccgcacatagcactgggttcttaaaaatggtcagtctcggtatttctggccgggcagcccctgggaacaatcgccttgttgatagttttccacacttaatcagagaatttaaagcaatacaaatggaatagtggtgaaagtaccaactctgaccttaactcttcatacattgtcttaagtttaaattcagccctcaaaaacaaatttaaaacaaaatgaaagtttttcctctggatatttgaaagactgacacccattttcactctctcaatctaagtgaagccttatggaaatgattagcacacaaggcatatttctatagttggatatttataaaatataacgtggcacattaaaatttttctagactctatcaccaccttaaaaatgaatatttaaaaattaccctgcagttacatgccagtgtgcttgaaatttatttttataaatattcatttgaattataggcttcaaatgtctgtatcaagcaataaattgtcattttaaaaccaggaacaacaaagagtgactgtttattgggtttaaaaaaggcttttatctctcacagactttgggatccggtttaagggttgtagaatggtaagaagtatcgggcatttggaaaaaatggagatccaaggagtgaagaagtgtgtcagatctttttaagcaggaaatcgagtgatggctgcctactgcaggacgtcacagatgtctgcacctgtccaacccttgacagatgctcccaacacacccaacctgggagccagtcagcctaaccatcttccctgcaaatacacacagtacaaaaataaaatgttctctcatcaagtctaaatagagatccacataagccatccatgtcagagaactctagctttgtacgctatgataaaaaaaagtatttaaaatgaaataaacaccttaattcatgctcatcttgagacacacttaccaaagtttaaatgtttaaaaataaggcaatagacatttttatggttgataacaaactacaaatttgtctgggggaaaaaatcattaaatgtttgacaaaagagctgtgataagagataaagaacacagtattcactgtctaaagaaccagaggggaaaatacagcttgtccccgagcccacattttcaactatgtgtgctatgattacagttctaaacaatggatactgtgtcagcacagagaaaaacaaacaatagatctttttctgaaagtatctgtaggaagaccatacaaaacagtcaacaagggaactgaaataatccttgcattctttgcaaaaataatactttaaggttcctttgcaagaatgttggtattcttttccactgtgcatttcattttccttcattcactacagattttctcccaacctgcacctggtttgagcagcagtcagctggcttctggggactttccctatttcattccctctaacccccagagactctggaggcagctgcacaactgtgctttctttagttataaaagctagcttgtgacatcctttgtgtgattcagttaaaaactgaattaactgaaatcaattcaacaacaactgccccggtgcttccccgtagatagcaccgctggtcagttcgggaggggatgggacattgaggagcaggacagtcttcaggaagcttacagtctgctttggggtgtgagacaccaggcggggtgtggctttcattgggagggactcctatgaagtgttacagggtttagagaaaaaaggtggctggaaatggaagatgagaggatcctggacaacctgggggcagagggacgtcatggctctgagtgggagtggagaagatggcattttggtggatgggtggaggaagagcataggcacagatggccacgtggagtgtggtccacagataagtcacctggtggagtgcagccacagtgcctgagtcaggaggtctcagct

SEQ ID NO: 37392 - DNA, 2300 bp, Homo sapien
gaaaaaagaatgtaacgttggaacacgggagacagaaggaagtcaggtgtggccaatggcagtgaggagttgtggggtgtttgtgaataaaaggagccacacatctttgaaggatggactgaaccaggctgacattttcaccaataaaatgtggaggaaacaaacttcaaagtaatagggtctatgttcacggtggccaaaaagaaatgctttctggtattctgtgctaacacccaacatcacttctcaggtgtgtaatgtggaaaacattaaagtttcatgccttggttttcagagccataaacaaacttaaacaaacgggttccatggtgtgcatggaacctggtcagggctgtgacatctgcgtgacactggaaactggtgccacgtcacagaaggcaggctggtcacagcgttgtttcccctgatgacccgaatggccacatcatctaagatgaacttgtctgggatttcagagtggagtgtataggtttctgttcacattgttttgtttgtttttgtttttgtttgagatggagtctcgctctgtcgcccaggctggagtgctcactgaaacctctgcctcctgggttcaagtaattcttgtgcctcagcctcccgagtacctgggattacaggtgcgtgccaccattcccggttaatttttgtatttttagtagggggtttcaccctgttgaccaggctggtcttgaactcctggcttcaagctagccactcgccttggcctcccaaagggctgggattacaggcatgagccactgcgcctggcctctgttcaccttgtttattctctatttatttcatattttatatttatatgtttcacttatcttctattgaaagattacgtgtcagcacagtattaagtgattttcacaaaatacctccaatgcctccctcccattttgcagatggagaaagtaaggctggagagtaaaggcagagctgcagtttagttggccttgaatcctaaccaaagggttttactctccacctcacaccggtctctagccctcattttgtgttttagattggaggccagtttctctgctctcaaggctcgcctagactatctgtgtatccaaatgacaccacctctttttaactccaatccaccatgctgtcacaaagcccctgagatctttgtctacttgttttacagccctgctgtgaacaaacattgggatccagattttaacttttttttttttttttggaaaaacagtacagtgtttgctctttagtgggaactacgctcccagtcctgcaggctggcatggtgcagtgaatttccacatgccttcacccctgtgagctccacagcaaccacagccgggagggcgggccttcctccggcaatgaagggtggcctcccttgcggctgaagaaacagaagccgtccacacattttcactgctttgcagattcgtacagatcttttccagaataaagcattattcggccaggacgcctcagcctcttctgtgagatgtggtggtatttgtcagctatgtggcctttgccctgctggtgacatgagtagctattgaaacaggtctccaagactcaatctcttccttctcaataaagcattttaatcaatttggttgtttgtttgggtcatatttgctgagccctgaattgatggaaaaatcactccagcaggacgtagcctctcccctctccacaaacaaagatccaccacataatattagattgagacaaatattgtcacagttcaggaatgttttgcagttgggttctctctaaactgcaaacattcttttaatatggggaattcctatgagagctgtaaaaatcctactcatatgacatattaccccctcttgaatgaagcctactgaagagttattaaaaatttaccttgttgtcaataaagttctttatgggacatttttctggctgcattttaatgtcatgttcgctgccccagatgtatgaggaaggagacaaaaaggccatttaaagctctggttctagaatgcccctattatgcatttgatgaaatcaagtggcatgtgggtttgctgtatgtggacatagttttggctgtaggttgttttcacgaacccacagagacagaaacctgcggcaatggagaaaatgctaatacagacatcttacttcagtgtctggcaaacaagattatacgtaagtcattttagaagaactgattctgattatttgaattttgagcctccactagaaagatttctttctgtattaatggaaatgattcattttttaaaaaagtctca

SEQ ID NO: 37393 - DNA, 2300 bp, Homo sapien
acactttgtttttcaacctctctgacctttacatcaaaacatccatcaggggcttgttctgagaatcttggtcactttgattcttggcccgaaacactgacatagaactggtttcccaaaggattctgtggagaaggctgagaagtgtgacagtgcctctttaattagatttgtccctgaactttgagaaggtcaggatgttcacagcagggcccttaactcttagagactcatcactcctgggcagaacattggcatgtgctcttcccagctgtgtcccctcagaggagacttttcacagttttgtgttgggccagccatgaaaacagaagctcagcccgttagtcccagctctatgggaccagctttgagaaaaacaggtaataacagacactgatttattcaaggatgcgatccttcaacagctttttaccatatccacaaacacaaactccaggagggcctgaagctgagaagcagatgggctgctggggacacatatttacagtgtgtgatcattaagcaggggtgtcctcacttcccaaattctagtaatcaatacgtatttcctatggctgccgtaacaaattgccacaaacttagtagctcaaaccaacacaaatgggttctcttagaattctggaggtcagaactctgaaataggtcctaaaatcaaggtgtcagcagggctgtgttccttgcagagatgccacaggagaatccatttccctgatttttccagcttctagaggccacccacattctttgacttgtggcctcttcctcttcaaaacttgtcctgtagtcatcgtcctgtcatttttgactttaatcttcttgcctctctcttaaagatccttgtgagtagattaggcccacctgaatcatccaggacaatccctccatccccaaatccttcacagaatcacactgacaaaattccttttgccaggtaaggtattcacaggttctggggattaggacgtggacgtctttggtggaggagggggcatcgttctctctaccacaccgagactttgcaaaaatgtgttcttcttggacaagtaaatttggaacatgttgggttaaataaaaaaaacaaaccaggtttctttattgcaggacttttccgtcttcagtgttaatgaatgttgtaaaatccaagagggaaatgtagtgtatagtgtttcccaatcttgtttgaacaagatccccctccttcatttccccccatgaaagcagtgaacatttcaggatcgagtggggacacagtctcaggaaacacattttggcccaactgcggaagtcaaggcctggaggagcaggtttacatctcaccaaggtttggggatgaaaccgattacaggggagaatcattctgtggcggccaccacgtgccatgccgtgaacactgcagaagaggaattcttcatttaggatctgatatttcgtgtctgaaatttctgagtaggatttggttgacctcaactccaccctctaaggcagatagagaagtcaatccttcacttattcattcacccatccatgcgcttagtaagtgtatataaggcaacattatactgggaattccacgtccaccggttccctgcccacgttccccagctctagtttccgcgcccagcccccttttggccatagccacccataactgtcaagttgaatcacaaacagctgtctcccaaaaatatcctgagaaatctcccccaactctatatattccctgaaggtcgcacgaagcaggactataggcaggaggggcggggcccaggcagaggatgtgagtcactaggcaagtgctgcctcgtatttttggcctgcgggtggggtggctgggtgggttgagcagcacttgtgctcatggtcgggtgaatttatgggatttatccaagttaatggtagtgctggaggcagctccagggagcgaggcaatcggaatgtgcctcttaccactccactaagccgctctctggacacggagccatcctacccggcctgtgcttttaatgccaagatccgcattgcccagccctggcctgtgggtctcctccccctgtgccctggccccacatgtggtctttgcaaacagtgcccctggacaaggagggcacatgggcctgatccgcttccccaaagcctatggagcacttatcagtcctatttaaagctccagttaaggattcggattcaagactatgccattaaatgaccacattaacgagctctccgagaaaagctctcacaaagcttttgagctcatagcctcttggctgccttaggag

SEQ ID NO: 37394 - DNA, 2300 bp, Homo sapien
agcaggccattaagaaggggattgcatcttttacactagcagcatcaaaaccttgattttgatttttctaggtactgaaacagccttcattacttagagaccatagcttttttgcaagttactattccctgcatttagaaagttcatctttaaacaggcaattcagtaagtaaatattctatggctctaaaacagatacggctgttggagactttaaaacatctgacagttacatttttaatgttgtctaccaaggctattacatttcctctgtcaaagtaacttaattttaaaaacgaactctgtgcttgttaaacgaaaaggccagaaggctactggctactcagcgttcatttgaaattcttatagtgccttcagtacaattcaaacttagaggtgattctcacaattcatgtgaagcaacattttacaaaaaaaatcacctacgttcactgttaagtcagaagacagaatgattaacaaaatctcagccgcgaattactctcacgatggccaactggatattaaataactctgcattattttaatggaatgttataaaggatttgcaacaaaatgcagacgtagatttagggactgccgacttctatagatcaaggacttcattggtgcagctgaggaaattcttccaaacaagtctaaatgttggaaatccaccaaactgcagagaaagacctcttgcctccgtattctttcttcatctgtaaaaatgttgacttctgcttttcagactacgcgcacagcctctttatttcctactgcggcttcattccctcacggaacactgacgccatcgcgaaggaagcatttcgagcacgactgacgctccccttattatttgctaagccgctgcgctcgggtctggctacgatttgctttcagaataacgggaaggtgcaacaagatcgcttccctagaggcgcgtcgcccgcgtggcccggaccccccacgcccgcccgccgccccgtgggtgcgcacgcgtgtccgcgcaggcttcccgcctggcgagtgcaaggctcctctccgccgtgctgctttccagcctctcagcaaatcacgaacaccgaaagaagccacggcggcgacgggaggggcgtcgcgcgtgcttccctcggcgacaaagcgggagccgggcgcgccggccgagggcgcccggcgcagagtcccgcagaggcggacgccgcggcacgcgcctcgaaaagcctcaaactcttatcctcggctctcccgccccacctccgccccgcagccaagacccgcgccgtggcgggcccgacggccaaggaaagcccaccagccctccgcaccgtgggcgacgggccaagacccggccctaaacggccagacccagcccctagtcggctgccgcccccgccccacgcaggcgcgctccggggccctcccctcccccaccgcgcgctcgcggggcccgacgggggcggagcgaccctcggaaggggcgtggcgaccgggctcgacgcgcgcacgcgctctggagccccacggctacgtgtcgggccacgtgatgcccaccccgaaagtcccccgtgaagcaacaggacgttaaaaaaaaatttctcttctgcggggtggataagaggttctgaaaaaactatagtaacgggaggcgaggcggaggcagcgctggcgcgtcccgctggaattcctctcgcctgccgcgccagccccgaccgcgcccgcagccccacccgccccgtgccgtggaaagccccgcgccccccccgcggccgtcggccccgcagcccacacccacccgccccgggcgccccgcacggcggcgacccagtccttgcgcccaggcccgccgagcgccgcagtccgtcacactcccgttgcccccgtcgcccgccccgccggggaggcagggaggagggggcgcggcgccggcggctgccccggtcgcggggcggcgggcagcaggcagcgggagcgcgccggccgggacccgctaacggccgccctgcgcggccccgcccgccgcccgcccccggccctccccgcgccgctgcccctccccccgccgccgccgctgctgccgccgccgctggcagcgccgcctgaactgaggcgaactccgccgccaagtgagtgaggaggaggaggaggagaaggaggaggaggaagaggaggagcgcagtcggagcgcggcggcagcggcagaggcgccgcggcggggaccagcccagagagaccccccgagcccgcggcacaggcggcggcggcgctgagcgggctcgaccagccgagcgagcggcggc

SEQ ID NO: 37395 - DNA, 2300 bp, Homo sapien
attaaataactctgcattattttaatggaatgttataaaggatttgcaacaaaatgcagacgtagatttagggactgccgacttctatagatcaaggacttcattggtgcagctgaggaaattcttccaaacaagtctaaatgttggaaatccaccaaactgcagagaaagacctcttgcctccgtattctttcttcatctgtaaaaatgttgacttctgcttttcagactacgcgcacagcctctttatttcctactgcggcttcattccctcacggaacactgacgccatcgcgaaggaagcatttcgagcacgactgacgctccccttattatttgctaagccgctgcgctcgggtctggctacgatttgctttcagaataacgggaaggtgcaacaagatcgcttccctagaggcgcgtcgcccgcgtggcccggaccccccacgcccgcccgccgccccgtgggtgcgcacgcgtgtccgcgcaggcttcccgcctggcgagtgcaaggctcctctccgccgtgctgctttccagcctctcagcaaatcacgaacaccgaaagaagccacggcggcgacgggaggggcgtcgcgcgtgcttccctcggcgacaaagcgggagccgggcgcgccggccgagggcgcccggcgcagagtcccgcagaggcggacgccgcggcacgcgcctcgaaaagcctcaaactcttatcctcggctctcccgccccacctccgccccgcagccaagacccgcgccgtggcgggcccgacggccaaggaaagcccaccagccctccgcaccgtgggcgacgggccaagacccggccctaaacggccagacccagcccctagtcggctgccgcccccgccccacgcaggcgcgctccggggccctcccctcccccaccgcgcgctcgcggggcccgacgggggcggagcgaccctcggaaggggcgtggcgaccgggctcgacgcgcgcacgcgctctggagccccacggctacgtgtcgggccacgtgatgcccaccccgaaagtcccccgtgaagcaacaggacgttaaaaaaaaatttctcttctgcggggtggataagaggttctgaaaaaactatagtaacgggaggcgaggcggaggcagcgctggcgcgtcccgctggaattcctctcgcctgccgcgccagccccgaccgcgcccgcagccccacccgccccgtgccgtggaaagccccgcgccccccccgcggccgtcggccccgcagcccacacccacccgccccgggcgccccgcacggcggcgacccagtccttgcgcccaggcccgccgagcgccgcagtccgtcacactcccgttgcccccgtcgcccgccccgccggggaggcagggaggagggggcgcggcgccggcggctgccccggtcgcggggcggcgggcagcaggcagcgggagcgcgccggccgggacccgctaacggccgccctgcgcggccccgcccgccgcccgcccccggccctccccgcgccgctgcccctccccccgccgccgccgctgctgccgccgccgctggcagcgccgcctgaactgaggcgaactccgccgccaagtgagtgaggaggaggaggaggagaaggaggaggaggaagaggaggagcgcagtcggagcgcggcggcagcggcagaggcgccgcggcggggaccagcccagagagaccccccgagcccgcggcacaggcggcggcggcgctgagcgggctcgaccagccgagcgagcggcggccccggctcctcctcgtccggcgccagcagcccgcgccccgcgcccgcactcggccagccgagacccgcctcccgcccgcccgccggcctcgtgagggacgcgccgagccgggcggccgagagcggcggcggctgggagcgcgtcgggcccgggcggaaagtgcctgcggggggcgggcgagcgcgcggtgccggccgccccggggctcggcgcgggagccagagcgggagccggcgcggagcgggacgccgggtcccgagcggcccgcggccggggctcgcccccgcccctccctcctctccggcggcggcggcggcggcggcgggcggagtgagctgcggagcctggaatatggtcggggaaatggaaacgaaggagaagccgaagcccaccccagattacctgatgcagctgatgaacgacaagaagctcatgagcagcctgcccaacttctgcgggatcttcaaccacctcgagcggctgctggacgaaggtgagcgtctccagggccccggccccggcc

SEQ ID NO: 37396 - DNA, 2300 bp, Homo sapien
ttacttataatagtagatttttcaatattgaactattcttgcactcagggtataaattctactatatcttagtgcatttttctttttctatttatttcagatgtttgcatctatatttttaagcaaattttatctatagttttctttcatgctgctattctcaggctttgatattagtgtggtgctaactgcagtaagaataggtagtttccgaagaagatatttaaataataattatatggaaagtgcttttttagtccagagacctggctaaaggatgtatgtgtgattttaattagattaaatttttctaatgtcccttggttaattacttgctgtaattatgtaaatgatgtaaaggagtttaaattgttgcttggttgttgaaaacttgatttgagaattgctgtcatatgctaatttaagataaacaccaagttgatactggacattattaggaaagatttaattatgaagctagaagtataaaaagaaccttaggaaataataaaattctgcccttatcatgtagtcaaatccaaggtaatctctagatttttgttgattttatttgctattcagagaaaagcatttcgtaagctttgacaaacaaattgttatttaagagataaaatttgtaatatgaatattggtatcactgaagcagaaaatgtattacagtgccttttttaattgattaagattttataactgagtaagagtacctttgatcctgcctttttgctgtgttggattttatttaaccgaaactgatttaaataactagttagaaaaattaaagagtgccttcatatttgatagttcctaaggaactatcaataaattgaacttccccatgtttggaaagcatacaaaatacatttaaaaaatacattttatttttaaatactaatggatgcaagcctttctcccaaggaggacacagtctgtaggatagagagacattacatctgcatctggctaaccttaataatgacaacccttattgggcagtatgttccaaaggacaggagcctgtcttctggtgcatactagaagcttaataatttttgaaaagatccattttctttatgggactcggctcattaaaatagaattctcctacttttaaaaaaaatgtctatgtatatccaagaacagtaatacaggtctttaaaaacaggtcattgattttaggtattgctacttccttttttatatttaatatttcaatcattaacccagtgtagcttgatctgttaccctctttcccttgaaacttctctgatcaccagtggcttagtggtcaaatccaaggtaccatcttttgctgtttatcttacattcttttgtagtattcgatactgttggtcaccctgtccttgaatctgtcatttcttagcttctataacacctctcttctctagttctcctgcctacctccatttcttcttggtttggatcttcttttccttaccccttcctttttctcaagtggattccgtccttctttctcccattacttgctctaagacatctcttctgatagctttaaccattaaatttgtatatgaaactcagacttctgctgaacttgcagtctgttgtcttttgaacatctctgtttggatattccaaagatatctaaaaataatggaagtggtcccgtttaaatatccttcggacaaattagttctgaagtacaaaagaggctttggtattagttttgtctgacaggcattcttatagttgtttactgaagctatgatttggaatgactggcctcgtttagacttggaaaaattagatgaactaacaagtccatattataccggttaggaaggagctcgggctttgaagttaatttaataagatatgttatttgattcgtataaaaattggtttgtagtagaaattaattaaggctatagtcttgtttaaacatgggcttaatccagagaatgatagaataggccaggagctccttatttgagttttaatgctttatcaatgaaaccctcccctgccctctcttttttcctctggactagcaagaatattttttttgtctaacacatttaaaatttttacttttaacagaaattagcagagtacggaaagacatgtacaatgacacattaaatggcagtacagagaaaaggagtgcagaattgcctgatgctgtgggacctattgttcagttacaagagaaactttatgtgcctgtaaaagaatacccagatgtaagtatattttgttgttttattcaattttgttctgcttcacatatgttgggaaga

SEQ ID NO: 37397 - DNA, 2300 bp, Homo sapien
agaacacaagagttgagctttgagaatctttgcctagatttcagagaaagtatggaaacgcctggatgtccaggcagaagtctgctgcaggggcggacccctcatggagaacctctgctacggcagtgcagaagggaaatgtgaggttggaacccccacacagagtccccactgggtcatggcctaatggagctatgagaagagggccaccatcctccagaccccagaaaagtagatccactgacagcttgcactatgtgcctagaaaagctgcaggcactcattgtcagcccatgaaagcagccgaggggactgaaccttgcagagccacggggacagtgctgcccagtgctgtgggagcccatcccttgcaacaacgtgtcctggatgtgaaacatggagtcaaaggagattttggagctttaagatctaatgactgcctacccgggttttggacttgcatagggcttgtggcccctttgttttggccaatttctcccatttggaatgggaacatttacccaatgcctgtacacccattctatcttggaaataactaacttgtttttgattctacaggctcatgggagaagggattttccttttttcagatgagactcagactttgacttttgggttaatgctggaatgagttaagactttggggaagtaactagtgggatcttatggatggttatgaaatgtgaaaaggacatgaaattttggaggggtcaggggcggaattacatggattggctctgtgtctccacccaaatctcttcttgaattgtaattcccatgtgttgagggagggacctggtgggaggtgattggatcataggggtggttttccccatgctgttctcgtgatagtgagtgagttctcatgagatctggtggtttaaaaagtgtttggcagatgtgttcccaccccgcccgcctccatcaccttgtgaagaaggtgctcttttccccttccaccatgattttaaggtttctgaggcctctccagccatgcagaactgtgagtcaattaaactacttttgtttataaattacccagtctcaggtggtacctttgtagcagtgtgagagctaatagaggtatcagagagattttcattattcttgtgagattttcccaattgaattgacatttcagttgttggtctgttgaataatgaatgcactataaaagtggttgttaaaattatgataagggaacaagatcagtcagtaaaatccatgtatgggagttttatgattaagaatatttctgtattttgtacaggacatctgtaaccacagaaaattgcattgtacaaatgaagaagaatacccttttacatcacatgatttgtgatatctggaaaatctcccaagcacctggtttctggattttatttagatttttcaatgtattttctaagtcttaggcaatattttcagaaaagttagttctttcctactcctttgatcctataacttagccacatcattacttaagcacttagtctgctatagtggattacagagttctttaagagttgtaactcttatcttaaccactataatgtgcatagtgcctggcacattgtagacacttaggaatgcttaccatgacccttagtattgtatatttgagttaattgctagaatttttaatatctcctattgaatttattaatactattttcatacataagtacacccctttcagtgttgtgttttaagattatattacccacttcattcctcccatccctcactctcacccaccaatggcaactttgattaacatgtttgtgtatagtaatcctgtggccacaagcacatagctgtaagcaaggactgaactagaagaccaacttgattctgcgatgattaaaggaaaaatggctaggaaattgactttgaacatgagtaatgggcattgaagccagtctcacaagagtaaacgatgctttgggtgtgctgtatcacctgtgaatacagcctaaaagttatgcctgtcaccaaggaaatgtttctggttgcaggaggactggagataatactgtaactagaactagggccaagctgccaaatggcctgaatactggattattgatatttctatggaagaatgggctttgaactgccaaaataagaacttgagggtttctgtttccggtaatgaatgagtaaatttctgtcatacttaatcccctgcaataagcaactctaaaatatgcacgataaaaaccagctactccaaggaactctgtaggatgagtgtaagcagagtctgaaatagagtt

SEQ ID NO: 37398 - DNA, 2300 bp, Homo sapien
tttcttggacacttttgtgaccattttcttagttttgattacttcagcagttaggatttttttaaacaaacaaacaaatcaaaacaataaatcctactggtagatctgacatagctagtgatttttgcacaagggcaaaggaaatcaaagagcatagagcctctgtatggttttgggagaaggtaatctttcctcttggacttgcaccctccatcttattggccagggttatgggccatggccacctgggttgcaaagaagcctcccttgcagaggaagggaaggagaagggagaaatgtaaatggctttggtggaaccaatgcacagtgtgaaccctcaggagtaggcaaaacatgtgctgtaaactccaagtctaggctttgggctattgtccctgatagttcaataaaactctctagttaatccctaataaatttgtgactggaatggcctgcaggttttaagccatgaaaacagttaaatgacctcacattgcagtgtgagcatccattcggtaacctgggtcactccttaccgtttacccacacctagattttgggtcatggtgagctaagcagagttggatagaaattgaatatcaaaatggaaaatgtctataccaaagtgatccatctgatgaaattacagttcagagacattttataatagagctacagaatattgaggctggatggaaaatgtgcaatggagcagttacagttcggcatcctctgctgaagtgaagcagagaattaagacaattacctagtacttcaggcaagaagaggtagtgcttgtctttctgaaaataaccttcctgagtcctatagctttccccaggccaccaaagataacatgaggctatccccatatttcccctggactattgagttcattctggaggaaaatggctctcaggagttaatggcattaagatgtggtctgggcttttggctggtagatcttcagtgaaagcagatggccacaatggtattaaaactaaagactgcagtaaagcttttaattgaaaacaattggaccctgctggatggtaattaccttggctgcttgcaaataatatcctgcccctgatgccatgaaagaaaagctgagacggagtaaacaggatctgcttgatgtgcatctaataagcatggaagtccccaaactactttctctaggggtcctccagtaaaaagagttagaaatgaagaggagagcttgctgtagcacaaattgtaaagacaaagcgttcatttaaaaaacaaccgaatgggtccatatttacttggagaaaattggagttccataccttcaggaaaaaaaaaaaagatactttaaatgcttctttcttttctcagttaatgataaacgctaatgaggaagatgtctcatttggatgagttccttgtagatctttgtgctgcgatgcctgagaagtcacaggcattgggcagtcgaggctgaactgtaaggttcattttcctcttcacttaaagttttaacctctcgaagctacgatggttcaaataatatttaaacgtggacagtagctatgcaggaggcagtgacgtaataaagttcccagggactcaggctggaggttagatgcgtgggcaaagtttgaccacaggctcctttctaaagagtcttagaagggaagactaggggcggggtggggtgggaaaggtcttaggaagccaggggctgagtggctcccagaaaccacgcctgagatctgagtgggttcactgcacggggctgtagcaccgctgctcctgcgtggcctccaggtggtccaggggaccccactcacctgccaggtgggaaagcctggccttttcctggatcctggctagcactgggatttacacgcctgctcatcacgcactgtcaggaggctgcttccctgaacagccttatctcagcagtaaggggcacccacctgcccacccacccaggcttgccacggtaagtcgcctccacctcccagcggctccgctgaggcttagggcgggcacccgggaggatgctggccctgcccccattgacgtcatgccaccatgtgactcactctgaccaatgagaggcaagcggaagtgacggttattcctcctgcgcgggagctttggggacgcacttctggatgcctaggcctcttccgtttgcctctgggactggcgatactcgaggtaatggctactggggccaagtcgtgggcgacctgcagtgcatgggtagagtaaggtgcctccgcccagtctaagcagccctccccagagctggtgggttcccagga

SEQ ID NO: 37399 - DNA, 2300 bp, Homo sapien
tgaaaatcttcatgaaatcagtgagcaaaagacaatgactgcattaaaactgaacaaatatataaagagcaattcataaattaccacgataaagtccaaaattgttaataacctaagcaatgcaaatataaaaaattagaagccatttttcatctttcaaactggcattggtaaacagtaatacacagtgttggcaaagattcaagatagtcctcatgcaaagctgatagaagagaaaaaagggttgtagatctcaatatggaaaagtaaataaaaatacttaaaatatgcataccctttgacccattaatctcatatctagaaatttaaatcaagggcatattaagggataggtaccaagattagctacaagaatgtagagcattgtgtcagtagtgaaaactttggaaacaaaatcaaacataaaacactggatcagtggttgaataaatttgtatttcttcatagtgatataccttctaaccactaagttacatagagcaaattaaatgaaaaataactgttctttcagaatttatatttactcaacctctgctttgtgtgtggaactcttctagctactgaggataaagtagtgagcaagacagttaaaattctctattctcacagagcttacctactagtgagtgcaagataatttcctataagtgctttaataaaaataacacagatgaatgcaatagaataaaccagattatgaaacagtatatatagcatgaacccatttttattttttaatttttgtgggtacatagtaggtatatgtatgtatggggtacaggagaagttttgatagaggcatgcaatgtgtaaccatcacatcatggaaggtggagtatccatcccttccagcatttatcatttgtgttacaaacaatccaattacactcttttagttattttaaaaatgtgcaattaaattattattaactctagtcaccctttgtgctgtcaaatactaagcattattcattcattcattcttttttttttttttttttttttgagatggagtctcgctctgtcattcaggctggagagcggtggcgcaatttcggctcactgaaacctctacctccccggttcaagcaattctctcgcctcagcttccctagtagctgggattgcaggagtgcgccactatgcccagataatttttgtatttttagtagagacagggtttcactatgttggccaggctggtctcgaactcctgacctcaggtgatccacctgccttggcctcccaaagtgctgggattacaggcgtgagccaccgcgcccagctcattctattttttcgtacactttacatagcctcaactccctctcaccccccactactactcttcccagcctctcgtaaccatccttctactctccatctctgtgggtttaattgttttaatggttaaatcccacaaataaatgtgaacaatcaatgtttgtttttctgtgcctggcttatttcacttaacataaagaccaccagtcctccagttccatcaatgttgttgcaaatgactgaatctttttttttcatggctgaatagtacttcattgtgtatacagaccaccttttctttatccattcatctgttgatggacacttaggttggtttcaaatcttggctattgtgaacagagctgtaacaaacatagtagtggcagttatctcttcaatatattgaattcctttcttttgggtatatacccagcagtgggattgttagatcatacggtagatctctttttagatttttggggaacctccaaactgttatccatagttgttttactaatttacattccaccaacagtgtatgagggttcccttttcttcacagcctcatcagcatttgttattgcctgtcttttggatacaagccattttaactgcggtgagatgatatttcactgtagttttgatttgcatttgtgtgatgatcaatgatattgtgcatgttttcatatgcctactagcctcatagaatgagtttggaagtattctttccccctccattttttgaaacagtttgagtagtattgctattatttctttaactgtttagtagaattcagcagtcaagccattgggtcccaggcttttctttactgggaacatttttatttcagcttcaatttcttcacttgttagtctgttcaggctttggatttcttcctggttcaatctcggtaagtcgtatgtgtctaggaatttatccatttgttctagattttccaatatactagcatatagttgctcacagtagccactat

SEQ ID NO: 37400 - DNA, 2300 bp, Homo sapien
tttactaaggatttctgagcatagaggttcatttcctcatctctaattgttggttatctaaaaacctggcctgctgcccatgtgagcctacttcataatgagctgcaggtgaggggcacacagtgtttcctctccgctgcccatgtgagcctactttataacgaactgcaggcgaggggcacacagcatttcctctctggtgcccatacctagacatccttacgcagcttgggcatcttcatgtcgacctttctgtcatagttaagatgcctaactaccatgcacgttccagagagacaagcagtaaacactccggtaaccttttcacaggtggaattccaatgcacctggtgatgaagccacctgagcaggtgaaggtcctggcagcttcttggtttccagaatgttcacgtttcaagtatctgtccagtgttatgtttggaagggaaggcaagggttaaagagagataactggcagctctccagcgattcgggttctatgtccagcctaagacctgcagagatgggggaccaggttaatgccagtgctgaccgccgcttataggctggggcaattataggcctgggcgggaggggactagggggtatagcctgcttcccagaagatgttgataagatgttccatgacaaggtggtttggccctgtttttggggggatgtgatagaatgttcctgttttggggggcatgtgatagaatgttccttggatctttgcccagcagaggatatgatgaggatgttccttcagctggggctttgccgggcaggggataacaagaaagtcaggtggttgggcaggacatttctcgtggtccgacccccgtggaatatttcactttgaccagggtctgcgaaatggggctgggattacaaaatggtgcagtttgaactaacaggcagcatcaacagaaacaaagaaacaaaaaacactgtgtgcccccctcattcacagtaccgtgtaattccatcctcacaaccagtaacgcctacatcaccgtctttctcatttcagagctgtaagtagtaagggttggcgtcaaagttacttctaagaaccagcagaatcgcccttccagtactctctttctggctgcaagacatataaacagaattacagttttcaaagatagaggttttagcttttccctcccttggcacatgggatcgcctgaggagagaggatggactttgcagtcatacaggtgcgcacttacacatctgtaaattccactgtctgctaactgaccttgggcaaattaccccacaggatctcagttccccattagaaaatacatagataataataaaaagtgactaaatgatcacttcgtgactggcacctactctgtgctggacctccaggtgcagttgggtgggttacgcactgtccaacctgcacatttctatagcagatgcctgaagaccagttatcttttgccccctgggctttggaaaggattagggaatgcgaggatactttgatatttttcagatcacggaaagtgtttcacttatttcataaagctgatgtacctttaaaaacaaatgttttatttacagtattgtatgggggatgggactggttccaggaccaccacggatgctcagacccaaagatactgtagtcccttatataaaatgatgcagtatttccatataacctatacgcatccttccatatgccttacatcatctctagattacttgtaatacttaagacaacgtaaacgctatctaagtaattgttatactatagttttatttgtatttttattgctgtattgttatttttaatttaaaacttttttccaaatattttaaatctgtgcttcgttgaatctgtggatgtggaacccagacaaagagcaccggctgtattaaaattaaaaaaattattaaccaaaaaaaaaaaaagtaaaacaagcaagcaatcaccaatactctctgttccagaaggcacagaagaggggaggagttggggggaggttccgcagcaggggctgtgcctggttgctcagcagtgaaggaagccaaggagggcttagaatgtttgtggtttccacggcgacagcccagcccaggcagctggagggaaggaagcgatggcggaggagcgggagcctgaatgtaagtggcctggagcggctcttgctggcttgtgagatttgcttgatgttcaattgtggagggatgggcttctgaagactgatttgaaatgtgaaaatctttttctggtggctgcacgccggctccagggtcactagggctgaggactggat

SEQ ID NO: 37401 - DNA, 2300 bp, Homo sapien
catctgcatgtacgcatgcagttttttacttccatcttagaatatgctccgatctgccgctcttctcagctccctccctgttactttgctcttctttgcagtaaaccccatgtaagcattaccctattgactctttcaaaatcctctcctcgcattctttctgaaaacaactctgatcaagcttctgaccttaacaccccagaaaatgccctgctccaggtcaccagtgacccacaccttgcgagatccaagggttagtgctcagtgtcttcaatcgaatcccgggacattcggcactcttggttttcctgcgaatgcaccagctgttcctcccttggggttttttgtttgtttgtttttgttttgttgtttttttcttaatccttctctttcctcagacttagaccatgcagtctgttcccccttttcaggtataatttgtctttcaaaataaaaattgtgattgtgattgttactaacacattgagtcaatattctttaaacacttcagtcttttcaagcaatgtttggcataacctgaattccactcaaaatcccttcatgaaagaatagaaactgtcatatgaaatgtgttgtaataggatttaacctatagagttctttcttcccttcaatttttatcaagtatttaatttatcaagtatttaattgctggatgatttattttagaattgggagtacttgagagcttagaccttgaccctcctccaacctcaaactacaaccttggtgagctcagccagtcatgtggccttaaacgccacatgggcactgacagtttcatttctctagcaaaggcctatctccaggccgtgaggcttcagtagctgctacctgtcaaaacaaaatctccacttgtcaaatctccacttgactatcaagtagactccttcgcctcagtctaaatgtgagctcctgacctccctcctcaaacccattccacctgcagtccttccatatcagttgatggtaatcattatagcttctaaggccaaaacatttgaggtcatacttgacccctcctcatgtcctttcttttcacactctgacagtcaaaaaatcctgttggttctgcctgcaaaatgcatccagactttaatcaccccatagaagctttcactgttattatcctggtctaaagctctattacattttgcctcaattactttagaaacctcctcactgatctctcatcctcctggagtctgttttccacacagttgccagaataatcttgtaaatatataagcaagatggtaacactgctctgctaaaaaccgtgtaataatagttccccagatcactgagaatataagccttttatgatgactgcttcccctgccctcgaccccactggccaccgtcctgatcctccgagtctcagggcacactcgccttcaagtttatgttgttactgctcccctgcccggcgtgctcttctcccacactgcgcttgccgctctccttaccctgtttcgggtctttgctcacacctggccttttcatgaggtgtgcctgcctagtttatttcatactcagcctgactttctctaatttcctttagcctgctctgcctttttttctatatatttgccatttttacatgcgatatgatttacctgttatatttattgtttataatagcaatagcattgttagaatttaacattgaatagattttgctgaaactgacctttctttccttgtgcagatttgctttatctgtacttttttggaacatttgctttatacctttaagttgatacctcctgcaccttttcctagagttgagagagaaactcaaaaataatttgactatcagattcctaagcagagaaacaaagaaagggcctacaaatgagttagattatctggaatttccaagattcctaagggtttgctctatttgtataggattctttatgccagaatgctgtatttgtgctatattaatgccagaaagtaatgtgacatgaatgtaagcggtaagtctgctcatgtgtgtttctgtgttttgagcatctctgcatcatattattttttaaagcgcaaaggactgctgattgcgtgtctgtgtcatgacctggaccacaggggcttcagtaacagctacctgcagaagttcgaccaccctctggccgctctctactccacttccaccatggagcagcaccacttctcccagactgtgtccatcctccaggtgagtcactgcacgccgtctctcgcttagtctgaagggctgtctgggagatagggatacttcataggtggaaaag

SEQ ID NO: 37402 - DNA, 2300 bp, Homo sapien
aggctgccggcagcctggctcaaccattgcagtttttttctttgccgaaaaaattcagaaacaagggcagcgcccctaaggtaagagtcacaggaatcattttcttcttccacaaatgtagggattctgacctagtgagtgccaagtctgatgcccgttacacgcgacactcagaatctgcccggcaatcgcggagacgtctgtggactttactgggggaggggagccccagcatgtcctttgcatcccaactgctcagcttggtgcaaatacaaaagtgttattttccattggggggagtttggatgggagtcggggaaagcatcgactagtgaggaatctggagcacgcttcaaaataaacatgtgaaactggatagaaagaagaaaacgtggagggcgagaaatggccccgggacccggggcacaccgggagcccagggccctgggtcaacccagttgctgcactgtagcgcacgcctggcgcttgggtgaccgttttgcccttcgtgaaagctgagctttggcgcgtgtgctccactccggggaaggtgacctcgtccaggcagtccggacagcccgtgccaccgtggaacagcacagccaccgcccctcctcggacccagcgcgccatggtggccccgccgcgcgtgcctgcccgaacgcggacacctgtgcatctgtgtgcgctcttgcgctccaacttccccaaacttctggcggctcctagttctgagcgcccattgggcggctcatttcccttcagtggcaactgcctggattcatggctacggaagggggtgggggtgtccaagagagccgcatatggcaaggcggtctcagggtttggggcaatgatcgcacagtcttgctcatttttggccacagtttgccctttccgttctctaaccccaaccaaggcaaactgggcttgtgcacacgaagttcgttttaaagtgagtatgcgaaagggagtcctggggaggaaccgtatttcaaaccctagtttatgggaaacactgcgagttgatttaaactccaaccaaaggtccgagttggaactctctcccgggaactctgactgagcacagctgggtcggagctgctggcccgctaccaggaggattccctggctcgggcaacgggcaggccgacgtggctcgcccagcagcgcacagctggagcagctgcaggactcaggatttagaatccgaaacaccggacccagatgtgacaaggcagggcagagacgcagcggttgctctgtccgcccgccccggccccgggtgcaggcggcgcacagaggatcactcgggtgcgggagcctggcgcaggggccgagtcccgcggggcgcgctacgtgggcgcggaaggcggcggcggcggcggcggcgtggggagcgcctgctccgccagtgggcgtcttctgccgccgccgccaccaccgcctccacgggcagcggcactgcggcgcttttctccgctgctttcgagaagccgccgaggctcagccgccggagcgcgcacacaccacgccacgcctgcagggagggtctccgccgtccctagccccggcccgggaggacgccgattgtgcgcgcctgagggtagccaggcgccgtcgccggggcctggcccccaggcccgggtcctcccgcaacccaagccgagcacaatgtgaagactagactgggagggaagccgaagaccggagaggaggaccaggcagcggttcgggcggccggcaggggtgggcaggtcctgcgggggcggagcccaccgagccccggcccgccgcgcccctcccgcccgcggcctgcccctccgcggcccggggaggaaccatggccagcctcgaggagcctcttgctccccgcccccagggtcccctgccagcggccggggacgagccgggctgcggccccggcaaactccgcccggaaccccggctcagcgcggccggcggggggagcgcggcgggcccgggcccggcccccgagtggcctggccgtggccgggcggagcgcgccgcgcccccgcgcccgcccctctcctccgcaggccgccccagccccgctgggggccccggcgccctctctgcgcgcggcggcggctgcggctgggtcgcggcccgcgctcccttggcgctcgccttctcgtcccgggtcccctcctcctctccatctttcttttacttctggccgccgccccccccgccccctccctcttttctcccctcctcatctgcctttcacctccccgtgcgtctcccaggaagggagggcgcagcggcggcggcgg

SEQ ID NO: 37403 - DNA, 2300 bp, Homo sapien
agactaatacagaagggaaggcacagagctgtgcagccggttggtggcaggaagggctgtagctcatgttgttttgaactgctggtaggagtatgtgatggataattttaggtgccatcttgactgggttaggtggtgcccagattgctggaaaatcactatttctgggtaggtctgtgaggacgtttccagaagatattagcatttgaatttaaacactgaataaagaagatccttcttcaccaacatggcaggcatcacctgactcactgaagtctccaatagaatgaaaaggtggaggaagggtgaatttgagtgaattatctttgtatgatctgagacattcatcttctccggccctggaacaccaggttctccaggttctcagacctttggactctgtacttacgccagtggcttcccaggttctcaggcctttgacctcagactgagttacagcatcagttctccagtgtgtaggcaacagatcatgggacttgctagcctccgtaattgcatgagccattcccatcataaatattgtgctcaatagatctgtatactcagttcgttcgttttctttctttctctttctttctttctcttttctttctttctttttctttctttccttccttccttctttctttctttccttctttctttctttctttccttccttccttccttccttccttccttccttccttccttctttctttctttctttctttctttctttctttctttctttctttctttctttctttcttttttctttctttcttctctctctctctctctctcctctcttgcctcccctgccccaccgcacgatttcccttcctctctctgggttctgtttctccccagggttctggagcaccctgactaatacaagggctatctaaaatcctatgggtgggtgtggctccttgtcttgatgaaatgcatgtgtgtgagatccatccttcctattacattcacctggcttctgagcaacaaaatggtgcctgagcaaaccgacattgacatgacactcaaattgttccctaatttaccaatcacagtggaacaaatcctcattttcagaagaaatgttctagcagaatgggctgtagttacaccctggaattggcaaacaccataaaccagggctttcctcctggagggccttgtcgtaaatacctaccagcacactgtcgaggttaaagcactttatgtaggttggtatataatagtgcctaataaatgatcagaattagcagtacttttcccaagaagaggtccagtgggatttgaatggaacaagctgaaactgggagcagacaaggcaagggcaggtgagcagaggcccgagagcggggcagagcgggggcagagcggcgagccctggcaagcacacatggcagggcccactgtccacagtgggtggcagcgagcacaggtgagcacacaccgaacacatctccctcgacagcctccttctctgggtgcaaaggggcactaaagatgatgcctcacaaattattaacatccttagtaactatcttcaaggcagaaacaaaacagggaacaataacaagcttcagggagtctttattttgtgaaggggtgtgtgtgtgtgtgcgcatatatgtgtgtgtatatatatatatacacacacatacatacatatataaaatcataaactggcatttttaattcccctgctaccccagcacacatatgatatactacagcgtggctgctcagcgtggctgttggcagccctaactggaatatttaataaatgaggcagtaacggacatttattgaaaaaagtttttatgagaaaaccccaaatgtgcacgttttgaagttgcttgccaatcatgcctgaggggcagagtcacatccaggaatcactgtccggatggcatcatgagaggatggctatgtggataggaacgatgactgaagccaggtgcatccctagtggcttctgcccctgaagtgcccagggaagatcttggtgatgggggatctttgggactgctcttaaagaaaggtgaaatggcaggagatgggggatggctctgcaggtgaaaggtggtgcattaggccactcttccattgttataaagaaacacttgagactgggaaatttataaagaaaagaggtttaattgacccacagctctgcatgctgtacaagaagcatggtgctggcatctgttcagtttttagggaggcctcaggaagcttacaatcatggcagaaggcaaagggagagcaggcacatcacatggcaaaagcag

SEQ ID NO: 37404 - DNA, 2300 bp, Homo sapien
tgctttcaccaccacgtctctccttgaaatcacagcacatcaccccatttgcttcaaaaacctcacctccaacttcaggaggaggcacagggccctgcctgtgcagaggatgaagatttcacatgacgcagccctaagcatccctggactggagaagcatggaagaagtaaacgtccctccctgctgtccctcatcagcaaggagcccgagggggatctcaccggcacccctgccctctggacacaggtgtcctgcacacaggcattcatgtaggctctccatccccagtacggtgtgtccacaccaatgcacatgacagccaggcaggcatgagggaaaacagtcagctgtccccagtcaatacctcttggcctcttcccttcccaccccaccctcccttcttccccacacagcttcaagtccacgcagatctgggtctccagcattatctaatcagctcactcccaccccactccccgtatcctgaagaaacacgtaaaatcccatctgtgggggaaaagtctactcaagttgtcttgctatagggagctctgatgaagcgtggcgagggcattcctgcggagggatctcaactcccaaacgtcttcctgcatgtgctcctgttcctttttctcctccccctccccgccccctaccttgctcctcgctgctgtccccaaaccaggcagtgggttcctcctctgggagctggggttctccgccacctcctccaccctcgagggctttgcgtttcttcgacatctctgcccagggctggggatttgggggttttctttccccaccccctggccctcccccctcggagaggagagtgaaggtggggttggatggaggggagggggttaggtgcagaggaaaggggtggggagaagagaccagagagggagatggaagagattgctgcttcaggaggggaagggacttggggtggcaggaaaggcagaggggcagggactcagtgcagaaatcctacaatccggtccatcaatgtagccctacgtctaggagactgtttgctggtgttgcgcctctctctctctgtctctctctctctctctctctctctctctctgcctctccctctccctctctcagtctctctctccttcctccttcctccttttccttcaagtagaagggtgagccgagaggggaggagagatcaaaccagaaaggagaggctccttgggtgcctcagcggatttcttccccatttgggggggcgatggggtggggtgctatgaggactcctggccctgtctagctatgaaggagtggtgtcttatggttgggcttggcttggcttggggggaggggggacgggacagtgtttgcagtgtttggtgaggatgcgatttcaatgggttgcaaggaaaattgggtggcatgaagaaaataaaatgctgcagaatgcaatctagtgatgctttcaggtgctggggactccggaccccctcctcccctatgacatcacaggatcttttgcagaagagactggggaggtggggggagagaagagagtggcggcagaggcgaggatcaaaagagcagggggtcctgtccccactgagaactggagaagggcggctggctcgggaggaaggaagttgcggtgcacacaccatcccttctccaggccgcctcgggaggcacctgcgggtctggcgcggcagccgctgcggtttgcagctggcgcgcagccctcgctgggaacttggagctctcaaactcctcggatcaagcgttagccccgaggctgtcagttggcgctggggcgggctgcagtctctctcccctcctctgcaaacccttgagtcttcggctttatatactcccttttcttctttctcgagtccactcatcaccctttcccccaaacagtcacctccacaagcacaacacaccacacacgcgcacacgttttcttattgccaaaaagggtggagggaaaggacaggaagtttttttaagtacacgcacacacacacaaagattgggactaagtttttctggactctcaagggttaaataataggtaaaagaactgtcaacttacccgccaaagtatgctgacgcgcatatctgctttccgcttcatttcgagttcataaatttaaaaagagacagtgagagaaagaaaaagaaaaaaaaaggcaaggcgccgggagcacagtgggtccagggttccatggagaactgcgcaaagcaagttgccaagaaagcccgctggccaagttcgggacctgtccaccacgctcgcgcgctccgctcagcaggc

SEQ ID NO: 37405 - DNA, 2300 bp, Homo sapien
ggcggccctaggactccaacagaaatgtatgaatgggaagaggaaagagaaccaatgtctgtttgcactccctgcttccccgcaccccagcctccctccaggcagagcgagcccgacacgtagtgacaaggggcgggggtcgggttggggggactgcgggggcgtgcaagactgggagagagtctggctggagactgcactatttatatactccggtgctccaggacaaagagggcagatccgagtcatccccctcccccagccccagcacctccccgggcccctcctctggtggctttgatttcgtgaccaccccccgggggggcgggctggcaggtgcgggggtgggagccgtctccgcgggagcagccttgccaaaggtccggctgctgacgtccgagcgcccgctcctgtcaatgaacggcagcggtagcctggggactgttctggcaacgaggctacagacgtcatcgcctcctgttggacgcgggggggtgtccgagcagcatctccggcttaaagggaaactctctaagttccgggcagccgggagagtcgttcctgagagcacaagcacccccaaatgtgaagtgcactcggacacacacacacacacacacgcacgcacacacaagcactcatgttctaaagagagaggtctgagtccgaagttgctgctgctgggagcttgagctgagatggactggtcttcatgggcgcccaaggcgctgggtgcagctttccccgagacccccagatggaaaggagggaaggaggaaccccacacactcgccttttgcgagaagatcggcgcgcaccccagagtgccccaagcctttggaatctgcctgctgagcggagcgcgcgagcgtggtggacaggtcccgaacttggccagcgggctttcttggcaacttgctttgcgcagttctccatggaaccctggacccactgtgctcccggcgccttgcctttttttttctttttctttctctcactgtctctttttaaatttatgaactcgaaatgaagcggaaagcagatatgcgcgtcagcatactttggcgggtaagttgacagttcttttacctattatttaacccttgagagtccagaaaaacttagtcccaatctttgtgtgtgtgtgcgtgtacttaaaaaaacttcctgtcctttccctccaccctttttggcaataagaaaacgtgtgcgcgtgtgtggtgtgttgtgcttgtggaggtgactgtttgggggaaagggtgatgagtggactcgagaaagaagaaaagggagtatataaagccgaagactcaagggtttgcagaggaggggagagagactgcagcccgccccagcgccaactgacagcctcggggctaacgcttgatccgaggagtttgagagctccaagttcccagcgagggctgcgcgccagctgcaaaccgcagcggctgccgcgccagacccgcaggtgcctcccgaggcggcctggagaagggatggtgtgtgcaccgcaacttccttcctcccgagccagccgcccttctccagttctcagtggggacaggaccccctgctcttttgatcctcgcctctgccgccactctcttctctccccccacctccccagtctcttctgcaaaagatcctgtgatgtcataggggaggagggggtccggagtccccagcacctgaaagcatcactagattgcattctgcagcattttattttcttcatgccacccaattttccttgcaacccattgaaatcgcatcctcaccaaacactgcaaacactgtcccgtcccccctccccccaagccaagccaagcccaaccataagacaccactccttcatagctagacagggccaggagtcctcatagcaccccaccccatcgcccccccaaatggggaagaaatccgctgaggcacccaaggagcctctcctttctggtttgatctctcctcccctctcggctcacccttctacttgaaggaaaaggaggaaggaggaaggagagagagactgagagagggagagggagaggcagagagagagagagagagagagagagagagacagagagagagaggcgcaacaccagcaaacagtctcctagacgtagggctacattgatggaccggattgtaggatttctgcactgagtccctgcccctctgcctttcctgccaccccaagtcccttcccctcctgaagcagcaatctcttccatctccctctctggtctcttctccccacccctttcctctgcacctaaccccctcccctccatcca

SEQ ID NO: 37406 - DNA, 2300 bp, Homo sapien
taacagccatgttaggtttcagataacttctagatgccccagtggagctggtagctagatacatgaatgtagagtttaggggagggtctgggctaaacatataagtgcaagcgtcattagtattcagatttaaacccatgaggctgagcgagatcaccaagggagcagggagtgatggaaaataaaaggtccacagatgagccttgggacactgcaacatgaagacagtggggagacgaggagttcagcaaatgtgtctaagggggaatatccagaaaggtgggacacaaatcagcagagtggagcatctggaaagctgagtcaaggttgtattctaaggaggcaggaatgaagaattctgtccactgtcatgggtaagtcatctaagatgtctaagaatggactcttggatagagagttttgggttgaatggtgacctcagtaaaagtgagatattgcaggacagcagaagtagaactcttaagaaagtgttttggaacgattcaagacccagagagaggagagagaccagagccaccatctagacagctgcattcttttgtaaagggaaacagagaacctgggtagagatggagggagaaggtggagagtcaagaaagttgttatttatttttccctggagaaatgacattatgtgtgtgcgtaatgggaaggacccaggagacgatttatgggggagtgccaacgccgttgtgcaggcttccctctcatggcacaaggggttgggatctagtgacccagtggccttttctggggcatgagcactaggggagaaaggtaagacagtggcatcttcttgcaaccttctcggacaggttgaaccaccagggactctgcgcaggtgtcaccacactcccagacgtctgttgtcacctggcgcgaagcccgggtcttggggtagcaaacttccttaggttcacttcagcgacatctgtgccgtctgtccatggaagcttttgggtgcatttatgaagctgcgccctgtgcctggcgcctcagaactcagccctttaagttcctcccacccagggtcgggaacgggcctcaccatccggctgctcctgcagcagctctttctggcgagtgcaagcccacggattccccgcgagccgggtgcggatggggaatccgcgcagcagtcccctgcaagcaccctcccgccgtgccctccttccctgcgcagtgcatccctgggtgctcaggaagggagagcgcacggtcctgggccgccagcggtactcagggggaggcgacaggcttggcttcagccacaacgttgcgccacttgggcgctcccctctctgttgctaccgtccgtgctggtctcggtccccatctcgactcttcgtggtgcggagactgagcgcagttccctacgttttgcgtcccaacttctccggggcagaaaagacccctggtgtgtgttggggagaacggggagagcaggcctttggcctcttaagggtcttttggggtccccccacactgcgcctaggcgagggcgcctgtccccacgcgggaggagcgcccctagcgccggcgacatctctgcggacctggtggtcccagcgcgcgggcatccatccattcattgcgactcccggcgcggcggccctaggactccaacagaaatgtatgaatgggaagaggaaagagaaccaatgtctgtttgcactccctgcttccccgcaccccagcctccctccaggcagagcgagcccgacacgtagtgacaaggggcgggggtcgggttggggggactgcgggggcgtgcaagactgggagagagtctggctggagactgcactatttatatactccggtgctccaggacaaagagggcagatccgagtcatccccctcccccagccccagcacctccccgggcccctcctctggtggctttgatttcgtgaccaccccccgggggggcgggctggcaggtgcgggggtgggagccgtctccgcgggagcagccttgccaaaggtccggctgctgacgtccgagcgcccgctcctgtcaatgaacggcagcggtagcctggggactgttctggcaacgaggctacagacgtcatcgcctcctgttggacgcgggggggtgtccgagcagcatctccggcttaaagggaaactctctaagttccgggcagccgggagagtcgttcctgagagcacaagcacccccaaatgtgaagtgcactcggacacacacacacacacacacgcacgcacacacaagcactcatgttctaaagagagaggtctgagtccgaagt

SEQ ID NO: 37407 - DNA, 2300 bp, Homo sapien
tttttgtgtgtgtggcaattgtgaatgggagtttgctcctgatttggctctcagcttgactgttgttgttgtatagaaatgttagtgatttttgcacatgaattttgtatcctgagactttgctgaagttgtttatcagctgtaggagcttttgggccaagactatgggggttttatagataaagatcatgtcgtctgcaaacagggatagtttggctttctctcttcttttttgggtgtaatttacttctttctcttgcctgattgccctggctaacacttctaacactatgttgaataggagtggtaaaagaaggcatgtttgccttgtgccagttttcaaggggaatgcttccagcttttgtccattcagtatgatgttggttgtgggtttgtcatagatggctcttattattttgaggtatgttccttcaatacatagtttattgagagtttttaatatgaaggggtgttgaatttttttgaaagccttttctgcatgtattgaggtaatcatgtgttttttgtctttggttgtgtttatgtgatgaatcacatttcttgatttgcctgtgtcgaacattgcaatcttgcatcccagggataaagcttagttgatcatggtggataaactttttgatgtgctactgggtttggtttaccagtattttgttgaagatttttgcatcaatgttcatcaaggatattagcctgaagttttctctttttttgttgtatctcttccaggttttggtatcaggataatgctggcccatagaatgatttagggatgaatcccttctgctcagttcttttagaatagtttctgcaggaatggcaccagctcttctttgtacatctggtagaattcagttgtgaatccatctggtcctgggcttttcttggttggcagtctatcagtttcagaccttgttattgctctgttcggggattcagtttcttcctggttcagtcttgggagggtgtatgtgtccaggaacttatctatttcttctagattttttggcttatgtgcatagagttgttcataatattctctgttatttgtatttctgtgaggtcagtggtaatatccctcttgtttttgattatgtttatttaaatcttctctcttttcttctttattaacctagctagtgatctatctactttattaatttaaaaaaaaaacagctcctggatttattgatcttttgagtggtttttcttgtcccaatttccttcagttcacctctgattttggttatttcttgtcttgaaggcagatgatttcttatggaggtgaatatttgcttatgtaaggcccagccttctaaggaccccatttctacatatctgtcccagagaaatgaaaagcttatctttaactgaaaaacctggacatgagtgttcatgtcaacattattcataattattcaaaactggaagcaacagaaatgaggccaaatctggaggctttatctgaccgttatgatccactaacctcccgtcgtgcagaagactgtgtgttactctcacgtctgcatccaagggatcgcaccatgcagtggagatcacaactgccccacggaggcagagattaagaagataggcagaacacgcattgtcattcccagaagggtggttgtttataaatctgaaaccaaactattaaataacagcagctgtagcgctcctcttaaccaacaacataacaaaaatatctccagttattctgaccaaggtctgcacagagtcagccctagaattctgacgcaatcccactagaaaatactggataagtttttctcctaaaatgttagggaatttgagaaacagagtcacatcacatacttcaacagagtacagttcaacaaactcagcctatcttcatcacacattttaaaaccgaattatgtatgcaactcctttctgtaaaacaaacactctttcttttttcttttctttttttttttttttgagacagagtctgcctctgccgcccaggctggagtgcagtggcgccatctcagctcactgcaaccgccgcctcccgggttcaagcaattctctgcctccgcctcccgaccagctgggattacagtgacgcgccaccatgcccggctaatttttgtatttttagcagagacggggtttcaccatcttgcccaggctgctctttaactcctgacctcgtgatccacccacctcgggctcccaaggtgctgggattacaggcgtgagccaccgcgcccggccaaaacaaacacttttacgacaattgaaaaatagaagtttcc

SEQ ID NO: 37408 - DNA, 2300 bp, Homo sapien
acagttttagagcgatctgttaaaccctccagtcttctttggcgcttcccgactgtgggaaaagcggccgcgacgccgtccgagcgcaggggagggatccagccttcgggactcctttgccctgaagccgcaggagaggtttcgctcccgtgcctagggttccgaggccctcaattgcctgggacccaccctcgttcctccttcacctcccctccacttttcccttttatcttatcctcgggaggccttgggccaaagcgatgacctcttagacattttaatacccggagtaaggagagtaacacgcaccacgctctcccccaaagcccaggacccgatgagccagtgaaggcgtgtcaggagggtccggcgtcaggagcaaatgaggtccttttggtgcctctttctagaaggaaacttccccacctcgggtcagccccctgggaatatccatgcatcccagacatcaaaagacactgagaaatgcggacagggactagacgctccggcttcctgactcgtcggtgtaagttggagaagggagagaaggagccctgtcccccacgggcggcaggcacccttccccgggactggctcctggcagccctccgcataccgcgaggcgggtcgatccctcgagtcccgggcggggatccctccttcggcttccccagcaattcccgaccccggagcgagcccggctgggcgaggggcgaggggcagggggcagggggcaggggagacttagcgcggggcgcagataccatgtccgcgggaaagcccccttgctagggcgcaagactcctctgaactcgctgccccacccgatgcgcaggctttctctagaggggttggggctggggtgcccgctcaggagaccgggaaacagaggctgctacccgaggcaggccctcgtccagcgaatgggcgaggtgtgcagaagcgcaaagccaggccttggaagggggagcttctgcctccttcccccttcctgggctcccgttttaggaggaatgttactgtttaaagagaccccactgaactatttcctgctcattgtcacctctccttcgctctcctcgcgtaagttctcaccgaaaggtaataaaacaaccgctgccgacaccgcttggcgctgggccgggcggggaaagcgccccgagtcccactagtccggaccaccccgccagccccgaccttctcccaccttccgtgaaagcaatgacacagcagaaaccacgcacacgcctggcacactcgatgcgcgcgctgacctcggcaacaagtcctgtttttataagagagcgaggaggacacttctcagaaggggttgttttgcttttgcttatttccgtccatttccctctctgcgcgcggaccttccttttccagatggtgagagccgcggggacacccgacgccggggcaggctgatccacgatcctgggtgtgcgtaacgccgcctggggctccgtgggcgagggacgtgtggggacaggtgcaccggaaactgccagactggagagttgaggcatcggaggcgcgagaacagcactactactgcggcgagacgagcgcggcgcatcccaaagcccggccaaatgcgctcgtccctgggaggggagggaggcgcgcctggagcggggacaggtgaggccgcgcgaacgttccagcctggcgcggctgcgggatccgggcgcgctgggaaagcgaggaggaccccgcgcgggaatcagggagcatcgcaggctgccgggcagcccctcgcggaagtgcgggctggggcgggctggggcgggctggggcaggccggggcgtccagcttaccttcctccggggcttgccccgccgctttgatggaggtgcaaacatttggagaagggcgggggtgtaggggctgggccggggctcgcagggctggggccccggatttacatgaaacaggcgtgcgggagcccattgttggcccccggcctcccagacccgcccggctgggtctgatatggccgctctcggccaatgggaggctgcccggcacttcaaagcgtgcgcggcccaatccgccgagcaccccagcgctgccgccgcggctctatttatggggagggcactgaatttcggtccccagagacctacactagtagagccttggggagttcaagtggaataacttctccccacccctctgcccccgtcccctccccccaagtcttggtccgcgccctcctcccgggtctgtgccgggacccgggacccgggagccgtcgcaggtctcggtccaaggggccccttttctcgga

SEQ ID NO: 37409 - DNA, 2300 bp, Homo sapien
agaaaagaaattcatttgtttttcttgcagaaagagagggactagagtgtggggtaagagtcacgcgaggctgtcctccacccctccttgagcctgttacagcttcattgttgcctgcttctaaagataaatggctttgctttttcagaagggattgggcccaggaaaactgcctctctgggagtcgagtggggtgtgtgtgtgtgttttcttataaaatgtttcaagcatgttttcggtgggacagttgcatcctgaggcccagccataaggctttgtcttgtttttctctgaatggctgggcttgccaaggagagatagaccctgggagcgaaacagctggcggtgcctcagcccctctttcctcccaaggaagcgcattgttattaactgggaattctttatagccgggctggaggaagttttggctgtaaactgtcatgcactgcagccttcgctgaaaaggcggagggagtgggcctggtcctgggaaccgaggaacaaagatcagaaaatcagccacagaaaggggaggaaaaataaacgttagaaagtgaagacaggtgacactacacaagtgctggccaaagtcggtgacttccaacctctacctcctccgacttgggtggttcaattcctgggtcgtactcttcaatgcttcagacattctctctggagagtagaaattttattacgcgtgttagaaacggaatattctttcctgctgaagttgtattcttatttggccgtgcccctcctgttcggaacagttttagagcgatctgttaaaccctccagtcttctttggcgcttcccgactgtgggaaaagcggccgcgacgccgtccgagcgcaggggagggatccagccttcgggactcctttgccctgaagccgcaggagaggtttcgctcccgtgcctagggttccgaggccctcaattgcctgggacccaccctcgttcctccttcacctcccctccacttttcccttttatcttatcctcgggaggccttgggccaaagcgatgacctcttagacattttaatacccggagtaaggagagtaacacgcaccacgctctcccccaaagcccaggacccgatgagccagtgaaggcgtgtcaggagggtccggcgtcaggagcaaatgaggtccttttggtgcctctttctagaaggaaacttccccacctcgggtcagccccctgggaatatccatgcatcccagacatcaaaagacactgagaaatgcggacagggactagacgctccggcttcctgactcgtcggtgtaagttggagaagggagagaaggagccctgtcccccacgggcggcaggcacccttccccgggactggctcctggcagccctccgcataccgcgaggcgggtcgatccctcgagtcccgggcggggatccctccttcggcttccccagcaattcccgaccccggagcgagcccggctgggcgaggggcgaggggcagggggcagggggcaggggagacttagcgcggggcgcagataccatgtccgcgggaaagcccccttgctagggcgcaagactcctctgaactcgctgccccacccgatgcgcaggctttctctagaggggttggggctggggtgcccgctcaggagaccgggaaacagaggctgctacccgaggcaggccctcgtccagcgaatgggcgaggtgtgcagaagcgcaaagccaggccttggaagggggagcttctgcctccttcccccttcctgggctcccgttttaggaggaatgttactgtttaaagagaccccactgaactatttcctgctcattgtcacctctccttcgctctcctcgcgtaagttctcaccgaaaggtaataaaacaaccgctgccgacaccgcttggcgctgggccgggcggggaaagcgccccgagtcccactagtccggaccaccccgccagccccgaccttctcccaccttccgtgaaagcaatgacacagcagaaaccacgcacacgcctggcacactcgatgcgcgcgctgacctcggcaacaagtcctgtttttataagagagcgaggaggacacttctcagaaggggttgttttgcttttgcttatttccgtccatttccctctctgcgcgcggaccttccttttccagatggtgagagccgcggggacacccgacgccggggcaggctgatccacgatcctgggtgtgcgtaacgccgcctggggctccgtgggcgagggacgtgtggggacaggtgcaccggaaactgccagactggagagttgaggca

SEQ ID NO: 37410 - DNA, 2300 bp, Homo sapien
gttcttcatggcaaaggaaaaaggtttcctgaaatggaccttttttttttttttttagacggggtctcgctgtcgcccaggctggagtgcagtggcgctgtctcggctcactgcaagctccgcctcccgggttcacgccattctcctgcctcagcctcctgagtagctgggactacaggcccccgccaccaggcccagctaatttttttgtatttttagtagagaccgggtttcaccgtgttagccaggatggtctcgatctcctgacctcgtgatccgcccgcctcggcctcccaaagtgctgggattacaggcgtgagccaccgcgcccggccttgaaatggaccttttaacccgacacatccctcccccacaaaaaaataaaatgaaaaggaagtgaactttcagcgattatctttgaaagtcacacgttctcacaaatacgcctgtagatggtgctgtactgagcattctctttcggatgcaatgaccacagtcagaaaacttgtcctgtttccagcacagtagggtgaccacatcctcctactttgggcatgagctgtgctcagaaaacatgtcatgtgaacaaaagcatcagactggggttggggaggagatcgtctccctccttggagctgatcaatgcatgcattggaaccagcggtgggggtcccagtaaccccctttccacccaagtgatcatcaccgtgacgcatctcgggagtgggatccagtctgaagaatcctcgtccctgagaagttttaaatctagaagctgatgatcagggctgacgatgaagagtgtgtgtgggtagaaagagggaggacgctgcttagggaaagctgaacgaacgtaaaataatgtggattgacgaggtgagaggggctttcacctggccaaccataagaagtacgggtgcttgggacagaggagtcccagctgccaggctgagcccaggggcgcgtgcctggctgcagacggccagcctgggtggctgtggaaggagaacggtgaagtccaccgagccagtgctcatgtcctgttcaaagactcagttgtgtctgagggaacttcagagaagagcaaggatttcaccactggatccacccgggagggtgtgtggaagaagtggggtcagagcggctgaaggggagacctaggcaggtagagatgggaatggggacagtagaggcagagactgagtgggaaatgcaggaactcctaggggtggttggaggaactgccccccccccaccccctgcccaccagccgccgcagcggagctgggagagttgttccatggccacaggacagaaggtcttgaacgctaggtttgactatgtctttaaacagccttaatttatcttatgctcatgattctgaagatgacaacaaggtgaggtcaccttcgtcattcagaaactgcatgtaataaaataaaatgaaaagcattgccaaggaaattaagattccctagaaaaccccctaatcttttcattacttcatcaaatgtttcttaaatgccaggacctagtctagactggggatatacaagtagaaataaacactaaagaagataaataaataaaatgtgaattacgttagatggtgataagtgctaagaaaggaaagtgaggcagcagaaggcactgcaggctggggagagtgtggaggtggcatggatgagctgcaggtgccacgcagtctgagccttttctgcaaagaccccaggaattgagaggttagcggggggcatctggggaaggggttccagataaggggcgcaggtgcaaaggccctgggctggaagcacgcccagggctccgaggtgcgagggggctgctatggcagggcagagagaacaaggaaagacagctaagggggacgaggctgtgcggcctggaaatgagaagctggggctccggcacagagacagttgccaggtcacctgaggaggggcgaacgccgtgtttctaactgcagctcagcaccattgtagacttacttctgcttgtcttacacaataaggaaatcgtgttccttcctcgtcacaaagggacttagcaagtttgtttttggaagtcacagttgtggcaaaaccctcatgaggccctccatccctgggggaagactcctggaggaaatgcgtaggcggggattccacagggacggtgagaccctggggtccccatcactgacggagcacatgaggggggtcccttcaagcagcccaagccagcctagggtcgggggtttctccaaacacagaccctgaaacaatgaattttctcaggtacca

SEQ ID NO: 37411 - DNA, 2300 bp, Homo sapien
ctcagaatgtacttttctgcctctcaagggtcacacaaacttacagctttccatgtctccaagcttctgggctggtatgagacgtctgggagggcttggagaatcccagttcttgtctggtcagacacgtgcattaatctgataaactatcacttttcttggcttaaaaaggcccaaatcgctactagtttgtgggtgagaggtcacttaatccaatcaccctgatctaccaagactttttccctctcagctttagtgtaaaagttgcaatctggccttggactcgcactcctggggtggagtcttatctcctccgtcccgttagagctgtgtgatggcagttgcgtagctacctcgcctctgtacgaccagtgtcccagcagaatggagacagcagtggaagtcgggagcattactatgaggccaccaacccattctcaccccaaaactgtcattccttctgaagcatcctaagagtaaggagacaggaaggagagaagaccccaccagcaccgtcacagcttttgaactgcggggctccaaactcagatgtctgagtgtccaagtgtttgctgatttttctccatagcctgcctctccagctgtgcccccataaatgatatttgataccgccccccgccccacccccatcctctcctgcctcaccttctcttccagttctccactttccaggcacagaactgtgggcctcctgccgccactgacgtgcctcttcccacacccatccagagattctaaaacctggaataaaacatattgaggaggaggtttcagtatcttaggacctcacctgtcaagccgattaacagcctgagcccaccggcagagacaggctggcagggatggagggaaagtgcctgtgagctgggaggcttgtttcagagctgtattggggtggcttgggaggtgctggtagagatgacagggcccaaacctgtcaccccaacccaagctctggtgagaagtgtttcccaccacctgccaggtttccttgacgctcccatgtatccacagcgcagttctctgaggccaccaacagtcaacaaggggaggcgttgctgctgcctcggagactgaggcggctgggggagggccatgctgtcctgctgtgactgttggcacagggcacatttgtgtttacccacagttgaatgtgctctggagctaacctggggccgtaaccatcacacacctggtttccatcagaaaagtgtatctgatggaaagtactttgtggagatctaagcagctgatgattatccttaagtaatgcagggactgcacacatgaaatgttgactttttgatccgtcactttgcaattgttcaattatttattaaacaaacatttgaatattgtaggatgtcttcatgtgtctacgactagaatgtaaattgacagtgaagatttatctcattaattctgaatctctgctacagtgataaatatattgctttgctcataagaattattaaagggacttgatgtctaatatttgccatgtaatcagcattatatagctgaaactgaactattttgcctgttcatagatacttaggttttgaatttgaaagtgactcctcaaggggtggcatgaacactatgtaagattcactgagggtcatttctcccctctcagctccagcccgcttttctctgtgaagcaggatgtgtccggggccgcagagctgcatctactggcggtgcctttcccgccgtctcgaaggcacggagaggctacaggggattttctctgaaacgtgcagggcctccacctgtgactccggaaggctgccggctcccccaggggaatgctcctggctttcgacggactacattaacctcggaccaccggagcgccagctgggggagccccgggatgcctggcgcgcgctccgccctccgctgtcctggcactttgctcccattcaacagtcggtcgtgacaccagccgggcacagcccggggcctggcagggccgcgtccttagcgagcgcgctgggctcctcctcctgccggcccggcccgcgtctcagctgtggggacccgggggcgccgcgactcgcccacagtcggacggcgggaggcggttcctgcagggtccagtcccgggagcacccccaggaggaggggagggtgggagcgcctctctttgagtccccgggtttggtcgctgggatgtgaggaagccggagaggccgcggctggacgcaggtgggtgtggaggggccgcccggactgcggggacccgctccgcgcacagtggctgagcgcccgcc

SEQ ID NO: 37412 - DNA, 2300 bp, Homo sapien
gaacgtttgaacatataagacgtctcccaaggtggagcactttgcgtggtttgatttgctgcccacgtaagatcacgcctagtaatggtggtgaagaggctgtgccacatagagccttccacatgccagcttctagctcaagcccatcacggatgcactctaccttattcattacaacagccctttaaagcaggtaggtaggaactctcctcattttaaagagaagacaacaggtttagacgagtccactgacttcaccaaggaccctcagatagcaggcgtcagagctgggatctctttaggtctttccaacaccacactgcccacctcttgcattcactcctgtgcctgcttgctttcatggggatgtggaatgatcatctttcagtttacttaacagattaaattattagatgcttccaatttgccaaggaatattgcagtcatagactttaaagtaaaataatacttacagaaaatacaagtaaaactattcagctgtattcttatttttgttctatagtatattccctatgtaaatgaatgcagaatagtttatgcatttttattaggcttttgaaaggatctcaaacttataatctactctttcttcccctgtagttgtgtttcatatttaccctgtgtgctgctctttgggtaagttatgtcagccctactggctttcagttaactgtgtgccccccaccccagctgacgtgtcatcacaccattatcttaaaatagctcatctgtttttttaaaactctctaaagattaggtgttcctaaaatttgacatgttaccatccagctagttgctaaaaatgccatagattctactgtctacagcatagaggtagtcagtgaacacacatgtgcacacatgctcacccacccagctggtggctaaatgtgccatagattctactgtctgcagcatagaggtagtcagtaaacacacatgtgcacacatgctcacctacccagctggtggctaaatgtgccatagattctgctgtctacagcgtagaggtcattaataaacacacatgtgtgcccgagctcacctgcttgtgggcctggttggcaaatctgacagtgcccggtgtggtgaagggccctggctcaggggctgtgctctccaccatgctgctgcaggggtgcgctgtgagtctgcagtggtgaggcaagtgtgctgccgagtagcaaggtgtaaaaccaatagagagggccagaaaacacagatagtaacaacaaagagaggaactgaaatcattctcctaccctgtggagaaggttaacagctgttcattagcctttaaagaagtcacattgttacaattccgtttacttcttgatctcctgattctacatcatatttttctattgtactcaacctatttcccaaatgggtttgaagcagttcttgaactatcaacaagaaaagtcccattttaaagaagaaagggtagatattttagaatgctatcagaaatattccagttttttttttattttgatgatgtaaggacaggactttagttatatgagattgatttacgtgtcatttcttaatgataaaagaatattcttaacttgcacctctctatagaaccttgatttttggttttggaattgcctgtttacttataaacagtagattgaagataaataagtaaaaaagcactgatggacaaggaattctgaaaatattttaaaacaaccatggaaactgtttatattattccagaagatcacaataaaatacaattttccttcaaaatatcactcaaggagcaaatgggaatgagtaaaataagtaaatttcacatggggcatacagatctcagtgggattttacatgtcgattctagataagttaacattgactttaaagacctaaccacctttaaaagtctaatgttttcagtctatgcacaattgtttcagtaacgtttatttaaagtcatatattttgcagtatttaaattaatggatatagttttagaaaggaaatgtattttttgggttttaaagtttcagatcaactgtatcttaaatttatcacactaaaatttaataaagataaatgaagccatcatctacatttttgaaagacaagaattaagtttgattgagaaagatgtttttaaaactttgaaactcataattgctctgtttttgctgttgttagtggcataagaagggactggctgtgttattctgcatattgcagttcttgtcaatgacctggtaagtctttccttaccctagtgaagtgttaaaattgcctgagacgtg

SEQ ID NO: 37413 - DNA, 2300 bp, Homo sapien
actctgtatctgccttggaggcttttattcacaggatgctcagacatcccagcagctcttctgagctgtgctcacatgactccctggcagggaggccttatctaagtaatatggcaaccccaacctcctcaacctgctctgactttttctgtggctgtctgacacattatatacttgtttattcactgtttcctccaattaaaatttaagttccatgtgaaagaggtatttgcactggtcactgttattaacacctgcatcttgaacaatgtcaaacatatgcaggaacttgaatatttgttaatgaacgatcacctcctctgaactcacagcacttgtctatacagccagtcactctaatctttgattgattacttctccacatatctttctcccctctagacagtgggctcaagataagtgatattacctttgcatctccaaagtttagagtagcactgtccaatagaactttctgcaatgcaaatgttctgtatctgcgctgtttaatacagtagcctttaaccacatgtgcctactgaacatgtgaaatgtggttgctgtgactaaggaactgaatgttaaattttatttaattttaattaatttaaatttaattgctccaggcgcagtggctcaagcctgtcatccaagcactttgggaggtcaaggtgggcggatcacttgaggtcaggagttcgagaccagcctgaccaacatggtgaaacccccatctctactaaaaacacaaaataattagcagggcatggtggcaggtgcctgtaatcccagctactcaggaggctgaggcaggagaattgcttgaacccgggaggcagaggttgcagcgagtcgagatcacgccactgcactccaggcctgagcgacaaagcaagactccatctaaaaaaaaaaaaaaaaaaaattcattggccacatgtggctgtggtaatatacagagttacagagtgcaatgagaacagatacttgtcttacactctctgaacccaaaactgtagcccagaactctacccacaccaagtgctgagtaagtataatgacaaggaagtcaggagagacaaatagaagatccttatgaaatacaattcaattttaaacgtccaacttctgcgacagcacacaataacgtgcaatataatcgcatgcaataacaaaaaaacttacaccgcagttcctgctccactgctacttttaaccttcttgctggaggaagtaacccttatcaagtctcgctggtaaggcgcagacacaagggcttttattaagaaaaaaaaaaaaatctcttaccagggctcactgccttaacagaaaaattttaattcaatattatttcacttaccaatgtcctgtttatttttcctccagtctccctatttccaaaagaccaccccccagcaaacacacacataacaccacctttacctccaaagacaaacagatgcaacaagctttagggtctcggctcactgcagcttgcaggataaatgccctgcatagctacttacgctgcacagcccgaggccagaccccgcaccaggctcagaaaaccaaatagtacgtgggagcgatggattatttgggaaagcgagggcagacgttagcggattcctaagtcagaaggccagatgggagagtcgggggggggcctcaaagtgggtttaagtagaccgcatggaaaactggaaagttctcaaattctacccaggaagcaggcggagccctcctaaatcaaccagccgggcagaggagtcccagacccccggcctcgcacccaccccacccgctcggccggtcctcagtgcggccggggccagcgggcagccccgggactggacgagggcgcaagttcgctacctgcgcagtcaggccctgctcctcgtcgtcctggccgctcaggactcgccgcagcttctccatggccctgttacagggccgtagcggccgccactctgttgcctgcccctgacgcccaccaggaaaccccgaacccgaaaccccacagaccagccggaagtccggtcccgcccgcttcctgtgcgtcagcgcggccgccgtagcaatgcgcgcatgctcaccagcctttctctcggacccggtagtggtccgtgaagtccgcggagtgggcgctgatggtggggctatcccttcccactgtccgcgaggtgcgccgtggtaacgcgcggggacacagcgcgggtgtggaccccctgcccacagctggcgcacagccattgagtgtagacccgactggggcacgaccactgaaccctgcacttggc

SEQ ID NO: 37414 - DNA, 2300 bp, Homo sapien
ttcaccatattgtccaggctggtctcaaactcctgaccttgtgacccacccgcctttgcctcccaaagtgctgggattacaggagtgagccaccgcgctcggcctatacttgaaaatcttgaaagcagttatgtcagatatgtgaaccagagaagcccatcttgaatagcggctgggtaaaatgaggttgagacccactgagctgcattcccagacagttaagtcattctaagacacaggataagatagaaggtcagcacaagatacagatcataaagaccttgctgatgaaacagactgcagtaaagaaaccggccaaatcccaccaaaaccaaggtaacaagagagacctctggtcgttctcattgctacactcccactagcgccatggcagtttacaaatgccatggcaatatcacgaagttagcctatatggtctaaaaaggggaggcatgaatccaccccttgtttagcatatcatcaagaaataaccataaaaatgggcaaccagcagccctggtaatagacagccctgctctgcctatggagtagctattcttttgtccttctactttttttttttttttttgagacggagtctcgctctgtcgcccaggctggagtgcaggggcgcgatctcggctcactgcaagctccgcctcccgggttcaagcaattctctgcctcagactaccgatgttcctctactttttaaataaacttgttttcacttgccctgaattctttttgcgcaagatccaagaaccctcttttggggtatggatccggacccctttcccgtaacacttacggacatactctcttattcaacagaaacatagttttattctatagattttacaatctattttctgaccttttaaagttaaggacataaggataagacttctcatattagtatgaacaggccacatagaaatatcttctgcctaaaggaaaaggatgctgagcattggaccgtttcatcacaagaaggcgcgacttgctttcctagggttcctgtggtatttgtttttatctaattgagtttagataaaatctctactgaggcagtaggatggacaatgaaactttttgaggatccaccttttaactgaaagattttagggaggaaatggagtgggcaaagtaatcaaaagaacaggcattctcattaccatcttaccaagcctagaagcaaacagaagagcaaaacctatcacttaatgacttctggagaccatattagacaggcagccctgatttttaatctcctttcttagcatggtggaaaatgagagagagaaaaatgccacttccccatttcttagtgtttgttcatccagcacgagccggagaacagtaaacgcttgttcaatggtttcactgttcacacaaaactggaaaaatgggttgcattagctattccttttataaataagatttcactctttcaaactcctagctgaccagtgaactgagtaaagaaatagctctcacaagggcaaaggagtgaggcagcctcttgctatttctcctgagacggtctgaaatacagctcctcgctttaatcctgaggcaggtgtttgtgtctccggatgaggacacccagctgggaaggctagcgacgcccccagggccacctcatgggtggcagggcgctcttcggagcacggccacctgcccgcaggagccctccgctctccgattccaggcgaggggaggcgcattcggggcctcgacttctgggaacccggggtgccgcggacccgcccagcaaggcccctcgcggggcccggaggacgccaagtgcagggttcagtggtcgtgccccagtcgggtctacactcaatggctgtgcgccagctgtgggcagggggtccacacccgcgctgtgtccccgcgcgttaccacggcgcacctcgcggacagtgggaagggatagccccaccatcagcgcccactccgcggacttcacggaccactaccgggtccgagagaaaggctggtgagcatgcgcgcattgctacggcggccgcgctgacgcacaggaagcgggcgggaccggacttccggctggtctgtggggtttcgggttcggggtttcctggtgggcgtcaggggcaggcaacagagtggcggccgctacggccctgtaacagggccatggagaagctgcggcgagtcctgagcggccaggacgacgaggagcagggcctgactgcgcaggtagcgaacttgcgccctcgtccagtcccggggctgcccgctggccccggccgcactgaggaccggccgag

SEQ ID NO: 37415 - DNA, 2300 bp, Homo sapien
gcttaccattttcattctcaaaggcatttcttcttaacaccacttattttgaatagatagcataagtagactgtacaaatttcaaaaagaacaaaggaagatacaatgaaaagtcagtgtcactcttggtcatccttagaggcagccactactaacatttctccagtatctttgcaaacatgaatgtatatattttctttgtccctatgcacaatgagtagcatactttatacactattcagaacctgggtttttttcttgaaaataaaaaagatatttcatatcagcacataaagaattcctttattcctaatggctgtatactaatccactaaacggatgcaccataatttatttaactctctccctatgggtagatatgtaaactctaatctttccatactaaaaacaatgctgtacacatgaaattgcacaaactggcttgtctatcctaggaaatctctagatgggcttgctggatcaaaggggatgtccattattaacactaatacactgcgggtcactaatgttgagaattcctgttcaccaaaggcatttcttttattttttattttagagacaggatctccctctgttgcccaggctggagtgcaatggcacaatctcggatcactacaacctccacctcccgggttcaaccgattctcacgcctcagcctcccgagtagctgggatcacaggagcgcatcaccacgcctggctaatttttgtattttcagtagagatgaggtttcactatattggccaggctggtctcaaactcttgacttcaagtgatccacctgcctcagcctcccaaagtgctgagattacaggcgtgagccaccgcacccggctaccagaggaattttgttatatttatttgttttttttggagacagggtcttgctctgttgcccaggctggaatgcaatggcgcaatcttggctcattgcaacttccgcctcccgggttcaagcgattcttctgtctcagcctcccaagtagctgggactacaagcacatgccaccacgcccagctaatttttttatttttagtagagagggggtttaaccgtattgcccaggctggtctcgaattcctgacctcaggtgatccgcccgcctcggcctcccaaagtgctgtgattacaggcgtcagtcaccgcgcccggccaccagaggcattttaaatgatcgtccacattagaaacaaaacgaaacgaaacaacttggaaaagtgagcaaaagccttcaatgtgttcttttctctgcctttgtgatccgaaagtcgtgctgcggtttatatactcctaggcgagggtcgcgtgctaatgatccctttcttttcaatatgcacccgcggtgggacttacagaacctttattttcaacacgtaagcagtcacgcttcctcgagcctaaggctttgtgctattcttaaatgctttcctcctccgacgctgcggctccctcctgagcccgtagctgcagcgcgttggtgaggagcgccggccctgggtgccgcccgccaccctggagggaccggtccgggggaaagtgctcgggagaagccaggggccccggctgcggtcgctggcccggggctctgcgcactccccagtgcccggaaaccgcaggctggcccagcttgcgggccgggtccgcccacgtgggtgtgggaagcgcaggggacgcgggccgcccggccaaggtgcccttgccaggaaccggcgcagacacaggccctgggcggcgcgggaacccggccagtcccaccgcgcgctgcgccgcaggggccccactgcaggtcgccccaagaccgcgcgacgctcggcagggcgcccacagtcctgtgggtcagagaaatgtcacctccacgtccccgctggccgggagccgctggagcctagcaaccgcctgccagccccggcccagccccagccgttttacggcagcgggccccgcccccgtgcgccaccgagggcgggaaggaggcgtgcggcacgagccagccagtccgcgccaccatctctggccctgcgccctgtcattggccgagagccgggcggcgcggcgcggccgtaaggcgtggccgggtgtcgtgaggcgggccttcgggctggctcgccgtcggctgccggggggttggccggggtgtcattggctctgggaagcggcagcagaggcagggaccactcggggtctggtgtcggcacagccatggcgggcgcgttggtgcggaaagcggcggactatgtccgaagcaaggatttccgggactacctcatgaggtgacga

SEQ ID NO: 37416 - DNA, 2300 bp, Homo sapien
aaatgagtccagactcctcaacagtggccaaagtccagggtgactggccctggcattcgctgtgtcccctaggacccagcgagccccaaaacagacctggcctcactgtcagaatgcaggggatcacgtgacctcagcctgggggctccacaagcgtccaaaacattttcccccaaggcacaagcacagtgccagggtggcatggggtggggggggcaggtgcaggagacagggcccctgtctcctggggcccacgtgtgctggcccctggcggcaggctaacagcactccatgctccagggaccctggggaagctctggtttctcccacgttgcctgggggcagctgaggcccatggaggccccgggctccggctcaacccctggagtgaggcgccgcggctctcacccttgtcttctgttttgcagggcgcgatggccgccacctactttgctctaaacagaacacctcaggccccgcggctggagcccgtgctgtcatccaacctggctcagcgcagaggcatgaagagactcacgtccacgcggctgtagcgggtgggaccctggccccagcgtcccctgccagcatcctcgtgggctcacagaccccggcctcggagcccgtctggcacccagagtgaccacaagtccagcagggaggcggcgcccgccctcgccgtgtccgtgttttctttttcagccccggagagggtcctgacctgggggcttctccaagcctcactgcgccagcctccccgcccgctctcttttctcccaagcgaaaccaaatgcgccccttcacctcgcgtgcccgtgcgaggccgggggcttctttcagagcccgcgggtcctctcatacatggcttctgtttctgccgagagatctgttttccaattatgaagccggtcggtttggtcagactcccgacacccacgtcccaggtacccggtgggaaagtggcagtgcgagggcgcagccattggtggttgcagggccccagagggctggggtgacctggcatcccggggctccccacgggctggatgacggggttggcactgtggcgtccaggaggagatgcctggttctgcccaaaataatccaaagagccgtttcctcctcgcccttcagtttttgcctgaggtgctgggtagcccatcctttcctctgtcccagattcaaatgaggagtaagagcccagacgagaggaaggcaggctggatctttgccttgagagctccgtgtcaccaggatggaagggggtgcctctcggaggagcctgtgtccacctccagtctcggctttccccggggggccaagcgcactgggctgccgtctgtccccagctcccgtggccacacagctatctggaggctttgcagggagtcgtgggttctcgcacctgctcagccctgtgtcggcttcctgtgtgctcacctaaagctgtggttttgctgtgttcacttcgatttttctggtctgtggagaaactgtgaattggagaaatggagctctgtggcttcccacccaaaccttctcagtccagctggaggctggagggagacacaggccccacccagcagactgaggggcagaggcacaggtgggagggcagcggagatcagcgtggacaggagcgatgcactttgtagatgctgtggctttgtgttgcgttttgtgtctctgttgcacagatctgttttttcacactgatccgtattcccctgggtgtgcacacagggcgggtgtggggcatttaggccatgctgtgctctacttcattgagtaaaatcgagtgagaggttccgggcagcaggatcgacgcccagtccagccggcagagggaacacacgggtccttcattgtcctgtaagggtgttgaagatgctccctggcggcccccaagcagactagatgggaggaggcgccgctcagcccctcaccctgcatcactgaagagcggcgcctctgcagcaagcagggcttcaggaggtgcccgctggccacagccaggttttccctaagaagatgttattttgttgggttttgttccccctccatctcgattctcgtacccaactaaaaaaaaaaaaataaagaaaaaatgtgctgcgttctgaaaaataactccttagcttggtctgattgttttcagaccttaaaatataaacttgtttcacaagctttaatccatgtggattttttttttcttagagaaccacaaaacataaaaggagcaagtcggactgaatacctgtttccatagtgcccacagggtattcctcacattttctcca

SEQ ID NO: 37417 - DNA, 2300 bp, Homo sapien
aaatactattgttggtacaacacaagccttgacttaggcctgcctgccttggggcttttgtcctgaacaggatgcccatgagttggtataggtggcattcagcactcctgtctccggccagtattactggctccccttccgagggaagcatggtcgggttggtcctccctcattcccggagtctgtgtccagttggaggtccatctacctcttcccgtgctgggtacagagtgtctttgtgtttgcctagagccaggatgcctgagggtcccagcagggatacagggcactaagaggctggttctgagagcacagattactaccctcccagcagaaccttaaaggaagcaggcaaagcagttttcatgggcacttaactggcacaccatcttgaaaaggagcaaaaagtggtgtttggtgtccttgtggggtcctgcacttctgtttttaaagaatagtcattatagatcctttaatacataatatgaaaatcaattgcactatttaaattcacaaagcactcccacatccgtgatcttgcataagcctcttggtatccagtaagggaggtgagacaggtttcactcgtattttcctcttagagatgagtcgtgggaacaacgtgcaacggcacccaagttcaccaagcaaggaaggggcagcgccagagtcgtggtgctaaactcccggcttccactccggagcagcaccgctcaacgcgggtctccaggaaacccagagagcctatctgacctcacctcagcccggatgcagcatgactttaaagctcttatttaaggacattctgacctctctacccaccttagccaaaatagactacacaagtattaacgcaacatctgactagtccagggagcaaaacaacgcgaggattttgcagttcgcactgcaaaagagcaagcaagacttgtcaactcaccaccgcactcgtttctgctctttgcaggtggtgatggtgctatgtcaatgggctcggtttctccctgtttttaaatacaaactcaacacgtgcacaagaggaaaacagagcaggctgcacggggtcgtgagcccgcattctcggccctgctgcagcccttggtgagcatttctaggaaaaaaaagaaaaaagtgtttccctttaaggcggatcccgagcggcgctgccgccagcagcgggtctgagggccttgccctagacccaggtcaccccgcccgggtattcccagcgcgggccctgataagccatctgtgtagacgtttcctagagcgggaccggctgcggagggcggatgcgtctttgttctgcagccgcgggagggaggcgccccgagggctgcctgagcccccgccctcgggcgcctttgtccgctccggcggagggaaggcgccggttccgcggagggcggctcctggccgagctgcagggcccgctggcaggcggcggtccctcgctcgctgtgccgctgaggttttggctgcgtttgctgatcaacaattaaagtttggttcggcagagaaaaacatgatgacaaagtgtgcatagggatgttttaaggaaggaaaacataatgacggccccaagctggaagaaagagcagccgggccgaagttgcgtgacaggaacgcccgcgactgcgcggctccggagcagctgcacaactcgcccgggccgggagctgtcccgggccgaggctcattaggtatgcggcggctgcgggcactgattggcgggcagtgctgtgggcggggccgtgggcggaaccgcgtgggggcggggctgcacggagctggttcttgtaggaaggagtagaaagaggaggagggatgggcacctggaaccacagggcggcgctgatgattggaggtatcggcagaggcggggctctcccgggcggggcggtgggctctcattggcagtgctggtggtgggtgggaacgggaggggtggtgagcgctgattggccgtagtggcggggcggggcggaggaggaggaggtgtgcgtgccggggcgcggagcggcgggcgctgattggtggtagtggtggtgggcgtggtgtaggcgtggcgcgtggccggcgctggtactcgcaggggaggcggagaaggaggcggagggagcgattgtggccccggccgcggtggccggcgcggcctgccctttgtgaccgcagctcgcgccccacgccccgcgcccatggccgccgtgccgggctccctggccacgcgtgcccgcccgcggacctgagccccgcgcctgggatgccggggatgcgcgtcccccggccctgcggctgct

SEQ ID NO: 37418 - DNA, 2300 bp, Homo sapien
gctgttcacccatggcctcccaggagctgggcttccctcaagtttcctaggacacactgccaatcacaagacagcccgtccaaaggacttttcctccctcatataaaggacctctatttccttcttccacaacagagcacttgtggaaacttccagaagctggagtctttgtaaatacacagtaaagaatctgagttcatttctttcccattgccttcaggagtccacatttttaccatcagattaaagattcttgacatctcttcactgtcttttatgagtgactctcctagcttttttacagaaaaaccaaaaaccatttttttttttttgagacagagtctcgcgctgttgcccaggctggagtgcagtggcgtgatctccgctcactgcaacttccgccccctgggttaaagcaattcccctgcctcagcgtccctagtagctggggttacaggcatgcgataccacgcccggctaagtttgtatttttagtagagacggggtttcaccgtgttggccaggctggtctcgaactcccgcctcaggtgatccgcccgccttggcctcccaaagtgctgggattacaggcatgagccaccaccctggctttgtctgtttttaatctgtgaccttttacagcatgtacaaaatcaccttatgattgttaacacaagaaaaccttcactctgctctgtcaatcacagaatctccaatttgaaaacgaacaatattgctatttttaaaattctgaatgcaattgattttaaaggtccttctggcctaattttgtagaaagataaagtgactgtcataaatcaacaccaagtacagaacccctctgttaactttggactctactttgctatgagatacaaagtatctgggatttgggtttttctttttttccagtgaattgaatttcttagtgattgcataaagtcgaaaaagaaaaagggattgataattttggagaacattaagctatttttaaaaagatatttctctcaaagataaaggaatttgctatagaaatgaatacacttactcccaaagcagcattaaattgtgttaactttaacaccctttcctaaaagagggaaccataatgcttcaggattagcacttggacgattggagaaatgaatatgtctttcacccgcacgcacctttcattatccaggacagaagggagtaaggagggaggcaagagagatccccccactccacaacccaaaaaagggaaacagggaggggaattttcccctggttcctttccaaggagcggtggcccaggaggccttgctctcccgcaggcgcctggctgtgtcttcgggggttccttctctgagcctcaggactttgtcacctgtgaaataggacggggtggagacctgaaggagctgaggggcaggatacacgttgtttgaattaatgtttctgtccctcgggccctgccactgggagccccagcggcccacgtgcctttcatcctggcccgcagaggcctgagtgctgtttcgggcagctccgggcagggctgggtagggcccagcggaccccacgggccgcccccccccgcctctccccagctatttgtctgtcgtccctcttcgtccctcttctcctgaggtgctgtcccggccctcggggcgggggcagccgcgggcagctcagtccgcagcgcttccagaggtgcccgagtctcctgaacgctccgcaggaaagcagctgtgctgcgtggagccctcccctcgtcccggtccctccgtccgtgttcctgtccctcccgttctgcggcgggaggtggcggtgtgggtctccggggaggcgcggcgggctggggaggtggggaagggtgtgcgcgtgctgggggtgggggggaaagacctgccgccccccccccccgcctccccagcccttggttgctatgcagtttctatggcagcggcatcctcagactcaactttcaccctcgtttagagccaattaaggtaaaatagtgaggggaggagggaagagcgtggccagggaagggaggggggagaggcaggaaattcaattcgaagctgcaagtgcagcgtttactctgccaaagtcgcagtacagattccgaagccgcagcgccgtcccctcctttcctcgccccagcccgagcgggaagcggcagcagctccccagagccctggcttggcagggaggggacggcgcccgagcagccatattgcagccccccgggtccctcctccggccggcgcaggccccgcgctcacgacctcctctgggagccggatctgtcc

SEQ ID NO: 37419 - DNA, 2300 bp, Homo sapien
ttcgggccatgatggggctgaaaggaccctggtccggcatctcggtccttgttccaggaactctgtggccaagacagtctgacaataagttattgcccacagaggatgtctaagtctttgtgtccactctgtgatcgtgatctagaattttctaccaaggcttgatggggaactaggatattcttctgcaatgattcagaattttacagtgtacctttatactttaataagtgaattctatatatggtagtttggtaggattctgtgtagaagtgctttaggaggtgattgaaagctgtagggacttaccatacggttatgtattgcttggtgatggggtataaaattgtcatgtgaacatcttggagtgcacttacttagctgatacagcccacgacacacatatgctttgtggtatagcctgttgcttcgaggctacaaacctgtacagtgtgtgactctactgagtactgtaggcacctgtatgtaacacaatggtaaggatttgtgtatctaaacatatctcaacatagaaaaggcacagtagaaatgtggtcatatgggaccgccctcgtacatgcaggccttcactgactgaatgtcgtaatgtggcgcatgactgtgtttaaagatttgtccaaatgcagtttaccaggataagcctggaatccgatttcaattgctgtcttttaaagcaggtgtggcaaacgggtggtgatgtgtgtgccagctccactcggtggtggccccagcgctcccatgctccgaaggagtcaggaactggaaagggtacctgcctggagcagtttgtgtgtgtgctaaggggtggggaaggcggggactgggaaccatgtatttgcagtccatgttgacacatttgttgcataaagtcatagaaaacactttcctttaagagtgtcttaatttttaccatgaaatatgatacctgaaaagaacaagaaagcaaagtggaccttcattatacagctaacttttttaaatttaaattttagtgtgcttctaaaattggggataaaaccatccatcaattactaccaagtaagtcttgcttttgcttcttttctcgtgtgtctctcccggggacctccagtagggccgtttcagcctctgagtcaatgggctgtaaattgccccagtgcaaacccccttcctacttaaatgttatcatgtgaacagattttatttgcattttattttcctgcgcatgttgagtaggagctgaaggctgcttagaccagtgatttggaagcacagatttcatggctccctttgtgagaagtgtgtgctccagggtccggcagagcaggtggaatctgcagtttcaagagtcacattcacttttataacgtagtcttatatttgtttgtggtttgttttcatgataaaattgtgatttgttttatgataaaagaaactatagatatttaagcatgacaagatgttattagctggtaagcatatacaaaaagttgctttttgccaggtgtggtgactcacgcctataaatcccaggaccttgggaggctcaggctggaggattgcttgtggctagaatttcgagaccagcctgggcagcagagtgagacctctagaaagaagtaaaagtagctgagcatgatagtatgtgtctgtggtctcagctattcaggaagctaaggtcagaggattgcctgcgcccaggaatttgaggctgcagtgagccatggtcgccccactgcactccagtctgggcgacagccagatcacgtctctttaaaaaaaaaagaaaaagtagttgttttcaactcttggttgcctgtttttgtaaacaaaattgtactcctttgttacctggggatgcttgtgctcccatggtgtagctgcagtagggaccgatgtgtcatccacaaatcccgggatatttacgacgtggacctttacggaaaatgtttgcagactcttgccttagagaaaggtatcagattctttgagatagttttcgtatttatcacaggttgtggatttagaaaaaggttgaaagtcactgatcttagtagttctggggcgatggctggatgttgaacaattattttggtatcttgactgtttgtgaaataaattggcaacagtgtctttgctctcatggtgtctgcttacctgtgcagccatttttccagagtgtggggagcagtggacttgaggaaggagtctaccagccctttccagactccccctcaaccccaaccccaggaagccgtaagatgatcgcttgcagggccctcaccgtcctcacctggact

SEQ ID NO: 37420 - DNA, 2300 bp, Homo sapien
aacaaggaagtgaaatcaaagacaggcagcccggcgccaggcccaaaaccggacctgggcctgcctggcctaaacctagtagttaaaaatcaactcatgacttagagaccgatgttattcatagattccagacattgtatagaagaacattgtgaaactccctgccctgttctgtttctctctgaccaccagtgcatgcagcccgtcacgtaccccttgcttgctcaaatcaatcacgaccctttcatgtgaaatctttaatgttgtgagcccttaaaagggacagaaattgtgcattcggggagctcggattttaaggcagtagcttgccgatgctcccagctgaataaagcccttccttctatagctcggtgtctgagaggttttgtctgccgctcctcctgccacaggattacagtcgcgtgccacccccgcccagcaaatttttgtatttttagtagggacaaaaggcccccaggcccctgcaataatggtcctcataacaccactcctccccgagtccagatttgctttatatttggcagtggtcacaacagccctccttgacaaggggctgtttaaacacaccggactgtgatttaaaggaaaatgaggattctgggaagcacttttgttttaagaaaattatttttttagcttaaaagaaaagagaaaaagaactgtggcgtgtgcctatattcttgagaggaaggaatgaaaggagccggaaagaaacaaataagtcgttagggaaaaggagaacgagaataacaccatgacctgtaggaggtcctggaggagctaaggaggtgtcagccattttccccccccatctgttccacaggtggcattttattgagcaccgactgtcccccatccactgtgctcagtggcagggactcaaggtgggcaaaatagacatgggccttgccttgcagtctagtgggaaaaacagattaatcatttaaatattttgtttcaaagaatggtaatgcatgcaggcaaggtccaggcctgtgggagagcaggctacaggcccacctgctatttagacagttaccagtggcagaggaccccgaggaaggcgcagtttactcgacgtgtaaataggaatagccttaactagctgtgggtgtgcggacagggaagggaaagaggagaaacatctgcagagacaatgccgggtgcacagcccgtgggcggggccgcgggtgcaggggaacccgtgcctctgaagggctgggaaggccagggtgttgggggaggagaccgggcctatgggactggccctggctacgccaaggtggggctgacatgaagtccccttcatccgtggggggtggcccgtccctctgggaggggatccctcacaagatgacttcccaggtcgcgccccgaggcggctctttgctgcccccacagagatgacttccgggctcctggggcccgcggggaggggcaggtgaggcccagggctgggtgagggccaggcccttctaggaatgttggtgctcccagcacctagcaccgggagactggagaggtttccaggagagtgacccgagtaggtcccctcctaattctggagccgtccctcgggctgcgcagtggagcgccgaggtggcgggaggctgcggggagcctgggcggccaagcaccatctgcagtcaggagctcccgggcagcttgcagggcgcagtttttgaaagcgggtgctgcgtgcggaccgcgggcctgcagggtgcgcgggtcgggctgggggctgtccctggagagtagagtggccctggggcccgcacgcccacttgctggcgggggatggcgcagacacgggcggtccccccgagggcggtcctcacgggtggtctaggttagctcggacccgggagtgtgggagtggcgcagagctgcgggaaaaggcgcggggcgcctgcgtggcgaaggaacacagccgcctgacacgccctcaaggcccgcggagctgctcctgcctcggcctctctgagccaaccacggggcggggcgtgaacgccgggcggggacgtgccgttctggggggcgtgtccaccggcgggggcgtgccgtcctgggggcgtggctctctgctccggtgcaggcccgcagggcgccctgggctgggagcaacgcgactgaccgtggtcgtgggcggacggcggctgcagcgtggaggagctggggtcgctgtgggtcgcgaagcagagcccgggacgtgcgcgcttggtgcacgatcctgaaggggagctccgaggggcccgggtcgccagggctgctgcggccat

SEQ ID NO: 37421 - DNA, 2300 bp, Homo sapien
tgatagaagtgatgcagctgggcgctgtctccaaaaaaaaaaaaaaaaaaaggaaaagtgacggatgctcccctcactccaccccctacccattacctaggacaaagccagacacagatcctccaattcccattcttcacctcatcaatgatgagccagtcaatagaaataacacacttgttaagcaaacttggtgaggctcctctcttcccccgaggctgaggacttttggcctcatcttagcctgagtcagtcccccctgagaacaggctggccacggggtcaaccttctctgatctaatgtcctatgaaggcaggttctcatcccacttctccattcccagttcattctttctctctctttctttttctctctttcttctttctttcattcattctttttgttgttgttgttgaccgagtctcactctgtcgcccaggctggagtgcagtggcgcgatctcggctcactgcaacctctgcctcctgggttcaagcgattctcctgcctcagcctccagagtagctgggattgagggaagagagagaccctctcatattgttttatattgttttatactcagtacctgttttaagaaaaaaacaaggaagtgaaatcaaagacaggcagcccggcgccaggcccaaaaccggacctgggcctgcctggcctaaacctagtagttaaaaatcaactcatgacttagagaccgatgttattcatagattccagacattgtatagaagaacattgtgaaactccctgccctgttctgtttctctctgaccaccagtgcatgcagcccgtcacgtaccccttgcttgctcaaatcaatcacgaccctttcatgtgaaatctttaatgttgtgagcccttaaaagggacagaaattgtgcattcggggagctcggattttaaggcagtagcttgccgatgctcccagctgaataaagcccttccttctatagctcggtgtctgagaggttttgtctgccgctcctcctgccacaggattacagtcgcgtgccacccccgcccagcaaatttttgtatttttagtagggacaaaaggcccccaggcccctgcaataatggtcctcataacaccactcctccccgagtccagatttgctttatatttggcagtggtcacaacagccctccttgacaaggggctgtttaaacacaccggactgtgatttaaaggaaaatgaggattctgggaagcacttttgttttaagaaaattatttttttagcttaaaagaaaagagaaaaagaactgtggcgtgtgcctatattcttgagaggaaggaatgaaaggagccggaaagaaacaaataagtcgttagggaaaaggagaacgagaataacaccatgacctgtaggaggtcctggaggagctaaggaggtgtcagccattttccccccccatctgttccacaggtggcattttattgagcaccgactgtcccccatccactgtgctcagtggcagggactcaaggtgggcaaaatagacatgggccttgccttgcagtctagtgggaaaaacagattaatcatttaaatattttgtttcaaagaatggtaatgcatgcaggcaaggtccaggcctgtgggagagcaggctacaggcccacctgctatttagacagttaccagtggcagaggaccccgaggaaggcgcagtttactcgacgtgtaaataggaatagccttaactagctgtgggtgtgcggacagggaagggaaagaggagaaacatctgcagagacaatgccgggtgcacagcccgtgggcggggccgcgggtgcaggggaacccgtgcctctgaagggctgggaaggccagggtgttgggggaggagaccgggcctatgggactggccctggctacgccaaggtggggctgacatgaagtccccttcatccgtggggggtggcccgtccctctgggaggggatccctcacaagatgacttcccaggtcgcgccccgaggcggctctttgctgcccccacagagatgacttccgggctcctggggcccgcggggaggggcaggtgaggcccagggctgggtgagggccaggcccttctaggaatgttggtgctcccagcacctagcaccgggagactggagaggtttccaggagagtgacccgagtaggtcccctcctaattctggagccgtccctcgggctgcgcagtggagcgccgaggtggcgggaggctgcggggagcctgggcggccaagcaccatctgcagtcaggagctcccgggcagcttgcagggcgca

SEQ ID NO: 37422 - DNA, 2300 bp, Homo sapien
atattccatttactgaaaaaaatccacatataagtgtactcacgcagttcaaactaatgttgttcaagagtcaactgtataaaaggtattaatatgtctggaaagagatatgtttccaatttaacagacactaccaatgagaagagttgggctaggcaggaaacttcaaattttccttttttactttatatattctatttgtatctcaacttataacctgtggaccacgtttattagaagaaaatgcagattcctgaaacttcctgcagaccccatgagtgacaatctcagggagatggagttccagaatctgctttttttcatagatgtttctttgccattcctgtgtatatctgagtttcagtagcactgctaatcaattgtttggggttctctctccttcaccagcatgttcttgcaaaactaaccaaacacatataaagcgcaaacagtacaatagtgcactgcaccttcatgacccttacctgttccagcctcttcctacctcttccacatgtgatatgtgtgtacatacccacagacagaaacacagagacatgtttggaagccagtgtggatgccctgtgatctgtgtgtacacatgacaagtgcatacacacgcacataaaggaacccagagacgtgtttggaagccagtgtggacaccctgtgatctgtgcgtacacatttgacacctgcgtacacactcacagacagaaacacagagatgtgtttggaagccagtgtggacatcctgtggtctgcgcgtacacatgtgacaggtacgtgcacgcccacatacaggaacacacagaggcctttggaagccagcatgggcagacaggccctatcccaaagcggccggcaggcgtctcctaagaatggttctcggacacacctctgaaaggaaaatacaactcggcaccgcagttgactcggccaaaggaaaaaaacttaagctgaaagctgaggcctgcccgaaggagcctttcctgtggcgcctgagccgagggcttcagggagagggccgcgcatcgcagcgcagccgcccgtcttcccgtggcttccctacggccgcggctcccgctgctcctttccgccggccacgcgggtcgcacgaccttcccctcccgcccaccctgaggcgctgaagccctcgacgccggcctcgggaaaggcgcggccaccgcccgtttcggattcccgtttccttcctccgggcgcgtccttcaccgtggccaaatcagcctctcaactgctggagcccggcctcggacacttctcggcttacgccgccatacagtggcgcaccccgaaaccccggaaccgacagctcggctggccttgcgcacccacactctccaaggcagggctcggtccgggggctggttttgccaaggcgaggggcgaggggcagcccaggcggccggatggataccaagagggcgcgtcagctccggcgggacggggcttccagggcccgggaggggtccaggactccccgccggcgcctggctgtcggcggagggccgcggggcaggagggagtggagactgcggccccagttcgggcagcgcggagcccacccaacgccctcctcggccctcggctcttcctggggccatcccgcccctgcacctcggcctggcacctttccggttagcctcggaggccgtggccgagcagggtgcgttcgcctggctggggggcctcagaacgttatttccgggtgacaacctgcagggccttccgcccctcgcgacctctcgggagtcccttccccggcgcccccccggggctgcaggggctgcaggttcggtctcggggcctccttaccgcagtccgcccggctttaggctagtgggctttaactacgtcgataatatgactccggcgatcttgtgcggcgatgggatgcggccgtgggcggtggagtccaggcggagtccgctctccacacgcgagggcgcctcctcctcaccgctcgccggcttcaaagctcgcgcctcaggcgacggcagccaacgggttgccggctggaggccccgccgacgccccgccccttgcgtgcccacccgcgccccgcagccccgcccccagcgccgaccctaagtttcggcgctcagtggtccggcgctccccaaggctcggtgtccagcgtcaaccccgaggtctctatgccccgcctcccgacgccagggggcagggccagcgcgctgcgcgtcggggcggggctttggctgcgtcggccgcgtagcccgcgcgcggagcgtaccctgctgcggccgttggccgttagc

SEQ ID NO: 37423 - DNA, 2300 bp, Homo sapien
tattaaaagcagaatgtgagtaaaggaaaacagtttactcctaatagttatttaaacatgttttcaagctcaaaagaaaagccatcagaaaaggaaggggtcaaagatacagtaaataattaaagacttgaaagtatacacaagacagagtgattattcttggacaggacagagcctcttcttctaaagcagtaaggaaagaggtacagataaacatagacacaggtaagcattttcacaggtgagcaatagattgagggacaggagaggaggacataaagttaggatctaatggcttctaccttccctgtggaggaagcaacaagaccatgtgttcagagagaaggaagcaggggtgacatagaaggctactgcacagctagggtgaagaagagagctgctgggcctgctcaggacctaaccaggttggtacctgccaatttgcaacatcagcaatccacaggattgactgactcttctccaagagcacatatgtgcaaagtgggaagagttagtttgctgggttaaatgaccactgagatttcttccagaccacgtatgaccgttaaggcaaggtaattaggggtccagacccatagggtccagagcaaaatgctgccaagagaagactgatgcctgcacagacatggaaagggcaaagaactgaagattttgatgaaattagagattaggtatacaggtctaaagaagtgagaggacagtagactgatttgtcatacagcaagagtttaaggctttgatgatggttctattcttgttgacaaattccagaatatttactcaggatggttggtgggactccgaaaaagttaaattacccacttaaatatagagtagtggctgcacttttaaaataatcgctgtctttttcattgtcaaaataattgagtggtcagataattttgggaaaagttgcatactatataccccgtttcatagggattaataacatattagcttactaaaggatctgagtgaacctgcacttaacacattgacaatggcaccatttcttcaagaaactcctatgaccatttgtttcagattaagcattagtatcagagttactgtggtaccttaagattacccccaaattcaaaagctacacgaaaaaagaataattttggctctctctcaatagtaatgtaatccttaacagttcaaaattatccctagctatatgttactataaactatttttaagacggtttttaatgaataagaaattaagtattaacgaatacagccatgttaaaatctggaaacttcatacctctactttttcttgctcctctagtgctaaaaacacagctgctcggagttcagccttaaaaaaaagttaagaaacaggaaattataatttcaagacaattttcacaacaagctcacatttatccagcaacaaacacgagcaagccaacgagctgggagggcaggtgcaaaggtcagaaacgccttccgaaacgttctcagtcacacaagctctccgacccccaggcttcggctggacgcgctgctttcccgccgcggatcatgcccgagcctgaggaagagacgctggggccgcactccagggcccagctgcgggccgcccgtgtggcccccaagccccgcggtcccgcccccacggaatgaggcaggggatgggccaggcacccccagtccgcggtgccctccgggaccacacgaacgaacgagccgaccccctctgtggggcgggcaggacggaggccatgccggggcgcgcccccagtgcccgccggccccggtccctcgccagggaggcggcctcctcgccgcgaccgttgtgacgcccgctgtccacgcaagccctgcggatccgccaggcccggccccagcctccggcctcaccttgatgcggttcaggaccccgctgttctccagcgtctgcaccagcaggtcccgcagctccgtgtcctcctcggccaccactgcggccgccgtcgccgccatcttgcttctccaagacaaccgccgaagccgcgctaacggccaacggccgcagcagggtacgctccgcgcgcgggctacgcggccgacgcagccaaagccccgccccgacgcgcagcgcgctggccctgccccctggcgtcgggaggcggggcatagagacctcggggttgacgctggacaccgagccttggggagcgccggaccactgagcgccgaaacttagggtcggcgctgggggcggggctgcggggcgcgggtgggcacgcaaggggcggggcgtcggcggggcctccagccggcaaccc

SEQ ID NO: 37424 - DNA, 2300 bp, Homo sapien
atattttcacttgacggttgatgaggtgaagcgctgttgtgggttgagcatctgtgcacatgcatacacctgctgtgcacacgcatacacctgctgtgcacacacatacacctgctgtgcacacgcgtacacctgctgtgcacacgggtacacctgctgtgtacatggaggagccactgaaactgctctcagcgttttcagtgctttggttttaatctgcaaaatgtgttgatgacaaatctttctcctcttcctgtagatttttttaatagtgaagtttatttggaattaagtttagtgaattcattaataacctagttggtaatggtcttttggcaaaaatgagccatagttataaagtagtaacatgttactgtgtggtttagaactagattttgagagcagttccaaagcagattgtttcagaatttatttttactccctggattaagagaactatatttttaaaataattctgttatgtttacaagtatgtgttgtgtaatatagtaatgcccttctccgtaaaacttgtcttcctaaaactggtctttctgtctatagcgggaatattggtcaaacctgtcaaataatcatggatacctactagttgctcagctttgatactagatagttcattatgtggatttaagttacattggcagtgtgaattcttggggaaatcagaataattattgtttctcataatattgctttacatttacatttttcagtttctgtcatgccagttattctttggcactttctcatgagtgtttagaaggagagaatctgtcgtggccacaggctgtgtcattgtacatatgtttaaatatcacatcagggtatttatttccaaatgcatattcttttaaaaagacataaatccattattaaaacagtgtaaaaatcagaaattacaactgctgtgaattacataatatttttctatatttgataataccaggaaaatgtcaagaaagttgttaggaaatttttgaaagtttccatccctttgaaaatatgttgtctaaaattataacttgctatttattttttcagacatctctttataatcattaatttatattaataacatggaatgtgtagctctctagaaggcaataaaatttgcacagcatatatcttgcctactgtcaactagtcaagacctctacctggtgtaaagatgtaaacgtatatcataagacatgcataatgcattctgtctgtacccatatgaaaagtgaaaccatccttcaggagcgtcttgttcggtaatgtctaacccagactttggtcaccatgcttcagtagttactactctttaattctttctcagccatccatcccttcctagatataatttgatctgaaaaatatgaatctagttcaattcttgaggaaactcatgcctaggaaattaatttacttaagattacacgggccatgtatggtggctcacggctcacgcctgtaatcccagcactttgggaggccgaggcgggtggatcacttgaggtcagaagttcgagaccagcgtggccaacatgttgaaaccctgtttctactaaaaatacaaaaattagccaagcgtggtggcacgcgcctgaaatcccagctactcaggaggctgaggcaggagaatcgcttgaatctgggaggcggaggttgcagttagcccagattgccccactgcactccagcctgagtgacagagcgagactctgtctcaaaaaaaaaaaaaaaaaaaaaaaagattatacgactgggtgtagtttgtgcttgtaatcccataaacccagctacttgggagactgaggcaaggaggactgcttgagcccaggagttttaagaccagcctggatgacatagtgagagcctgtttcttaaaaaagaaaaaaaaaaaaaagaaaaaaaaatggagttaataattttggactacattccagattccttgtttcagttgagtgctttttctattattccacgggtattttacacaatactgctctctttagtatgcaaggctgaattttgggaaattgccatttttaacccataaagcccacaaattcattataatttagcttaatagcataaatattgagttaacctctggaagcaggctttgactttgatattgacctgaccacttaactctctggagactttgacaagtgacatcaatgtctgtctctgtgtttcctgatttatatccacagatagaaagccatctccagatcctagggccattttcaagattcagtgagataaggtgaagcatttgaatgttctcc

SEQ ID NO: 37425 - DNA, 2300 bp, Homo sapien
tggcttttcttaggaatgaacttctgatgttgctgtggaattttctgcctggaaacttattgttatgaaacatgtgactgtaagccacattcctcgccttttatgcacctcacagtgtctatgcaaatgaacagtgtgattttaaatttgaggaagtttcaataagagtgagatctaagaggatctttaatataggggcatttttagagagctaaaaaccaaataggtctcagctttctcagggtgacatataatttagatttgacttggaactacagaaggaatatggggcaaaggacatgagaaacattgcagaggtcagtgccatatggagcttccacctcagctctcgaagtaaaggcaaccagcccaggctgggagccagtcagcagcagggtctcaatctccatccactaccttcccctctggggcagggagggtgttgcagggaggaggccactcttggagacctccagatccctgcctctgtgcagtctaacagaaggggcccccacagtggccatgaatctctttgttctgcaaggaagggggtgtcattgggcctcctgggtccctcagcatctgcgtggccacacaacgcggttttgttcaacacgttacatttctgcttaattaatgttcatttttggtccccagcaaagtccaatctgtttttcgttttctttcttttctttccaggcaggcattgccagggctaatcatctataaaagggcttactttcttaccttcacgctaagcaagaccatccaagggcagtgttagagggcacctgagaacgcaggaggggtgtgttacctggtggcctgtttcttcctcctatgggcagcccttctacaggaagcagaagcctcaggggcgatggtagaaatgaggaggaggggatggagctgaggtagcaggggaggggtcgtaagagcagaggggagggtcttgctttgttcgccatccaataatcagcaggtttcgggttggggtgaactactggggaggagcgccccagggcttctctcagatggaggagggacaggtcacccagagtgaaggaagttgtgagctctgttagaggaaaacagccaggacttagtcaggagaggctttgtttggaaggattgttgtaaggcagggagaggaatgatggcagcaagaggaccccgtgaccataggtctgcaagcacttcaaacagaaaaggcccttcttttatccagtaagggggagccactggggccagcagagtctttggaggggaccctggacaaacccgggaaaatggccagtggggttgagcaggacacaggtcctgctgtgtctagctggttccccagagagatgataaggggtgcgctccagcttctcaggctcactcaggcgtgaggacgtggagctcagggctctgcaggaaggagcgacccaggtgaggtgtggtcaagatagagcagagctgggcagcgggcagtggagcctcgtgggcagcctgggggtggggaggcacagtgcactgggaagtggagaaagtgtgagtccatcaggctggctgagaattgatcacgaacctattgtctgtaaaacttttgttatttcctgagacgtggttcacagcaacccaggtgcgaacagccttgtgattctagggttcttttctattttttaagcacttgcatctacaaataaatttctgagtgacttgtcgtcagctgctttccttgatatgtctaaagacagggcagtgacccgcatcgtcacccagagattctgtctctgtgccacatgaagattaggtgcccgcttttgattgaggagctcctctgttgctctcaaagtatcttgtaataatagctgagatgcatggagaaccacctctccttcaggcgctgctcctcggcttccgtggacgggcatggctatttctcggaaccctctgaggttagagctgtcatggtctttcttctgaaagaggaaaccgaggcttgctggggctcagtggcccttctgtggctgcacagctttcggggtggggccaggactgactgactccacacaaaagtgctcccggcccatgtctttaactcacacggcctcttgcaaacgttcccaaatcttcccagtcggcttgcagagactccttgctcccaggagataaccaggtaaaggagtatgaaagtttgggtacaaactcattgctgcaaattgaaaaccatgcaaaggctgtcttcctctggggagttcaatgcctctctttttcttatcactttaccattggttggactttgattccaggga

SEQ ID NO: 37426 - DNA, 2300 bp, Homo sapien
gcttggaggactctccaaattcacctccttagaaaacaaaaaggcatgcggacttgtatgacatagaaatgggatgatatgtgggctggtagtcccatttttaaaaataatggaataatgaaagcaagaagaatgcaagtcaaattaccttgatatcatacaaatcacagccctatgggacttgaaaaagagtgaagcctgaccattagccataggactatagggaagctgtgaatccagttctggttgaaatttgggctgggagggtcctggtcccaccacttacctgcctgtgaccttgagcaaattacctaatcttaccatgcctccatttctttactcataaaatagagcttaacattgtacctacttcatctcactattgtacggttcattgaaataacttaggccagcactaacaatgactgacacgcaatgaacatgcagtatactttagtaataataattattaaagccttaaacttggatactataattgaaggcatcaaaacaccatagaacggatatttagtacaaaagtgttttatcgcgttaagagataacgaatagttttttaaagcctatgcatcagagaggcttaataaatactctagtaaaagcatcaagctctcacaacacccagacatggcgctaagtgctttacctgtaatagtaccttgactactcaaaagaactcttcaagaaggtgttaccatcttcacctctcaagtgaagagcctggagttcagagaagttaatttgctttcccaaaaccacactgctaataaatggagaaacaaaaaattataactaaagtttacttaactccaaaattcaaaccaggctgaatggacccaagataaattagagtcaacagtgggagaggaccaacttaaattagagtcaatatgggtaagacctatgatgaagtagggtcaccagttggtaaggatcaagatgaagtaggatcaagaatggttaggactgagataaattaggatcatcagtgggtaagaaccaagatgcagtaaggtcaaaagtgggaaaagatcaagatgaagtagggtcaacgttgagtgaagaccaggatgaattagggtcaatagtgggtaaggaccaaggtaaattagggtcaacattgggtgagaaccaagtataatagggtcattgatgggtaaggactgagatgtattagggtcatcagagggtaatgatgactgcacacgtttattcatcaaagaaatgcttgttgataatgctgtgtgccaggcattgtctgtcactagcgacacatggatatatggagtatgtccctggctgatgaacctaactttctagtggattctacgcatttttacaagccattgatttttccatgcttccagggcccactccaggccctgctggtccagatcccaatccaagtggtgtactaggtaggaaagactccagcagagaaaataaaataaatttgtatttaacaaaacacaagtacaagtgaaaccatcagctatggaatgagcaggttgtctcaaatcccctttcaagtttaagtgtggggaccacatctgaccagtgtgtaaaatcaagccccatgcagaaggatcccagcaagcgtcctttatgtatgaaaaggaagaagaaaatttccccatgaaacatattcaaagtagagaacaatctttttgattccattgttattttaattgtatacagacataggagtctttgcataattagacttttccttctttcaggactgtggatgcaaagccctggacccccagacgttataggacattactcctcagctttgcagcccggtgatgtgaagcgaaacaccatttccccttttttatggcggaagaaaacagaacacaactgcaaaggggcttttccctcccctgctcatcctctttccccaaatgaattttggtttgctgtggactctattctgctgaggaactgttcttgttgggcaaatgtagatcttgtctactctgtggcaggaaaaggccttttctttcattttgtaagaaagagcacagagttcctcctgtacctgctccagctgtgcctgcagcccctcacggccgggtgatgccattcccaaactgctcagcccccagcactgtggtggccacagctgtgggtgtcttgctggggctggagtgtgggctgggtctgctgggcaacgcggtggcgctgtggaccttcctgttccgggtcagggtgtggaagccgtacgctgtctacctgctcaacctggccctggctgacctgctgttggctgcgtgcct

SEQ ID NO: 37427 - DNA, 2300 bp, Homo sapien
tgacccgcggccacgagtgtttgctgcaggacgagaatctggggaagatgcagccaagaaaatggcctggccgggccgggaagagcagcccacagagacccgcagcacagagagggatgcggggagcctgccctgggagccaccccggctgaggctcaggaggggagctgcgaagcctgaaacccatcgatgatggctggtgatgaaaacatgtgggtggacctgctttgatggcgagatggacaggtctgagctcacacatcctcgggaaaacaaataaaactctgtggaaatggacatgagacactgggccctcattccccaacttgtagagatgactgagaaaagcttccagaaactcgaggacatcacaacttccagctgggtcaaactcagggtgctgtgaggcctgggcagagagacccccagggtttcccagggatggcggagtctctggaggaaggagacaccatgaagatggggatggaagctgcctgccccatggagaggggagggggccggccactctcacccctcgaacaaaaaccgggtggaacctgagaggagcaaagaaacaaacacaaccctcacacacctcaggacacacacacaacacctcacacacctcaggacacacacacaaccctcacacacctcaggacacacacacaactctcacacacctcaggacacacacataaccctcacacacctcaggaaatacacacataaccctcacacacctcaggaaatacacacaaccctcacacacctcaggaaacacacacaaccctcacacacctcaggacacacacaaccctcacatacctcaagaaacgcacaaccctcacacgcctcaggacacacacacaacacctcacacacttcaggacacacacacaaccctcacacacctcaggacacacataacccctcacacacctcaggacacacacacaaccctctcacacctcaggacacacaaccctcacacacctcaggacacacacacaaccctcacacacctcaggacacacacaacttaacacctcacacacctcaggacacacacaacttaacacctcacacacctcaggacacacacacacaaccctcacacacctcaggacacacacaactttcacacacctcaggacacacacaacctctcacacacctcaggacacacacacaacatctcacacacctcaggacacacacaacccctcatgcacctcagaatacacacaaccctcacacacctcaggacacacacacaacccctcacatacctcaggactcacaacacctcacacacctcaggacacacacaaccctcacacacctcaggacacacacacaacacctcacacatctcaggacacatatacagcctctcacacatctcaggacacacacaccacagcccctcacacacctcaggacccacaatccatggttagaatgacgcgcagggacaaaagtgcttcgtttcctctttgtggtagtttcttcgttcattcacgacgtcggtgtttactgcctattgcaagcgagtcgcttgaggaactatccgagtgacacacagcacaagcagcctcaggggagccccaggtgtgctctccacaggcagcaccgtggatgagaaggatggccagggcttaacaggaacatggaccctcgcttgtgcctcattctcttctctatcacaaaaatcacacgacaattcagatggagatgcattctgtgaaatgatgaaaatttgaatcctgtctcctatttaaactcacatatattattttcccttcataaaaatgttttttctagtaaataatttgacatccaaagagagtttatatttcttcaagaatgtatgctcagagaaatgagctcttactacacgttgggtattgaagacttgatattaaacacatggtttttgtcaatggggaggagcagtttgactctctccagtgtcctttgtggatggatggactccactgacaatgagctcctatgttagaattgcgggtttgggatgtttaattattatctgagctggtccagtggtgatgctgagtgggacgctcatgcccctttaagacagaaagtccgttggaaccgtcggctgctctctggtctctggagatgaggcgggaggacttggggacagctgtggggacacggcccagatgttctggtcccagcagaagtgactggcggggaccaggtgaggtgatgaggtctggtagtggggctgagggaaggggtcttccccagactgagggggtcacaagttt

SEQ ID NO: 37428 - DNA, 2300 bp, Homo sapien
cagcagagcttctgtacccaaacacacacatcccatcagctcctcaccacacagtttcacctccctgggtgagcatggtgctccccggagtcctgcgtttttccaaggacatgggtgcatgcctttcaaacaagatcctaaaccacagcacttcctgctgtagggcagattccaagtcctgccagctgcttccctctgagctcactcatggcagcaaatgtctggctggggctgagtggactcgggggctttgtttccgtgggtgccacccacggaggtgatacgcgtggcgctctcgccacatgccatggcccgtgcgtctgggggctcgcagcctcccacgatccctgcttctgcactgcggtcttgcacctgctgcttgtcagcgtggactcctctgaacaggggctgtgccacttgcttgggggccacggtgcaggatgctattttgtctccaacacatttttccttgttaaaattagctcctctttagaaccttctgctggccagtgtgtctcttcccatcctagctttgtgtcaccctcacactcggggggcaaatctcgtgagtcctcagccagcaactgatactgggtcgatgtggatggagaagactgccccccaactcctgaagatgatttatcccctcgcttctttcccaaagcaactgctgaacagataacactttattccctgaaggaagatcagaaatctactccaagcatttgtcacaagtaggaaaatagtcctttcagatcctatgagtacaaaacattgaaagtcccaggacggactgcataggtccagcctcctgtgagacacggacttctctcacgcttctgcattgacctgagttaatcacacgcgtgctgggcaatgtacgagtaaatagataactgaatgggtggcttatccacgcctccaaaccctgaatttttaagcagcagaaaaggtagaacattattttcattatgcatttttgaattgagtttcaagtactttatttcactgttgactattctacaatgtcagccataccgtccctgaattcctcaagagcgtggctgtaaaatggggaatgagagcgtggatgcctcatgtgtccttctgtaggaagcgggggtagaatcctctagattctgtggcagctggtgtgatgtgttgctcaacattttaaaataatatgatggttattaatgcaaccacatttattttcagccaatgagtttaaagacagaaagaattaactcggggaaaacaccaccacaggaagatagagagaaaagtcctcccgggagacgtcaagacagaagtccagcacccactggaaggccgactcccggtgcagaaagacgggaggtgtctgaagacggaaaggtgacctcggaaacctgggtcactctacactggcagcatggaaaattcagattcagatgaagttccacttaggtctcataagagtactcaatttgttattcgaaatagacctagtaatttattaacctaattatgtttctatagataaaactttgaatttctgcagacatgtctttaatgctataaaagcaaataaattgaattgggttttaaaaagcaaacaacttgaattgggttttaaaaatcaattacttgcccgagctccgtaattggtatatttctgcagagtctttaaaagaattgatctaccttgtagtgctgagctcagggctgttgggtgagccctggggtcttgctggaaattgtggatggctgaagatggcttcgtgctcccagcctttgggctcgaggcattgccggctgcagggaccttatgacaagggaggcctctgactgtctttgccccagattatgcatccatcttcccgaagtctgcaaaactccggtggcagaaaatcaccagtgcaggcttcccaggccgccacgctgcaggagcagacggcagcagccggagttgctggtgagcagggtagggggctcctgtttccatgcttcctgtaaagtggggggctttcttgtggatacgcgtgagcagaacatcttactacggcaaggacatgtccttcatggagctgcctaatttctgaccacttttgtccgattccctggttgggtcctcacctgggagtcttgccgacacccctagccctccaccccacacacagcccacatgccggtctccaggggccgtggctggagattccgaatcctaccggccgcttcccctgagtacactcccagctgaaggcgtctggctgggcctgggcggactcgggggctttgttcccttttctccgtttgcc

SEQ ID NO: 37429 - DNA, 2300 bp, Homo sapien
ggaaggcagcctcaggggtcgggtaagataagagtgtccctttgtttatgacgagaccactgggggaccatgtctaagacctgccctggtcacaggaacactgaggggtgctgggaattatctcctctaagagaagcattttattctgctacagagaaaaggcagagagtgaaatatactgttcatttaaaaaaaatcccttttaacatagataaaggggaggaactgggaggaaaagagagaaaaagcagacgtaactgaagccatggtttcagaaattcaatcctagtagaagtgctggagggacagggagggtgtggctgggaaggatggaaacagaccaggtttatttgtgcacaaagggaagctccttagaaggcataggctggtgaaggggaggggaagagcagcctctggaaacagcccccagagccagagagcgagtcctagaggatggggctggtgagttgaagcaaccaagggagaaagaccagcagacagtgcaataaaacatcaggaaggtcctctaatatcaaaatacaggtcatccatgggaactaatgagaggccagaactgaagtaaactaaagtgttgccaaaaaataaaaataaggtccaagttgattgatcgataacacggttagtatgaagaagtccacattatgctaatttctttacatattattctaatttgtattgtctctgaaagtcaaaatatcatcttagtcaattaacatttattggtgataacatttattggtgaagttgaaccatatatgtatcttgaagttaacatttttgctatatatcgggtgctgttctaggggctttcaaaattatccaagtcttgaacttttgcaaccctcctttttaaagaggaaacaggttcggtgactcagtgacccacctgagatcacctagctaacaaattacaggattagggtgtgaacccgtggagctcatctgtttccatgctcagaatccctttgctagactgcgtggctcttatgtctatgtaagcatgatagtccatgtttagttaatataaaaagctattgttttcataaaactttcattttcactgaaatacattaagtgacaagaactttaccccatttatcattggccctgatcttctgatggtctggcaagcttccctgagtagtgttgccaggatgctagacttacctgcgagatttgccttatagatctaatctagacagaaatggctgacttcacagaactttggaaacaatctgcagacatcaagttttacttataattgaataaaaataatttttcttgcttattagctatgacatttgtggtaagttgcttaaagctccagacttaccccgtctaatacagttgtctctagccacatgtggttaaattttaattgtaattaactaaaaggagatgcagttgtgaactcattttatcagttgcacttgccacatttcagaactcaatagtcacatgtggcgagtggctaccatactggacaacactgccccagaccaaaataccaaatcatttaacttttctgaagctgtttcctgtcttataatgggtctaagatttctaatgatcattagcatagcactattgttggtaacatgaaataatgcatgaaattctttgcatattgtaaagtactatactcatgtaagttgttttttcttttaataattgctgtactgtgttgtgaaactgtacagtctttgcaatactaagactttggccccaggatcttacaatcacgttagctctttttcagaagttgaactatgtgtcttgaagttgacatttatgctttgttctttaagactgaagtcctcattctgcaccactgacaacttctgacagtttctcttactgtggaaggttctattctatatacacataaaaagtgaaacatatcactttaccatctggaccatgtctattagaatttaataggaaaaaagcgcaattaactagaagctggtaagagtaatgatcttttgccccatacaaagtggacattgtggatcacagagaaggtaaatgagtaacagagctcccgtatgcttcatggggtcagtgataaccaagttcattaacgagtgacagtcttaatgactaacacacctctaacatttcacctctagctcagatgagagagagaatgggacttcttggtactgattgtttttcccatgcctcaattggtttcttttagggagctacaaatttacgtgttcactggtgattgatcttttcatccagcacaatggacagaagtctaaggaacgtcc

SEQ ID NO: 37430 - DNA, 2300 bp, Homo sapien
agagggtagaaggggttctccttccatcaaccacctgggatgagagtcttgatgctcactggagggataggataggggtgtcataaaatggagaaaattctacgtattggtacagagttttcttgcactttgccaaaattatagatgtaaacatcataatgaatctaacctcctcttgattccacaggagggtgcgtaaaataagtgtgttctggtgccaacagtgggaagcgggggatagatttatgccataatagtgggcatttgtgagttccacacaacagaacatagggagcccccaagcacgctgactgcagcacgaagccagggcgggaggagacgctggaccaacactgtggtgggatccagtgctcctctgggttgggtctctgacgttaaagtccagaatctgtgtggtcagtccctaggaggtgcaaagcccatctccaagcctttccatatccagtaaccaggagttaggtggagaactgaagccaaggagaggagtgagccccatgtgaaatcagggaaataatcaaagggaacaacaaatggtttggggaaatgtgtttgcttctagtgctcacttcagacaaaaatacatttttataaaaaatgcacaccgcatatttttcttgccaaaatgcccctaggagtctcctctagtcttgatagctttgcccttcttctgccagatacccaagtggagagtcagcacgaagtctcggaggtgcaggtgtaacatctccaatggaagggacagatgaaacatggctgagtaaatgcatgatttacaaatcgacacaccagtgatctgagcccaggtgctcttgcttgtgccaggattgccttccctgggagtgcaggaagcccagataaagtaaccccacccacccacccttcctcgcacgctcaggaagacagtcctggtggaagaacctcatttcacttcatttttacaaaatttaccccaccacgtgctgggagaaaaacaataaataattaacaatgcatgaacatgtcaaatggaaaaagaaaaatgcctttcagattatatcttatgaatgacttttgttcttggtttgtggataaggaaattagccatgtttccctgtgcttgacagaacttgggcaacctcctcagcagcttggtgtgcagtttttatagagttacgtgaagcaattgattgtttctggaagacggtggcaatgcctgtaatcgaatagatggcaataaagcattcaactgtcatccacagaggcagccacttgccagagccaacatgtgccgagggtagagagtctacggctctgagacgcctggcaaggcctctccagttcctgcagtcctgaacctcaggggtggtggccggaggccgttagattagcgaggacacagcctgagctggaaggaggggtccaactgggatctctgacacaaacatggcttaaacaaaaagacacgtaattcattttggaatctcaactgcttttgtgtagacataactttttttttttttttttttttgagatggagtcttgctctgtcgcccggctagagtgcagcggcgcaatcatggctcactgcaatgtccacctcctgggttcaagcagttctcctgcctcagcttcccaattagctgggattacaggcacccaccaccatgaccaactaatttttgtattttttttagtagagacgggatttcaactcgattatctccatctcctgaccttgtaatctgcctgccttggcctcacaaagtgctgggattacaggcatgagccaccgcacccagcccacgttaaatattaagattccatgcaggcgaagcaacaggagaacctggcaagaacagatgccaccccgccaggcagcccacaaggcctgccccctgtgtgctggccgctgaggcctgaggcatggggactggcaggaggcccactgggtcggagagagaactctgaagcttggagggaggaaggtgtgatgaagcctgggtccctgtccctaaggggtcctgacagtctgggccccaccctgagtctatgactggcttcccctttgtgaggagagcagaccctgcatcatcagcaaccagtgctccctccagcctccgcgcatttcagctggcgctgcagctgctgcacagagacccacagaggccaccctcggaaccagcgcccaatgagagggcgggacctgtgttcctccacacaaagccaggcgctggggtaagcgtaggaggcgacacgtaggatgggagggtggccccgatcatgcctctgttccaggacca

SEQ ID NO: 37431 - DNA, 2300 bp, Homo sapien
gagcttctgtacccaaacacacacatcccatcagctcctcaccacacagtttcacctccctgggggagcatggtgctccctggagtcctgcgtttttccaaggacatgggtgcatgcctttcaaacaagatcctaaaccacagcacttcctgctgtagggcagattccaagtcctgccagctgcttccctctgagctcactcacggcagcaaatgtctggctggggccgagtggactcgggggctttgtttccgtgggtgccacccacggaggtgatatgtgtggcgctctcgccacatgccatggcccgtgcgtctgggggctcgcagcctcccacgatccctgcttctgcactgcggtcttgcacctgctgcttgtcagcgtggactcctctgaacaggggctgtgccgcttgcttgggggccacagtgcaggatgctattttgtctccaacacatttttccttgttaaaattagctcctctttagaaccttctgctggccagtgtgtctcttcccatcccagctttgtgtcaccctcacactcgggaggcaaatctcgtgagtcctgagccagcaactgatactgggtcgatgtggatggagaagactgcccccccaactcctgaagatgatttatcccctcgcttctttcccaaagcaactgctgagcagataacactttattccctgaaggaagatcagaaatctactccaagcatttgtcacaagtaggaaaatagtcctttcagatcctatgagtacaaaacatcgaaagtcccaggacgtactgcataggtccagcctcctgtgagacacggacttctctcacgcttctgcattgacctgagttaatcacacgcgtgctggacaatgtacgagtaaatagataactgaatgggtggcttatccacgcctccaaaccctgaatttttaagcagcagaaaaggtagaacattattttcattatgcatttttgaattgagtttcaagtactttatttcactgttgactattctacaacgtcagccataccgtccctgaattcctcaagagcgtggctgtaaaatggggaatgagagcgtggatgcctcatgtgtccttctgtaggaagcgggggtagaatcctctagattctgtggcagctggtgtgatgtgttgctcaacattttaaaataatatgatggttattaatgcaaccacatttattttcagccaatgagtttaaagacagaaagaattaactcggggaaaacaccaccacaggaagatagagagaaaagtcctcccgggagacgtcaagacagaagtccagcacccactggaaggccgactcccggtgcagaaagacggggggtgtctgaagacggaaaggtgacctcggaaacctgggtcactctacactggcagcatggaaaattcagattcagatgaagttccacttaggtctcataagagtactcaatttgttattcgaaatagacctagtaatttattaacctaattatgtttctatagataaaactttgaatttctgcagacatgtctttaatgctataaaagcaaataaattgaattgggttttaaaaagcaaacaacttgaattgggttttaaaaatcaattactttcccgagctccgtaattggtatatttctgcagagtctttaaaagaattgatctaccttgtagtgctgagctcagggctgttgggtgagccctggggtcttgctggaaattgtggatggctgaagatggcttcgtgctcccagcctttgggctcgaggcattgccggctgcagggaccttgtgacaaggggggcctctgactgtctttgccccagattatgcatccatcttcccgaagtccgcaaaactccggtggcagaaaatcaccagtgcaggcttcccaggccaccacgctgcaggagcagacggcagcagccagaggagctggtgagcagggtcgagggctcctaactgtttccatgcttcctgtaaagtggggggctttcttgtggatacgcgtgagcagaacatcttactacggcaaggacatgtccttcatggagctgcctaatttctgaccacttttgtccgattccctggttgggtcctcacctgggagtcttgccgacacccctagccctccaccccacacacagcccacatgccggtctccaggggccgtggctggagattccgaatcctaccggccacttcccctgagtacactcccagctgaaggcgtctggctgggcctgggcggactcgggggctttgttcccttttctccgtttgcc

SEQ ID NO: 37432 - DNA, 2300 bp, Homo sapien
aggacacacacacaaccctcacatacctcagaacacacacacaacacctcacacacctcaggacacacacacaaccctcacacacctcaggacacacacacaacacctcacacacctcaggacacacacacacaacctctcacacacctcaagaacctacacaacacctctcacacacctcaggacacacacacaacacctcacacacctcaggacacaaacacaaccctcacacacctcagggcacacacacaaccctcacacacctcagggcacacacataacacctcacacacctcaggacacacacaactttcacacaactcaggacacacacacaaccctcacatatctcaggacacacacacaacacctcacacacctcaggacacacacacaactctcacctcaggacacacacataacccctcacacacctcaggaaacacacacaaccctcagggcacacacataacacctcacacacctcaggacacacacaactttcacacaactcaggacacacacacaaccctcacatacctcaggacacacacacaactctcacacacctcaggacacacacataacccctcacacacctcaggacacacacaactctcacatacctcaagaaacacacaaccctcacacacctcaggacacacacacaaccctcacacacctcagggcacacacataacacctcacacacctcaggacacacacaactttcacacaactcaggacacacacacaaccctcacatacctcaggacacacacacaacatctcacacacctcaggacacacacaaacctcacacacctcacgacacacacacaacctctcacacacctcaagaacctacacaacacctctcacacacctcaggacacacgcacaacacctcacacacctcaggacacacacaacccctcacgcacctcagaacacacacacacaacccctcacacacctcaggacacacacacaacaccccacacacctcaggatacacacaaccctcacctcgggacacacccacaacacctcacacacctcaggacacacacaacctctcacacacttcaggacacatacacaacatctcacacacctcaggacacacacaaacctcacacacctcaggacacacacaacctctcacacacctcaggacacacacacaacacctcacacacctcaggacacacacaaccccaaacgcacctcagaatacacacaaccctcacctcaggacacacacacaacccctcacatacctcaggactcacaacacctcacacacctcaggacacacacaccacagcccctcacacacctcaggacacacacacaacacctcacacacctcaggacacatatacagcctctcacacatctcaggacacacacaccacagcccctcacacacctcaggacccacaatccatggttagaatgacgcgcagggacaaaagtgcttcgtttcctctttgtggtagtttcttcgttcattcacgacgtcggtgtttactgcctattgcaagcgagtcgcttgaggaactatccgagtgacacacagcacaagcagcctcaggggagccccaggtgtgctctccacaggcagcaccgtggatgagaaggatggccagggcttaacaggaacatggactctcgcttgcgcctcattctcttctctatcacaaaaatcacacgacaattcagatggagatgcattctgtgaaatgatgaaaatttgaatcctgtctcctatttaaactcacatatattattttcccttcataaaaatgttttttctagtaagtaatttgacatccaaagagagtttatatttcttcaagaatgtatgctcagagaaatgagctcttactacacgttgggtattgaagacttgatattaaacacatggtttttgtcaatggggaggagcagtttgactctctccagtgtcctttgtggatggatggactccactgacaatgagctcctatgttagaattgcgggtttgggatgtttaattattatctgagctggtccagtggtgatgctgagtgggacgctcatgcccctttaagacagaaagtccgttggaaccgtcggctgctctctggtctctggagatgaggcgggaggacttggggacagctgtggggacacggcccagatgctctggtcccagcagaagtgactggcggggaccaggtgaggtgatgaggtctgttagtggggctgagggaaggggtcttccccagactgagggggtcacaagttt

SEQ ID NO: 37433 - DNA, 2300 bp, Homo sapien
ggacgcaggaacccccacatccaagtgccaggcagttccgtggctgggagggctccagactggtgtgtggatggcaccttctgctgtgtcctcacatggctgagagatgggtcatctctgttcttatcagggcactaatcccattcacaaggccccccatgacctaatcacctcctaaatgccccgcttcctaataccagcaccttggaaaatagggcttcaagatacaaattttgggggactcaaacattccatccatagcacccgctcatgtgctgtgatgtccagtgagcaggcggagttccagggctggtcagtgccaggtgctccttctcccacccgagaacaggggccaggttgctcctcaggcaccctgggcaactgccccttcccttccagtggggcctgacctggctaccgagcttggcagctaataggcgggcccctcagcattcacgctcctgagctgctttatcaaactaggattgttcccccaggtctaagaaaaccatccattcactgcaaagttatttattactgcggatgggctaggagttagaggaagagagtgactcaaatcacaacacctcctggacgaagctggaagggattaaaatacggcctaatttctcccttgctgtgtgaagcgtgtggttctcctagaacatcagcccgactgtcgctgggtagcggcggtactgttcattctgcattagctttgtccagattgttcagtgtgggtccctgcctacagatcttgattccttgagattgccctttgtgcttctgtctggggactgcctgtttctgtaatggccaccgtctcagaacacatggttgtaggcctcagcatttgccttacacacagcccccttggagacaaaccgtgtctgtgtccctcagaaggccctgactttcagggcacactccagcctgactttggcactctgctagacacatccgaaacgctggttctcgtgttgaagtctgttatggatatgtagggtaaggcagggaaactggagcgcctgcatacccttgacttcctccatttggaaaagataaccctgagacatggtggaggagaaggggccctgacctgtcagctacatctggatgtaactcccctgatgaagaaagtgccagaggcagcaaagcagcccttatagggtattttgtgctcccccaacagaggaagaggagcttagggtctccagggagaatgtctggttgtgaagagccgccaggacctggagctgcacggttgctcagtgtgcatttcacttggtcagcccctacgctggagagtgcttgcatccgaaccttcagtgcctggatagacactgagctgagcgaacggtatgctggaaaatgaagcgtgcaagtgacaaagtgctcaacttagactctgggcaaaattctcacaaagggctttctaatcctcacttaatggaagagtggagcaatttccagcagaagttgtggcttgcttcaccaggtctgctcaggtcagcggggtgagcctacggccaggatgggtggtaattaatattggaatacttggccagtctgcagacctcagaccacaaaaaaccctccatcctcaagcagtctcttctttatgcctcgcaaggggaagataattaaagactgtggtaacgggttaatttataggaaaataatgtagcatactcaactatctatactttttctattgctaaatttaatatacatccatttctattgattatcagaggggtctagactcccggccaagagttgcgaaaccagtcattatcccgcaggcaccttcctgctttatttcagaacattcagtcattcattcaaaacaacccaaagcatctgcattcacagagctgccctaacagatgagtttttcttcatctcccaaggtaatgatataaaaaaagtgtcagccatgggattttcagtgggaaacgggaaacccaaggcatggtgcattcaatggaaaaattcctcaagctcgtgacctgcataaatctccaaatccttttcaacatcatcctgtttagtgttcggcatgagggtgcctgcagaggaggtgaatccctgcgttttctattctttttttcttccgactggtgtggatcccagacaatttcagggtcctgcagggtttgagaccctctgtgaacactgacccgggaccccgttttgcccatgggaagttgaagccagcgcagcccccggccaggggcactgtctcctcggccccgggatgctggacggaggggacaacgtgcaggggcagctgctgc

SEQ ID NO: 37434 - DNA, 2300 bp, Homo sapien
tgctgggctccccacactgccctcgcagtgctgtgatggtctccatgacaccgcccagctcttcccacgggtgccatgacatctcctgggactcgcgtgtttctcctaaaggtgcctcttgcttctgccttgggtcgcttagtggctgatccaggctggagcatccccgtctgagagcaagtggttttttactagtcctcttccaggctacccaccaacccatccccagggcctggtggttaagcatctggtacccaaaaacagacagcctgggttcaaacctcagctgcggtgtagactgaccatgtgacctctgcaagccttctaattgccctaattcgcaactccctcatctggaaaggaggggaaattgtaattctcttatggtgtaggtgttacattaaatagtgaccacaaagtgcctaggaggtgaaaagagctccaaatgggtaacaatttctaccctcctgcagttccctgggtagggatgggcacaggccggggaactccttacgagggtctgtgagctctgaggcacctgagacctcattgccctgacccgtaggatggactccggtggcagaggaactggaggctggtagtttggacacagacctgtttacagccttcgaacctcactttaaagaaatttctgcccttgcacctagcttattgctcaggaaagtagaaaagcgaaaagccttttcctgctgaaaatcaatggctctctttaaaatattaaaagaacagacaggaggagatggcacgccacgatggcaggggcaaggccaccgccctgaggctgcagctcagaacagatgctccgagtgcagccagatggtgtgattgaaaggaagagagcggccagcagttccagagtggccgcctggagacagccctcagaggtgcagctctgccaacactcacggacccacggcactgacttgccatcaccaagagaatattctgtgattcattcatgaaacaaaggttttcgtggtatgtgaatgttgtgtaaggattgtgaaggatataaagaagttatttcgattatctcagtgtttcctgtcagtatagatcatgtgtgcacaaatcttataataaatgaaattagttttgcatttctgagtgctttgtttgaaaaagataccctgtagtatatgataaaaagtaattctttgccaaaacaaaaagaatccttcgccaaatgtgtctttcacagcccatactcctccccctacaaataaaagtccaaaaaaaagaaaaagaaaaaaagaaaaaagagagagaaaagaaagcgagaatgtggccctgctggttcgtgtaacagcaataatcctgaagatgaagattctcagtagagaaacagatcacatatagccagaagtgtcaggataaatcccttcttattacaaagaacaatagcaattttaaaaactcatataaagataactttacattaaaaaactctttattgcttttttcctgtccgtaaaagaaatacagcctagttaaaaatatcaaacaaaaaaacctaaacagtggagaaatggaaaaagatcagaaattaaatacttccatcatctccactgcccctcgagccagagcctggtaaacacccttcacgttttgtttctcgctgcctgttctgagacaaaggtggcacatgagttcatccttataagaactggatcatgctctacatatggctctggcacatttttttaacttaataatatgtctcagacttctttgcacatcaatgcctattgatctatttcattctttttaatggctgccttgcatggctctaccatgatttatttaaccaaatccctgttgattgacatttgggttctttccaatttttgctattacagacaatgttacaatagagatctttgtctgtaaatccttgtggacttcgtgaatatttctttggacgaatcctcaggagtgaagttgcttggtcatagagatgtgcgtgagcgtgcacccccaggctccacgcccaccttgccctgccctcccccatcagaggatgggaaggggcgggggagttgaggtaggcctttataaggaagcagaaagcttggtcttggtctatggttgcagcttttaggaggccacggcttttactcccaacaggcccactgagactaatggggccacactactgggaggggggtgagaattaactcattaaatgagcatcattctgcataattgtgtgaaatacggattttattgtgagtggaaggccttgcaaacgaaggacagagactgtttctttcatgttt

SEQ ID NO: 37435 - DNA, 2300 bp, Homo sapien
cagtccttaagaatatcttcttctaagtgtggtgtacaaagtccatttctgcagtggtttgaggctgatgtgcttctacaagatggtgttgtggtctggcctagctatgcagatccttttgtttctgtttctggaaatatgtcaggcatgttgccctgttggtgtaatttcctttaattcatcctcggtcaccgttttccagggcctctgggcatgggcgttgataacctacgcctggtaacaccaacgtctgtgagcccagcctgacaatgattctaccacctgtcgatggagcaggtttcagtgtaaacaagcgtgtgaataactgctgaaatattgacgctttattgcctccacggaggccacagtttcctttattttatgatggtacttgaaataatgtttgataagaacctgcccaaaagtcctcctcacatggagcatcttagagtttcaaaagaaaattgttgaggtttctgttcaaattccagaagatccaactagagcctgggagtcatcatcatgcttctggtggattttctcctgctcacatcacagagtgtgattctgagacccctctagctgtcccagtcccctatgcccaaattaattcattcacttcagtgcttcgaaaactgtctttaattctcacaagccccaagttgatgcattcttctgaaatccttgcttgatgacactaagtatccattccctgccattctctgtcaccacacgctttatattttttcattgcacatagtaaaatatgtaattttatatttgcttttcattttactttccatctccttcaccaatatggaagctccaggaagggagaggcgatggactttcttcccctgttgttttgctaccatcacgcacacaacgcctgaattatagtcgctgctcaataaacatctgttaatgaatagatggtagtggcacaggggcccggcgcaggtgaaaacctccctgtattcctctttagctcagcactcagggcacattccttcctgtgcacagtggaaggtaactctgctgagccctctgtcaccgtagcctctgcagaggtccgggcacacggccacctcagagccctcctgcaagcgtagcagcctcgcacgccacctggagaatgtgcacatgtgtgggactggccctggttcccaccacactgggaggtggcctttgcagagagttgtcatataacagccctgccaaggggagggtgggacgtcttggtttcacatggataaggttctttaaggcaggctccctacaacacttagcaaataaatagtgtttattcgtgtgctcatccaaacatttgttgcccaatgcaaattcactagaatcatagtgtcaaacagctggatgatcgctcatcatcacacacaggcttgaggagtcccagagctaacgtcagcaagatgatggatggacagatgagagatagataaatagataataggttaatagagacagatagatggtagataatgatgataatgaacttaggtatagatagacagtagatgtggataggtaggtagttagtaggtagatagataacaggttaatagagatagataatagatagatagataattaatagatagagatagatgagagatagagatgaccctggctttatcatttattaatatcatttcgacaaggcagagaccccagcccatggagaagctgttggtggtgtggctgaggtatgcaaatgtttatgcacacgtgtgtttttgagggggaagagaggaaggaaatgggggagaggaaagaagaaaaacaatgggacaaagcacccagggccgccattcacgggtccatgtgttaaataggtggttatttgaatagttgctgctgaaagcttctgctaccttccccaggtcaggaatgaaacacacaggccctggtggtggctctggttttttctggaattgttctactggaaactgctctctgtgaattgacggctaatgagacaagcatccggagcgaatgaggggcagtgccctcctcccgcgtccccctcgtgggctcctcccaggccgaggaagctcgctgcccaggcttggacagacccccgaacaaagggagccgacagctccacaacactcagcccatggggactgcagcaggtgagtctccacccagcctccctcctttggaccaacacgaactccggagacgtctgggtgcagctgcctcaggccctgctgtcttcaacggggactgaggttgcagtttagctggctttcctgttcctgcttccccgggtccccctc

SEQ ID NO: 37436 - DNA, 2300 bp, Homo sapien
atttaatctcagaaatctttcctgccttattcattaatgtgattatttgtttcttagtcaatgccaccttcttctataactttctacgtagagggggaaaagccccagtatttagcactctgagttttataaagcgtcttcacacttctcctgtctcgcgtcactaccctttgatagcattggggagggacttttgctatttccatgttacaaatgggtcacgcaggcacccggaactcgagtaactagcccatgcctgcgaagctcccacctggagtgggggactagagccagatcaccagacccaaaactgaggccttgaggaggagactacgaacgtggcggtggagatgtttatctcttcacagcggctgagttgtctctactttatgggctgcgaatactttctggcttgtcatctaggaatctcttggcatctttttaccaagtttaatatcacagagctataaggcttagaagacctcagaggccattacagccaacccccagactcctattctgcatccaaattagtgataacacgttatataattccattaaaaaaacccaaccaacgaaccttttagtaccttcctaaaagaagagtttttcttgaacacggtgctaactaaccaatttgattgaaaccacccgatattttgacatggtaaaaagcatattgtgtaatagaaatacaatgagagtcacatatgtgatttaaaattttattgagccatattaaaaaagtaaaaagacacacactcttctcgtgcgacacagaaccgggacccccgtacagaacattttactgttttcccttaatacccaggaaacatgcactaacctggtaaatacctgcttcatggagagtagtctttcaggattcataccctcaggacattgttggggacctactggactgaacaaaggcgggcaacacgggaataaaagacaagagacaacagagtatatttggaagaaggggttaggggcaccttgcctttagtggacaagggccctgagctttacacagccctccgtatttattaggcaaaaagagatagcgagaaagctgggggaggggggtgattgtcagtctgccgtttggttcacagtagtcttgcattttttggacaataggcactagattttttaggcagataactttaaggagcccggagctagggagtgatgtctgttagcaaaccttttggtggcagggcagtgtgagtttgcccacatcctgcattcatgataaacagtttgctgtttgtagcctccagcggaatgctgagttggtcacgtcccccacgggccttcggctccctgcaggacaccaccgcctagacatttgcccacatttgctgacctacacgcagacactctggctggtctagacactcagggcctttactccggctcccgccagaggcctgagaaatccacacctcactgatagctccatagctcaccagcgtccgtggtgagccagtttccttggcggcagcatcctccgccttgggagaggccgtggggaccgtactgaagaaactgccactccgaggcattgctccgtgctgggcactgccattgagaagtgcacctaagcggccaccagtgagcgacgaccacgcatgaacaggaatgttctagagcggaatgcacctatgaaggctgaggcctgcgcgagaacctgcacctggaagccaccctgacacgctcctcccctcggggcaacgtccacctcctcgctgtagggtggggaggatgccgctgctgctgtggacggggagggccagcgcgtgcgccgcggccagggagccgtagaagctcagtcccatccgcctttctcatgccccttccctttcccgtcctccctcctctcctctcacctgcgtggtaacaacgattgtgacactcggttttcttaagaggtgcacgtgattcatttttaaaattccctcaaaagaacgttttcttgaattgaaactaatgatcaaacagaagctaggccgggggcaatggcaccaccctctctgcttccctcagttccactcccctccccgccacgccccaccttcctgctcagtgtgggctggggcgggcagcaggcaggacacgtggaaacgcaaccgccaggaggaaaggcgggacacagcgggaagggaggtttgcctcccctctcttcctgtggtgacccccacctcacttacaaaaatcaccaccgacgtttgggaaccgtgcacgccgactgaaagcaaagctcagctgacctgcgaggagtccccggggagctgccg

SEQ ID NO: 37437 - DNA, 2300 bp, Homo sapien
tgacagaattctttaattgtctgcaaaagaggaaatccagttggtggagagaaaaattatttccacattggaaaaaaaagtaatgacaaaaataaaaaggctttgtcaaatatagttcactcttctcattacttgccttagtgtttcaaagataaacgctttttgttacaacacatcacagataacgcaacttcgcctgactgaacccggcgtggggagactgcagagatggcgctctgcagccaaaacaaagggtgggggaggggaggggcaattacaaaaaagacaccttatgaaaaaaaatccctacaattcacaaagcttgctactgaaattaatttcaggtttccacgtccacggggacacgtacaggatttaaaatgacgatcacgtggcatctctcagggccaaatggggcgcatcaaagcttcccctcgacgtttattaactctgcagtccgttctctacgtctgcgaagaattggcagataacgatgtgtctgagagaagaggcgttttctaaggagacacacaaagggagtgggaccctccaacctcactctgtgagaggaacaccgcacagcagtgtgggggctcgaacaccccaagagcggcagagcgcggttcagaaaacatgacccttgaaatgcacacaaagcctaacaacgtgtcctccgcggaagaaaacagcttgaaaaggtcggctttgaagtgacccagcggaaaggaatcaccctggaagaaacacgcagcagccccggggcaatgcgcgggcaggaggagcagcgagcgcggggagcgcagggcccttcggagagggcgctccaccggccctgcgctccgtacctgtgccgccacgcccaccggtcccctgctgagcctagcaccgcccatttagacccagcaccacccgtccggaccgaacctagcaccgcccgtccggacccagcagcgcccatttggatactgcaccgcccgtccagacccagaaccgcccgtccggacccagtaccacccatcggacccagcgccgcccatttagacccagcaccgccagtccgaaccgaacctagcaccgcccatgggacccatcgcccgttcggacccagcaccgcccgtccagatccagcactgcacccccatttggatccagcaccgcccgtccagacccggacccgccagtccggaccgaacccagcaccgcccatcggatccggcgccgcccatttagacctagcaccacccatccgaaccgaacctagcaccgcccatcggacccaccgcccgtctggacccagcaccgcccgtctggaaccagcaccgcccgtccacagatccatcaccacccatttggacccagcaccgcccgtccccgcccgtccggaccgaacgcagcaccgcccatcggacccagcagcgcccatttagacctagcaccgcccgtccgaaccgaacatagcaccgcccatcggacccatcaccgcccgtccagatccagcaccgcccatttggatccagcaccgcccgtccggactctgcaccgcgcgtccggacccaacacagcaccacccatcggacccagcactgcccatttagatccagcagcgcgcgtccgaaccgaacctagcaccgctggtcgggaaggaacccggtaccgccggttgggacccaccaccgccagtccagacggaaccctagcaccgcgcggggcccgccctccgacacctccctccctggcggccgcggcagcagcacctagtggagcggcccggaggtgcggcggcgccgcgcggggcggcggcgcgcacggcgggcggcggcgcgcacggcggcgggcggggcgcgggcgggtgcgggcggcgggcggcgggcgccgggcgcacaccggccggcggggctgaggcggcgcggcgcggcgcggactgagccccaggcggaggccaagtcggaggacgcggcgcggccgcggaggcggaggcagccgcggaggcggaggcggccggcggggggtggcgaggggcgccgggcccccgcggacctgtcgtcctcggcccgtcctccggccccggccccgcgcggctgaggaggcgcggccaggaccatgtcggcgggcggccgtgacgaggagcggcggaagctggccgacatcatccaccactggaacgccaaccggctggacctgttcgagatcagccagccgaccgaggtgagcaccgccgggcgcggggcctgcgcgacccccgcccgctgcgccgcgccccgcccctcccccccgccgccgcccgccagccgcggacccgc

SEQ ID NO: 37438 - DNA, 2300 bp, Homo sapien
tctttattaaaccgaaaaaagattcctttccaccagacttgagaaatctctcaaaaaaaaaaaaaatccattcaaacaaaaaaaaaaagctacacaccaagaaaatgttttatggtcaactttttttaccttgtgataaaaagaaaaatgaattcattattctaaaagaaaacataatcctgaaactaaattatcatgtcacctttctaaagatacactagtctatgaacgaacacttaagtacatagtactaactcccttactagaacctaactcataaaatcattacagaagatgaatgaatcaggagtaacttaacataacatctatgctcaaattgacaacctgagcctaatggcgtgtgtcagtattcaactcagtattaagacaaatggctagctacccacgtcaagtgcagtcacaggtacagatgaaaacagaagaaatagagtccttcccatgactggcaaaaactcaagaaatcagagaagcaatagtcaaattctctcaaaaacataaagtggaatttaatgataaaaggattacatttcgtaagaatgttcaaatctgccaaacatgttttgttgcctaggagctagtattttatagcaagtattaactataaattacctattacaacaaatcaaaaatagacgctattaaaatgatttcctaaacgggcacaaatattgagtgaaatttttttatgctggtaaagtctgtgcagccaccgaatgaacagagcgcggaaccgacccttgcggagcgatttacagggttgctccccgacccttcacctccctcccctctccacggagcccttcctagtggacttggactcaaacatttttttaaaagctgctcggaacgctttcagcagctttgctataaacaacccccattgttaccaggccaggagcgagcgtgatttcctcctcctctcagggagccagcctggggccggcgcctccctccgggcagaggccgccgcagagggcccttcctcgcggccccgaaggtggagaaggcgcgcctttcctcggaggcgtccgactccgggcctgtgccatcaggcagcccgcacctcccgaactttgtgatactgactttcccctcccagctggcagcctgcaagtttatgaacccgaagcacagcgcgcgtcacaggctccatcccggccacggcgaaggggcgccgcgagccacaaccgggctgcaggtggagggcgccggccccgcgcgccgccgcgccccccgcgccgccggggatgaggccggggccgcgccgcgctcgcgggggtgggggcggcggcccaggtgagccaccaggtgagcggccggagaggggaacaggtgactgccgcgccccgccagcccccgctcggcccgcgcgaccccgggatacaccgcggcagggggacgggggctgcgggggacgccggggcccgcggtgggcctgggggagggggaggggagagaaggggcggaggggggagggggaaaggagggcgggtccgcggctggcgggcggcggcgggggggaggggcggggcgcggcgcagcgggcgggggtcgcgcaggccccgcgcccggcggtgctcacctcggtcggctggctgatctcgaacaggtccagccggttggcgttccagtggtggatgatgtcggccagcttccgccgctcctcgtcacggccgcccgccgacatggtcctggccgcgcctcctcagccgcgcggggccggggccggaggacgggccgaggacgacaggtccgcgggggcccggcgcccctcgccaccccccgccggccgcctccgcctccgcggctgcctccgcctccgcggccgcgccgcgtcctccgacttggcctccgcctggggctcagtccgcgccgcgccgcgccgcctcagccccgccggccggtgtgcgcccggcgcccgccgcccgccgcccgcacccgcccgcgccccgcccgccgccgtgcgcgccgccgcccgccgtgcgcgccgccgccccgcgcggcgccgccgcacctccgggccgctccactaggtgctgctgccgcggccgccagggagggaggtgtcggagggcgggccccgcgcggtgctagggttccgtctggactggcggtggtgggtcccaaccggcggtaccgggttccttcccgaccagcggtgctaggttcggttcggacgcgcgctgctggatctaaatgggcagtgctgggtccgatgggtggtgctgtgttgggtccggacgcgcggtgcagagtccggacgggcggtgctggatcca

SEQ ID NO: 37439 - DNA, 2300 bp, Homo sapien
taattaaataaggagtgtgccttctggtgtcatggaaaacacagtttaaatggactccactcctgttgctaatgtccctatcttcatccaaaagccaggatcttctttggaaagcacaagtgacattttgtccacctccttagacatatgcacgcagacacagtcatacatgtgcactcttgcatgcacgcacgcacacacacccactctctctctctctctctctgtctctctctctctctcatacacatagaacttaaacccttccagtggctttcactttaactagaataattcaaactcatgatgtgatcatggtctgggaagtcctgtatgatctggtctcagttggttcctgacctcatctgccccttttcccctcgctctgtccgtactggccagtgaacccaaccagacttgcccagccctgggccttagcagttgctggtcccctgctgagacaaagcccttcctttagattttcacatggccacttctgtctggttgttcaggtctgagttcaaatgtttattcttcagagagttcttggccagtcacccaagcttaggatgctctcggtcatgttctttctcacaaccttatatttttcacaatgtgtgtcactattttaaaggtatttatttgttttcttgttagtcttcttcctctgcatcctacttcccaaccacaggatgtaagctgttgaggcaggaatatcatctgacctgcttattgctgttcctctgcattggaacaggagagcccctgggcagtgtgagtgtgcacatggtaaagatgtgctgcaacctgtgattcccctggtctggcttagcaggtccatattctaatactactgtggactagttggtttcttaaaagaccaacatgattttattgtgagctaagctatcaaaatgcaattcatgccagacttgttgaaaaagagagtatgagaaatattcagtaactgaaataactgcattagaattaaaaagtaatagaatcatggaaattaagaatttgcttcaagaaacccacagattttctaatctagctctcttaaattacaggtgagaaaattgagagttaaagaagccagagtgcatacctagggtcacagtgtcataatgggactgtggaacctatcttaatttcttccctcagtatccttccatctggacttcagatttcaggttatattaatcttggaccataggtagaaagcaggttatgacaccaaaagtgacaatattatgacatatacatgtagatttccattaaaaagaaacaaaagaaaatgtcaggatatccaaattgctctgctgtagttggttttctttttttctcctaaataagttcacagctataaaggacattgtagtttgtagtgcctggaagtaaaaatagaactctgctctgttggcaaatctcttttgaaaaatctttggccttgagcacttgagatctcctggttcctacttcactttttaaaaatggatttatttagtgggttaatatttaactttatctgggtttttagtttttttcagattgatgatcaggaagtaggaaaatgggagaaataggtatataataatatataggtaaggaaatcgcaaagcaattgaataaagagcagcaccatagagaaattctggagttccttccttttctttcctcactatagatacggaaatcaattcattgtttttaaaaactcctttagcttgaagagagaagatgaaaatggtctttgtcatgctggattgttcatggtttctaagtgtcactagatcaactagttactgctattatatgttatctaacaggaaatgaaacaatagttattaggcagattgtctttacactcattttagctagaatgcaggtacctttttctcaagtgactgtaaatgttagctatctctgttactggcataaagtaagttgtactcaaagatgtcaaaatgttttttcaggtggaacattgagaatttatgcagatagtttaaaaccaaatattccctacaagacaatcctgctgtctactacagatcctgcagactttgctgtggctgaagctttagagaagtatggtctggaaaaagaaaaccctaaggattactgcatcgcccgggtaaggaactttatcaaatcagtagttctttctacttcacatttaaatggtagattttctttaaatcaaattaaacctagattttcagcctaccatatcatttagaatctgataatttacaaatcatgtgctaaatatatatttttaaaaagcagtctccctt

SEQ ID NO: 37440 - DNA, 2300 bp, Homo sapien
gaataatttcagatgtttaaaatcgaacgatctcactgtggaatgaagttctaaatagcatggggaccctttggactcaggcttgtttttatggctttgcacgtttcttgtatggtgtcccttgagctttcgggttagacactgtagacctttgtggttttcgtttgcttttctttatggttaaagcttggacatttgaagacagcagtaaaacactctggggtgtgtgttcctgtacggttcatactggagcactaggattacattctggcatagcatcaaaggaacggtccccgaagtggacagcagaaaaatgaaaatatgccgcgagaaaggagcaaagggcctaggctggcggttggattagggactgggaggtctgttcttatggcgaggccaggggcttggtcctggcgggtgtcggagttttgcttcggtgttttgagcgtgaagggaactgaagagctgcttctggcttaggggatgtgacattatcatgtaagaacatgcaggttccgaaacagtttctggtacacagtgactgcccagtaaatactcagcagagacataagcttcttctgtgaaagccgtgccggagcacgagcacgcgcaacctccacatcctggtggtcgtttctgtgctgcgatggagaccacggaccgccccagccaccggctgctcctcccggcattgccagagtcactgtggtggggcctgcatccccacccactctcccaaaagtcatcccaggaaattggatacaaatcacggtagcaagtgacctcccagtctaccaaatccaataaagagttttaaacaaggacccaagcgacctctccccaacaggtggcattctgcgtcacccactccctccctcttaactttctttctttggcttcggtgacttcatctgctttcttcttttctaatttgcatttgagaaagatttctacagcaacaacataaaggacaggtgggaggggtgctggactggaggcagaggccagttaggggatagccagggcgctgtttcattacactggacaatagcagtgggcatggggcagggagcaacccaaggctgcctacgaggcacagccgaggctctgtccccaggcagcgcggggctgaggctggcgttccgtcattgcttcctgagctgccccactgagagacacgccggggattcccacggcctctcacctctggcaagacaggacaggttcactatttgattatctcagcatttcacatcggagacctcacagaatccagaggcagcaatagtccggcagctgcccacgactgcccgtccagcagtaagcgagtaacaaacagcaacaacaaccacaaacagctgttgaatctcacagcttttgtctttataaaataggccacttctttgacatgttattgcagacacacacacacagacacacacactactaagaagaaggtgtggaggtatcatcctagcatccgctaaacactgttatggaaaaaatccagtgcctctgggttattcgccactgcagttgtggttttcattctccctatcacccctgctatttcatgaatacacattttgttttagaactggaaccaatccaggttcatcttttctttgcttaagtgaaactaaactaatttcagatttcttgctgaaaaatgcctttgcttcccttacacaggatataatttaagaatacagtccagcaagatcgaaatttgtttttgaaacagacatgttagttccactggttacgatggaatataatgatgtctgagatgtgatttttttgccatttgaaaacctctcctgcgaactgtcaagggcccttagagtcagtaatttgggtgttgaaccctcagcctgtggcagattgaggagctctgttgtgtgttccccagtagatgcgactttcttcttctctttatgggggtcggcaaacctttttgggaaagggccagggagttaatattttcgtcgttgaaggccacgtggtctccaactcaatcatccagctttgcccttgaggaagaagcagccatacacagtctgtaaacaaaggacggggctgtgttccaggcaaactttgttgtttacaaaaacaggcggcaggctggggttggtggggcttgtgtttaattaacgcagcacacaaagtcttatgacgtcgttttactcttttctctcaggaaacaattctggtgaaatgtgatcgtcctggccaccctctgattgataagacatatcattttgaaaggtaagtgcttttcaagatgtcctataaagcaa

SEQ ID NO: 37441 - DNA, 2300 bp, Homo sapien
agcacctccaggcctgcaacttgacctctgacctgtgtcctctaggataagaaggaaggtcgtcccaccgtgatcctgggactggccctcaggggagtgcacatctaccaggtgaccgaaggggctccagcctcacagagcccctcgtcctgcccccaccccctcctcccttccccactggagtctgggctgtgtagcatccctgcagcggtcatgggcgctggctggccctgcctggacgcgccctgcctctgctgtcccgcaggaggtggaccgtgctccgcagctgctgtacgacctcccctggccccacgttgggaagctggcatttctggtgggtgtctggggggtccccgtgccctggaaagcctgggcagatgcagcttcatcctcggggcattttctggacaattctgcacccgaagaggtgcaggtcccttcctgccggcctctcgggggcatcagggccgtcctggcctcacgggctttgtgcctggccctggccctgcaggcgtggggtgtttagctgcccggtgaggtctagttgttgttatcgcttgaaaacttctggctcccaattgagaaaatcaagggagaaaagaagagcaggtcatagaaacgcacctgtgtggcctctgttcctctcatcccggccccagagctgtcacccagggtcaccccacagcccgggtgccggggataaaagggcagtgactgtgggggctgctggacagcaggcttgctctggacagccagaccgaggtcttcctgtcccaccccagacctccactcccctcacactgctgcgggcactttctagccaggagggctgtgtcctctcaagcaagggcggagcagagcacagtgtccgcgcacagtgtccgccaacagccatctgcactgcgaagtgaaaacctgggcctcgtccccctgggggccatggctgacatttaaaatcatcctttcctgtggctagcgtggttttccacctgtggagtggcaacttctctcctgtttgctcagggaaagaagctggagatccagctggatgggctgcccgcagcacagaagctggtttactacacggggtgcacctggcggtccaggcacctgctgcacctgctgcgcgccagccaccagctccacctccgcgtgcggcccactctgcaacagctgcggcagcgggaggaggcagaaggtggggctgggctgggtatgctgggctccgcagccggactgtgccttctgggctaggctgggcacactgggctctggccggactatgccttctgtctcttattgttgtggcctcctgactcccacgtcccccagatgctgaggtcgaagggcgaagtggtggcccccagctctgcctggagtggaattctatagatgggactgggggaagctgggagcttgaggagccacctgaggtttccacttctcagtttcctggtctgttttccacttctcctcccatcatgtgcccacaaagagcaagaaatgcaggttccgacaaggcctcagtgtttacccacaggcctggtctcccttcctgttccacatcctcacctgagcacaaggcctggccttagtgtttacccacaggcctggcctccctccctgttccacatcctcacctgagcacaagacctggcctcagcgtttacccacaggcctggtctccctccctgttccacgtcctcaccttgagcacaaggcctcgcctcagcgtttaccacaggcctggtctccctgcctgttccacgtcctcacctgagcacaaggcctggcctcagcgtttacccgcaggcctggtctccctgcctgttccacgtcctcatctgggctgtgggtgtgcatttctgtctcccgggctcttcctcctgcatcagcagggctggtccctctccagctcgccctcactgtgctccccactccccacagagaagcagcactaccgggagtcctatatcagcgatgagctggagctggacctggccagcaggagcttcccgggcagtggggtcagcagccagcactgcccccactgcctctcacgccactccgccgacagccacggcagttcctacacgtcaggcatcaaggccaactcctggctcagggaatccagagagatgtctgtggacgtgcccttggaggtccacgggctccatgagaaggagccgtcctccagccccaggaccagccgcagccaccccagcacacgtggtgacagccaaggtgggcccgagggagatgcccaggcctcagggacagtgagtgtggtccagccagcc

SEQ ID NO: 37442 - DNA, 2300 bp, Homo sapien
aaacgcccacatctatgtttgtggcaaaatcttccccaagactctgtgtccccacccagcaacgagaagctggagttgagctaatgggggatgtcctgtagtttcctggggtccccagcagtgcctcgggctgggggaggggtcataagaggacctgttgtggggaagatgctggggctttggccccctaccccataagagctggaacttttaggtttcttgcacggaacttcacggtaagattttaactgagggatcatgcagctagaacatagtgaaccgcctgttctgaacaggtgaatcgtgctcatctgcttttgacggagctccctgaagtgcctctgcaactcctgtggcccctgctgggcctggcaagttggcaaccacagagccacttcctatcggggtgtgcgcacatctgtgtctgcagttggacaggaacccctcactgggttgtgcagtcatctatgtctgcagttagacaggaacccccccacagggtgtgtgcacatctgtgtctgcagttggacaggaacccctcactgggttgtgcagtcatctatgtctgcagttagacaggaacccccccacagggtgtgtgcacatctgtgtctgcagttggacaggaacccctcattggggtttgcagtcgtctatgtctgcagttagacaagaacccccccccatcggagtgtgtgcacatctgtgtctgcagttggacagaaaccccctattgaggtgtgcacacatctgtgtctgcagtaggagaggaaccctctatcagatgtgcatgcatctgtgtctgcagtaggagaggaaccctctgttggtgtgtgcacacatctctgtctgcagtaggacagcaaccctctgttggggtgtgcatgcatctgagtctgcagtaggagaggaaccctctgttggggtgtgcatgcatctgtgtctgcagttggacaggaaccctctgttggggtgtgcacgcatccgtatctacagttggacaggaaccctctattggggtgtatactcgtgtgtatctgtagttagacagggaacgctctattggagtgtgtgcacacctgtgtctgcagttagacaggaaccctgtattcaaccaaatatgtgtcaagcccagttattcgaaagggatgggctgggaagaccctcactgaagatctgtgttaccgtcattgtggggcctgcccctcaccaagttaagcagacaataatcatattagtctgttctcacgctgctaataaagacatacccaagacttggtaatttataaaggaaagaggtttaattgactcacagttccacatggctggggaggcctcaggaaacttacagtcatggcagaaggcacctcttcacagggtggcaggagagagaatgagtgcccagcgaagggggaagtgccttataaaaccatcagatctcatgagaactctctcactatcatgagaactggatgggggaaccacccccgtgattcagtcacctcccaccggctcactctcacagcacaggaagattatgagaactacaattcaagatgcgatttgggtggggacacagccaaaccatatcaataaggaagtcagtcttacagtaactcaggattaactcaggattagtaagctggatactcatttgacttgaaacatgcaaatgaagaatcgcaaaatggcctcctgcagatccagctgccccagctgtgccctgctgtgaggtttcctcttggagccccaagtgagggtcctcgggagagtctgagagcagagcgcacggcaaccgtcctgcaccctccgtcacaggcttggcgccctgcgattctgcctgagaacgctgcctctgctgcccggtgaccagggatgggccccagcgctgcaacagacaggactcaggaagagctctgcaggggatgcccgccaatcccatccatgccggggctgaacaggcgtgaagtagtgtcacatgcgagacgccggaaatgcggacacgggacaccggaaatgtggacaccgggcaccggaaatgtggacaccgggcaccggaaatgtggacacgggacgccggaaatgtggacaccgggcaccggaaatgtggacacgggacgccggaaacagggacacgcaccagacgctgggtgtttagaggctgccgtgagaggctcagctgtaggaacactgttgggatcactcgcatcagttgggcgatggatgatgtgagacaccgatgctcgcgctcatggggaaccaagcattcatttgtgccgtgcgaggacagagcccagagg

SEQ ID NO: 37443 - DNA, 2300 bp, Homo sapien
gagctgaggacagaggttctggtgtcccctcagtgccctggcgggaggtactcatggcgaccacccttgccttggagcctcagcacgttttcaggaaaaagccgcgctctcccaggaatacaacgggggcttcccaagcccagctctccctggcactcagatggacggcggccttcactggaggtctgaacctcaacggtgtggccctgagactctgggtgggaaggaaggagctggggccagggacgtcctgctttgacaagaatccatttattgtgtttatcaatacaaatgtggagtttccattccttttccttttcttctcactaatgatgtttggagctcattggcccacggtcacctgtacacaccagcgcccacacacaccagcgcccacacacaccagcacccgcacacaccagcgcccacacacaccagcgcccgcacaaaccagcgcccgcacacaccagcacctgcacacacgtggggaaccatcgctttgatcattagtgcacccagcacaactccccaccgtgtccccggctctccccaccgaggggtcctggtgcctgttgtcccctctgtgctgtgtgtgccggtggtgttctgccaccccccaaccctggcccctgcctgccctctgccactgtcctgcgcccaggcatcctgagaggtgcagctgctgccgcccttcctgatacgccggcactgtgactccaggcagcggctgagggcacccggcacagggacgagctgctcaggcgccagtggcacagggccatgaggatccagcctctgctctctggggctgtttttttttgtggtttttttgccatttttaaaactttttgtgctctcagctaaagggatccccacatcttccatagtgaacagctctacgtttgctgtggagagaaaagagaccgccactgctgtcttgggcacacatgtgtggcctcgagggtctgggaagggtctggatctgagcggagggagggagggagggagccagtgtcagtccagggtccgggggaggtgaggcctaagcctcctaaatcttctcaacccaccgggccgggccttagggcggctggagtgcgaatttcctaaacccaccgggccaggccttaaggcggctggagtgcgaatttcctaagatgaacaacggcccgtccggaggtccagaccccttactagaggaaggtcccagagcatcccagactccatggcaggaaactgatggagctcacggctgaggacagaattccacagcccaggcccgtgggaactgcctctcctgacctgcagcgcccaaaggtctgggtggtcccagggccaggcaggatcctggggtcccttccccacctaacactgtgccaaagagctcgaaggcgttgctcatctctgctgagcggcctcaggggttccaggccctgcgggagatgtccccacccctcgtgctgatgcacccggctgctgtccacgcaagccaggacccccttcctggccttccagctgctgcaggcaggaagggatttgctggccctggacaaggaaggaagtgtcctcagtttccagcccctaaagggagccagggtccctcctggcagaacctgtccaggaacggcagctgtgctgcttcctgaggtcgataacagatgccacaggaggtgtgtggggcagggtgcccacccaggctgccttcctcccgccctcctcgtcctgccctgctgctgctccatcttccccagcagccctggctctggcatctgtgcccatggggtttgcatagccctctccacattatagaagaaggagcaggcaccctgaggagataggggttgtcaggtggaggagttgggtcctgtctcccccagcctggttctcacggggcccacaccgaggctggctgctgagctaccctgcatgggagtgctgcatggcgggtgcccagcctgaggttgtttatttgcattcctggcgccctccacacacccagctatttgcagctctgacccttgtcctggcttggccatgctggattcccagcccaggcttccctctcaattcccttcccagtgagaagctcggcaagggcgggtcccggaaagcacagctgtgatctgggaggtgctgagcacccacctgcgacccatggcgggggagggccgagtaacgacagcatggcggtgcccccgagagggaggggcatagaccccgcccggacaaaccctgacacgttccctccttcaggggcgcgatgtatggaacccagtcctgagaggcctgcatgcagtcag

SEQ ID NO: 37444 - DNA, 2300 bp, Homo sapien
ctctgtgcccagccacctgatggggagtgcacagctgcccttcacgccctcctcccatggagtgtcctaacaggcagacttctccgtcatctttcccgttggggttaatttgttgatttaacctctcattcaagtcgatgggagattgttctggtttcatggcacttagttcacagcggctcctttctctgaatcactttttgaagttcggttggggcggttcctgccggcaccgctgcctcacctgcaggaatgccttacccttcctgctgctaagataaataaggcaggcaggtcacggcctttccagcgcccatcctgtctgagacagcagagacaccctgcagtgcatcactgacctttctcaacagccaaaggtcagtttggaagaccaagaagctagcaccacagagacgggtgatgggcttgggccctgcaccctcccaccctgtttactgggctgagggtgttcgtggaccttacgaggtctgagcaggtggtgaataaatacggccccgtggcttccgcagggctgtctccagctgcccttttccttcctttctggcaagcacctccggcgctccacatgtaaactcaccacgggtgaggggctcctcagagcatctgcccctgggccaggcttggattcctcagctcctgtggctgcctgggacactcacaagccacccaacctggaccctgcagtgcctggggaagaactggggtggggagcaccctgcccaccttgccccaggccctgtaccctgctgcgcaccccaacccaggccctgcactatccgcttgggcagagcagcaaaagtcagatgatgcatctcccagataccagcctcagtcatcccagaagacgaggctttcgtggtttgttcataagaatgaactctcttttctgagatgatttctgaagagggggtcagtagattcggggaggagctttgcggtgggtctcgggaatcctggagcctggggccctgaacaagtcacttagctgctgtgtgcctcagtttccctacttaccaaaggagtaaaatgtgctgcatctggccaacattcttttctgggaaaacatgcaaggagaggaagtgtgttactgagcacggcgagaagccctcgcagtgctgacggacagcagggacctcctggggacccagcgggcacccctgggctccttccagcagacaccgggtttctttttggatttcagccaggaggggtcgggtggccgaagggagagagcagagtacaggctcgatggtgggggtggaggctgagcatggagcaagaccccggctggccactcactgagcagcttggcctctgagcccagactcctcatccacagactgggtgttgcggccatcgcagccgagtcggtaaagggcctcgcctgggtctgtgacgtgcagaaagggatcagtcggtgttgctgattgtgcagaggaggacgtggaggagaggtgggcagccctagcattcccggacatgaaggctgcatgtgaacatacgtgtgcaagcatgtgcccactcacatccacacaggcacaccctcacacagcacccacgtgtctcacactcacgcccacatggtggaatgggttgacctatggcgcacaggtgcacttcctgccgtatcttgaaggctttttgcgtgactgttttataacttgtgtattttaacagctttattgagatatagtttgcatactgtaaaatatattcctctaaagcgaaatgtttcataaacttcagagcatttaggaactgtgcagccatcactgccatccgaccacccccagaggacacctcgcccctctgcagtccctgctgccagctccctggccccgaagatgctgcctttgctggatgtctcggaatggagcccggccttttgcatccagcttctcccttgcagtgggatgtttagtcctgtgcctgtgtcagttctgccttccttctcaccacggaacagcattcccacattgttttccaaaacctgtgctttgtggacctagagctccgaagcttgagttctagaatgttctcagcaggcctctatctatctcatgatagaggatggaaaccagccgtccagaagaagagagagttgggccgaggaggactccagggctcagccatgaggagatctgggcggtggtctcctcttcctcgcggcctctgcccgtccactgcccggccctgacatcacgaacgtggcaggccagcctcttccatcacgaacaggccagtcgagaagacaagacattcagaggtggggtcagtgt

SEQ ID NO: 37445 - DNA, 2300 bp, Homo sapien
aataagtatgcagatgttaacggggaaggtgcagcagcgccgtgtccatctgaacctcctgtgatcaaggaagggtcaggaggaaatctgattttgactgagacctgagaatgactagaatcagctggataaagagggtgtgtgggggaggatgttccaatgtctatacaaacctgcaatagaagagaggagcgtccaagagatggaaacaaggtcagctaaagcaggggaatgaatgtgagacagacttggtgagctgaatcacatccactcaggtcacagggcctgagccacctgaggggttgggctttgtcagggatgtcttggagagttttaaacagggcctgacctgttcactttcccatacctggcaccttcctccggagtctgtgtggctgacgaactggaaacatgacatcagcaaggggagcccttgggcctggggagggtcacccagagaagcttcccgtagcgtctggagtcgggcaggtgctggtggaggagatgggcagggatcaggtcagcgggcctagggaagcatccctcatctaattagaaagagcacagtcattcctcatctcagctggtggtctgaaaaggagatatttggaaaatcagtaagtatctttttaatttctcaggaattcggcctaatttaaatgagaagtgtcccagtgagaaaaccaaggggtcttgccgcctctcagggtttccccaatatctgcagacccagattacaaacagcagcccctcagcttgcattctgcccctttcctcctgtagaaatgggggcatgcaaagtgtctgcattgaactagcaggggcgttggccaccatcacccaggtttgacagcctcaaaggcggccagaggaggggagcctcacggtgcaaaagcagaaggtgccaggtgcaccctatggaggcagctggctggggaagatggaggcagggaactggaatcagggcaccctgcagtgtggggtgcacacttggctttctctgtttggtcctgagttggaagcagggacaaaacctaggcagctgtcagctattcatcaagtcccggccgtcttgggtctgttgtcacaggggttcccgcttggcatcctgggctgtgggtcagagttccgtctttgcacatggcactgttgtccgtttctgggttcagtttccccctccctccagtgatcctgcagggggtctcgaatgcatgcgtgcacgtcaacacccccactctcacttccaagcacccctctaccagagcctcctgttgagacttggggtgcacactggcagcacgggtgggccttggctgtctgagcaggggtaggctggtacagaccctgccagcccaagacatggggcaggaattccaggtctgggcattggcttggcctagagagtgggcatggggctgggtgggtggtcagtccctctgccctgtggagcctgtgccccatggagagggcagcagccagagggctccaggctgggcccccacagtgcagcacccaggccaggccctcagtgtggtgatgcaaccatgggggtttcaggaggacaccaagtccctgcttgtaccgggtcccgggtctcccactgtgaaatgaggcctgggcaggtggctgtcattgcttggcttctgccaaggagaccctgtgtggaactccagtgtatacacatgttaaaaaggggcagttctgcaggaagcctggctctcccccaacagccatggccacttgttcccaaggtaacttcctgaggagtatgtgaggttttgtggaagacaaaaaccaaacacaaatccaccacatacatgtggggttacagcatcgatacatcagttctcaggccagctttccattcctcggattccatgtttcttcaacaagcaggtcccaaacatgttctgctgaagaaccgtggcctttgggtgatattccacagagcctgctcaaaaacagggccagggctaagttcacttccttgggctctggagtcagcattctaattgtggagtcagcattctaattattctaattatggtgagaccttcctcttctctcaggccttcgcccttcacccaccaagccctcgtcgttcctcttcaaccccagcatccccctgggttcctgtgcaggcctcggcttccaggaaccctgccttggagtgtgtgtgtggctctgtgaccggcaagcaggaggccacggctgtcccaccctcagggctctcacatggtgagtggcttggaggacaccctccatgtggagctcagggccaccaccccgacaaggcctgc

SEQ ID NO: 37446 - DNA, 2300 bp, Homo sapien
agaagaagaagaagaagaagaagaaaaaagaatcaaaagacacagatcagccaaaacaatcttggaaaagaaaaaattggaggactcacatttcctgacttcaaaacttattacaaggctacaatgattgaaacagtgtggtactggcataagaatagacatatattgcaacgcaacagaactgagaaaccagaaactgatttctggatcaactgattttcaacaagggtcccaagacaattcaacagggaaagaattgttttttcaacaaatggtactaggacaactgggtatgtaaaagaaggggcccctacctcacaccatatacagaaattaatgcaaaatagaacaaaggcttaaatgtaagtgctaagtctacagcaaaatcttagaaatcatagctgtaaactttgtctttggattagacaatgctctgttagatcacccaaagcataaggaacaacaacaaagtagatacactggaattcaccaaaattacaaacattttttgctgcaaaggacactatcaagaacatgaaaaaaactcacaacatggaaaaattatttgtcaatcatgtatttcataagggaagtgcaaatcatgtctgataagggaattgtataatgaatactcacatctcaataacgaaaagacaacctaaattttaaaatgggccaaggatctgaatagacagttctccaaaggaagtatacaacaagcacatggaaagatgctcaacgtccttagccatcggggaaacacaaatcaaaaccacagggagataccacttcacatctgctggactaaagacagcggttggtgtgcacactgaggaaatggaaccctcataccccgctggctgctgtgattccacttggaaagcagcctggcagctcctcacaagattaagcacggtagtcacctacgatccagccattcctctcttaggtataatgaaaacatattgccacacaaaaactcatacaggaatgtccttgcagcgttattcgtaatagctaaaaaatggaacaactcacatgtcatcagcagatgaatggataaacaaaacttggcacagccatgcagtggagtattattcagccacacaaaggaatacagttctgacgcaatctgcagcacagacgcaccttgaaaacgctcaccaaaaggagcccccacagagacctcctggcgtgtgaccccatttccatgaacttccagaacctgcggggtggtggttctatgtgtgggggtgcaggagagggaatgggggtagctaccgatgagaacagggtttcttttgggggtggtgaacacaacttcgttaatatactaaaaacgaactgtacaccttaaattaggtgagttttatggtatgtgaactgcatcttaagcaattattttaaaaatttaaaaagcaagctgagcagcctggccaacatggtgaaaccccatctgtactaaaaatacaaaaattagccaggtatggtggtaggcgcctgtagtcccagctactcgggaggctgaggcaggagaatcgcttgaacccgggaggcagaggttgcagtgagaggagatcgcgccactgcactccagcctgggcgacagagcgagacactgtctcaaaaaaaaaaaaaaaaaaaaaaaaaaaaaaaaaaaagcgaggtgcggtttccaaactgcagatacccattgggaaacgtgggtaacacggttttgaaatctctactgcgtctgtaatggtaacacggtccttgcaatgtgataatgtcccaatagtttatctttataaacattttaaaacattaacaagcctttctccgcctttgttccacttgcgcctctttgcccctctcccccgggctcctcctcccggctggccctccccgctgaagtcacggaggcgctcagctggccccggggtctgggtgcgcccgccctgcccgcagccggcgaggggccctggggggtcggcggggcgggtccgggggaggccgcggtgacctcggggcgcgtgcagaccccgccctccgcgcctggccacagattccagcccaccttggcgacctgcggagccgggggcggagagaggaggcgcaggaggacccgcgacacagctcgggatccgcgcgcgctgggcctccggcgccgctcgtggggttcgggaggccgggaccctgcccgggagatgtggacgccgggcggacccccggggtccgcgggctgggaccgccgtaggttgggcgcgaggttgcgcgcggcgttcgcggggctgcaggagctgcaggggctgcgagcc

SEQ ID NO: 37447 - DNA, 2300 bp, Homo sapien
aacctgattatctctccaaactccatttctagaattttgagaaactaaaatttggcattcaggacacatgagctcctccagatttgaaaggggtttcaaaggctccaaacctgcctcatctgtcagagttttggacaaatgcatttcatttatcttcctagagttcccagaggattctggagttgctacatgaaagacgtgttgggattcttgaatacaaggcacggagggccaaggattttcttctgttctccatattgccagaggaagtgacatggatttgccagtattgcaggttttaacatctgcattctgtttatgattttgttgcttaggagatctggctaagacatttggcccctttgacttttgttcctcatctgtagaatgggaataattaagtctgcttcttgtctgccattcttgcagcggacgatggtggataaatgaacatgctttcaaacttttgagttctgacgagcagtactctcaacaaagtggaaagtgaaaaacaggttctttagtagcaaatacttcttaaaggaagtatgtcagcttcgagtgtaaattttattctttggataatcttagaattagtggtatgtagtgtttattttctttttactttaattttcactgcagttccctaacagtgattcctatttacttaatcatttgcagctgctctgctcacctgtttttctggacccaggagcagtccctcaagagttttattataatttccttctaagtccttaaaccaggaggaatgtgtttaagtgcttaatagattccctgggctttggaattttaaggagaattctgagagtagccctccttcaggaaaaggtgcatttctttcccgtctttccgtggcccgacggacatcactttcctgataaaattgtgtgggaaaggttgcaatagcattgcctttgcctcagcagccagtcccagaacttgctgatacagccccctcccccaaagttcatagccaaagcagtgggctagacatcggatgaaacctcagatttggattttctgtgttttgtgcttttcccaatgcccctgacaagtcaattgattcattgttcttgaacaaatcttcactcttctggctttctgtgtgagacagaattagggctttttcctgtaaagttataagccaaggctaaactatgtcagcaatgttgtctgcagtggatattatccagagtctgggtgtgcaaaaatttcctggtttccaacgtagtcttcgtgggtgagtttacaacctccacaagccctgtgctccccgcacaaacacctgaaatgctttgacagagctgtttaaaaacagccacatgtgtctgtgaatgatgcccaaccacatgctcccccgacttgagaggatcaaggctacagcccaggtcagaccccggatctttaggacctaaattcccccatccctgcagtggataaccccgtgtaaagatgccaaaggcgggctgcccccggcgcagcctttcctggacatgtgttcccagctgcctttgctggagcgccgctgatccttcagcacctctgagaggcaatgttctgggctggaccagggggccttagagggcagaggtcaaggagaaccccggagtctggggaccggccaaggcttggcgttaacctttgtggatgaaaagtcccgctgggctgatcctgcgcggaccgggcctggaccctggggcgtgaggagggcgcggtgcgtcccgtggttgtgcttggaagccccccgagggtgcgcgcgcgtgggtatgagtgcgtgcgtgtgcctgggtgtgcgtgtgtgtaagtgtgcacgtgtgtgtgtgagagtgcgcgcggggaaggaggcacagagacagcccggacaggccactgcgcagccctggtggcccccgctccacctctcgctccgcagacccgcgccagggaggcctctgggccgcagcgggcaccggagcggagcgggcgcggcagcgggcgctgggaggtggggctgggggaggagagggggagggagagaggcgggcgggaggggaggatccgggaagctccggggtatttgacaggagcgagggcggacgcaaagaacgcggaggacctctgggtgcctgcaggggagctgctccagccgggccgccgggagcggtggggagagcatcgcggagccgcccctccacgcgcccgcccagccgcgctcgcccactgggctctcccggctgcagtgccagggcgcaggacgcggccgatctcccgctcccgccacctccgccaccatgctgctc

SEQ ID NO: 37448 - DNA, 2300 bp, Homo sapien
aatgtttatatgatgctgaaagatgcatattacaaatagaaagtgtagttctttctcttccaacagactgaagccactatatggatccacttccccctcttcattagaataccaactcgagaaataaaaatagttcgtctcagagtttactggcagttgaatattctgtttagaattaacgtggaattcccatagccatacacatgcccagtaaaactcctcaggggaaacatcttagaacttgaaattatttgtttttgttttctttttttttcaattttgcatatgacagaaatacagaccaacattcaaattaaaaatatagcttatgacattttgaggatgtttatcttatttttgggaaatgcaatagtaatgtggcaggaaatttacaagcaattcattggatggcagagaaaacggagtaacttcaaggcgccatccatcctctggcactctcagcggacactgcctcgaggtcacagtgcccagacacccctaaacacatgtcaacggttcctatgaaggaacacagcgcagccaccccaaaccctcctctgtaacaggtactcatcagacaatgctgacttcagaaagctgaatgaggatttacacgggaatgttctcagcggtttccctgcaggctgcatatctaaaaataactaaataatatgcgtttgggaatttagtgtccccaggggataaaaaggaacacaattctcctggttcatctgccaaagccagcctttctctctttcccagctgttactgttaccatttggttacatattacattgtttccaggccttgcaatacaaggtttttcttggtaagaatcccctaggatacaaagctaacctcactgtgtggccacctcctgaagctctcaaaatcctcctttgcttgtttctcccttttggatcatctctttacaaatccacatttcttaaagagcttaagcttctcagtcatcagtttatttttatcatgtgttcccgaaagaggcaaaaagtattttctacttttgacgggaaatgatcatattttgataatagttctgaatatttctgtgcaggttttaatatcgtaaggaaaatgtaaatatgctaataattagaatatctttcatgagagagtttctcaattgaaataagaaaatattttgcactgtacagacagaacagtacagactgcaaattcaaaatttcgcctgaggtcagaatccaacatttaaacattctctacactcaggcagcctctgtctctgagccgaccagcactgtggctttctcttcgggcccttgcattgaatcagtgtttccttaaataagtccacacaaagttaatctgatcttgttcttcatatgtaagagatgatttcaagacagaacccagcgtcccttgataacctgctccgtgattcatgactcaaatattttacaagacagaaattggaggagatcctgatagtgcattgacttcaccttttaaccaccttgggatgaaaagatgatgcccaaccttcctgcccctgccttcctgtaagatcctggcctccaggatgggaaaatagctccacatatttccacaggccagcagagccatgcaagcacacaaatccagacccaagaaagcaactctgatgctgtcattgcatttttctggagataaggatttgctgaacttccaagtgtttataacaagcaagattgccggctgtacttgcagaaaaggggccgagaaagaagggttgactgatacgcacagtgtctgcagacagtgaacacctttgtgaaccccgggctggaggctggaccttaaggatctgcttgctgttcacagacacaaagaggttgctaagtgatccccctcagccttggattccaaaggacacatctgaattgctcccatttgtgagatcccattccatctaaatgctattctaaaggggtgggttttgtcataatggggatacgaatttctggtggaagaagccacaaagtacaatgtgaggaaacgtctccggtttaagggaggaataatagctgttaagtcttgtagctctgagcacttggttcaaatccagccgctctcagccttaacaacgtgttaccagaacagcccagtggagggaacggtgttatgctgatggaggcagtggtttgcataagctccttccagacgcccttcccaggtgagtgaggggagggaggtctgcggcacagacgtgagaggggtgaggggcagctccctgcagggagtcctccttcagagcagctaaacaagcctgcggctcaccc

SEQ ID NO: 37449 - DNA, 2300 bp, Homo sapien
gatcatatcatcagcaaacagtgataatttgacttcctcctttccaatttgaatgccttttatttctttctcatgcctgattgcactggctaggatttctagtactatgttgaatagaggtggtaaaagcggccacacttgtcttgttccagttgttagagggattgctttcaacttttccctgttcagtatgatgttggctgtgggtttgttgtatatgggctttattattttgaggtatgttccttctttgactagtttgttgagggttttcatcatggagcaatgctggattttatcaaatgcattttctgtatctattgagatggtttttgttgttaattctgttcatggatgtgttacatttctttctttttttttttttttgagacggagtcttgctctgtcgcccaggctggagtgctgtggcgctatctcggctcactgcaagctccgcctcccgggttcatgccattctcctgcctcaacctcctgagcagctgggactacaggtgcctgccaccacgcccggctaattttttgtattttttagtagagacggggtttcaccatgttagccagtatggtctcaatctcctgacctcgtgatccacccgcctcagcctcccaaagtgctgggattataggtgtgagccactgtgcccagcctacgtttatttcttttgcattcaaaagttctaaactaaactatataaatgttatttttcaatggggatgtttgcatcaatgtttttctacacctataattctgtgtactaaaaaaatgtgatcttaaagaataaagaaatagatatctcttacaggacacttagaaaattcaaaattttaggaaaataaatatttaaaaaattacccacaataaaaccaacaacaccttggtatatatctttccagataattttatctctctgtgtgtttatatcaagaaagatagatttattcactgcattatttaaaacttagagacaagtatgtctttgcattttgtcatatcattttagttattcttaatggattaatttattcataaaacaacatgcattttgaatatgtatgtcccgatttcccattcatactgaaaccatcttagttaagctaagcattccaaatactcttgaaatattgtgtgtccttagatcaagagagccaggaccaactgacgtattgagtcacaatcctcatcatggaagaataaaaatctaacttcagatatgaagtgcactttgtcaaccaatgaaaagatattcctgcctccaagagagacatagaatgcttgttttctgatgtttagacattttattttatagttcaaaaatagtatcagctgaaacataaaaaatgggatgatattaactggcctgagtgctcaaggctgccggtctagacatacggacttgtatgtgtgcatacgtgtacatccacaggtacagctccacctgtctgtgcctctgtccactggaggccagaaccagacttctttaatgggatagtagcaaataataataatatatattgttatcccttctttgcaattcatcagaagaaacctggcacatacttgggagttgtcttttgtattgttatgtattgtgctgtttaattcttttacatccagtgctgttagacagctacataccacattgtttttttacttacattctaatcataattttggtgtgtgtttctatagtcaaagtactgtgactccccattgcaacaaaagcaacataagcaaaaattctccaaattatgaatagcatgtgagtggatttctactgaatatattatttattaaaaagcttaaaattaagtatgcttaaaaattaatgtcagtttagggaaatgcaaaatcagcacaaaaaaaatcaggagaacattactttgttgtatttcttttaagtctgtttcatattgttaatggaaaaaaaaatctctgctgaagcttaaaaaccagacatgcctgtggtacttacaaaagtctgtctggtgtttcagttggtatgggcatgaaaccaagaaaattatcctatagggtacaagttttctcggtgattaagtctgcaatcacagttggccctagggaaggaatccatgcagcagaaaatcagatactttcaacagcagagtcgacgctacccagattcactttggtaagcaatcggtgacaacggaaaggaccggcttttctgtgcacacattgctggtgctaaggtccatgcagtgcagcctgcagcagcctgggctggctcagcattccgggcactcttccctgccttgct

SEQ ID NO: 37450 - DNA, 2300 bp, Homo sapien
gctagggttggtttttcggtctcaaatgtccctgaaggagttggagggttggtgttgacagagcccctgctgctggcatgagctgggtatcctgatccttggttagaagctgtttctgttgaatgatatcccagaactattaattctggaagcttgaaaaccacttatgtaatgtcttcagagcaatattaagggctggtctccacaggagaaatctgggccacagttacacaggatcccaccctgtttccagggagcatttgcctcttagcatttgttaagaagaagttacagtttatagcttgaaaaatataaggatggcgaatgagatcaatgggatatttcagcttttctccgattctctgtgaaacctttccttgtcagtttcctgtgaatcccgggaaactttcctgagaaaataaaattaatacacaagatagacacataaaattaatgcataaattaacacacatggagatatttatgaagcatagagaaaactttattgcctgaggcatgtgctccagaaatgtgatgtggactaaacagaaagacagaatgccgtctgaaaggccgcctccacgtttaacaactggccttcgatgaagaaagatcttccagaacgtaaatttgcctggtattaattaataggaagagttaataagacaatatagaagatcatgaatgccaaattttgctgattgtagcacgataaaactttttctcattgtagcagtaaataaaaagtgtaccatcaggagaaattcagagctgggtttagatgaaagaaaatgtcatcaatagcatgtcccaggatggagcctttcaagccaattatgtaaaattctcttgtagaaagttaatgtttattcatccatattatacgcattctttattaattttattttgatgggataacagataagataaacagtgccttttcagatgtcctcataactagaagccttggacaagggctctcttgtttctcatcatacaccattgtaatagcgtgatcatctcggcacatctcctctggaaaggtggaaaagataagctcgccttaaaacactcatttcccaaatggcatgtttttaccctctgtggtttggatcgggttgctgggagggggaagttcttataggtgagtgtcacggacaggaacgtcaatatcaggaatatttgttagccacatagaaataattttcatcacttccacacatattattttatgtcatcagtagtttctgttaacttcatcaggtattatcatcaaatacagtaggtgattaaagagggtgcacccatctacctgggatgcccggtgaggctcagcattcacccagactcacaggacttgcgaggcggtgcaggatggcaggcaggctgccttcacatctgggctcttcctcagcgtgatccaccccacatctcactgaagccacggaacacaagacaccaacctacggactcgtcagctggaggttaatctagtgagaaacaccatctgtggccactgactagagacagaattcaaagatcctctgcaaggagttgctctttggaatttgtctaaacgctgcagagcccattcctgttttagatgacaggtctgttagcatcaaggcccttagatctgggagagggacctaaacctcggtgtaggcagagggaactcgggagagcagcgatgctgcttttatctcccctgatttgctgctatgaaggaagggctttccatcttgcaggcacaagttaaaaatcactaccaaccttttttcaataaaattcaaaattccttttcactgtttccatagactttacaaagccactttgtaagactgacaacaaacaatagcttttaaaatagttttggccctgatgtggtttggctctgtgtccccatccaaatctcatcttaaattgtattcccataattcccaagtgttgtgggagggacccagtgggagataattccatcatgggggtggtttcccccataccgttcttctggtagtgaacaagtctcacaagagctgatggttttatgaagggtttctacatttgcatcttcctcattttctcttgccgccgccacataagaagtgcctttcacctctcatcatgattctgtggcctccccagccatgtggaactgtaagtccaattaaacctctttttcttcccagtctagggtatatttttatcagcaacatgaaaacagactaatacagtaaattggaaccagcagagtggggcgttgctgaaaagatactcgaaaatgtgtaagtgactttgga

SEQ ID NO: 37451 - DNA, 2300 bp, Homo sapien
ccatgcacctggcctgggtgccgcaccaggagcctgctgttctttgcaccatgaacacctacccactctctctgcctgaaatactttctcaactggggacaccccattcacgggccatgttccaatcggcttaccttctgtctcctctaaacagacttccctgattctgggctgccagattttacagaaggaggcccatcttctctgtacctgcccatcggcacgtggagtcatgaatacataccttcctgctccccagtgagtgtcacggtcttcaccgcatgctcctgaagtgctgagcagctgagctgcctgtcttcagctttaatcaggaaacacgcattctgtggactgaggaacaggagaggccgtggcacgcagagtaggggatgccgccctccatgttctggccccaggaaaaactaacctggaggcagaaaaactcaaactgatgaatggataattatccactgaaaattctttaaggggaactggtttatactttttttgaatttgagataacatcaatctatttaaactactttttaattcaaatgatgactttgtccctaatagcttaaaaagcaaaataacgtaccttaaacatgacacatacactcttggaggcttttgtctgtgcatgtgtcggaaactgatgtttgccaagtgataaataaacaggtgccattaggaaaaacagaggttttcacaaatgaaagctccttccctctcccacacccgctcgcatatcctccctgaagacagaggccagaaagtgaggcttgctcttcatggtgcctgccgacctctgcagcgctggacccctgtgggggaatgccaggaggcttaagagacactcccctgccacagacacagtaagggttgtgtccacagaaattcgctttaatgttctctaactaggacttgacggatccatggccaggctgacaactccacacaaacgtgaaggaacctgacaggcaggtgccgacatgaagcaggtgcaggtggctccgggcaaagcagcagctccccagtcaccatccaccccacctggggaagtagcacctcccccatccaaggtccaccccaacccaggagaagcagcagctcccctgtctgccattaaccctgacctgggagaaacaacacatccccagccaccttgcacactgacctgggagaaacagcctctccaccatccacctttcacactggcctgggagaagtggcacctcccccatccactgtccagcccaacttgggagaagcagcccctcccccatgtaccatcaacccccaccttagagcagcagcttcccctttccactgtataccctgacctgggagaagcagcccctccgcatccatcgtccaccctgacctctgagaagcggtgccccccacccccatgcagagtgcaccctgattgcgggtgatgcctgaggtgtgggaggggcgggggttagctgctgccactgcttctcgttctctcgagtccttgctctgtgcctgcacgtcaggttgttcctgtgatggggccacgtgcaagtgtgcaccaaggggacttggccgggtactgtacgtccactgggacacacccttctacgggtattgcacgtccactgggagacgtccttctaggggatcctcactgagcaaatgaagcagaatttgggtaaaaatgaattttcccaaagctgcagtacagcttttcagtcctctaactgcctgagataaatgttggcaacttccttttatattaaatttcatttttgtcacataatacacttgattattgaccataataactttattaatatacagactgattattgatactcaccgatgtatttcatgtgttattgagagtcactcatttggtttagaaagaccaatatcacattgagtaattcgaaacatatttaaggcatagaacttgcatttttttctcttaagcaaaatgaggagttctagccaatcttgctagtgttatttatagcatcttatttcctgagagaagacaggaaaagtgagtccctgccttccctctctccgtctggctcctcccaggcctgtctggcaggggccggggtgcaggaggaggagacggcatccagtacagaggggctggacttggacccctgcagcaggtactcggagcaaatggtgagatcagaagggggatgatgtcattccttcgaaggaatgaattaaacgtgcttcctcgtgtgtctgattgacagccctgcacaggagaagcggcatataaagccgcgctgcccgggagccgctcggcc

SEQ ID NO: 37452 - DNA, 2300 bp, Homo sapien
aagcagtgaagactggtctttgtccttatcctcatccttatccgaatggcacttagatgtacttctttagaaattgggcatgacagcagcaggaggcagccaatgcccaggcagatggggtgggtccccagtgaaaccccacctccaagcaaaagacagtttaaagcctgaaagccaagctacaggttaaatctttggatcagattgagaacttgtcttcctgtttggcacgctttcctctgattggtccccacccttcacctattttacatttacctaccctttcctaattggtttttctatgctgtcatgcccacctttgagtggtgtcttcctttaaccttttttggattctcacaaaccaatcagcattcactccccattctgagtccataaaaggccccggacccagccatatggaggaacttacccaccttgggtaggaagaccaaccccacatcccccctctactgagagttattttcagcactcaataatattcttttctgcccttctcatccttcaatgtgcagagtatcctcattcttcttgggcatggtacaagaactcaggaaccaccaaacatgatacaagctataacacaggccagttggggcatgccagcatggccgagtgggacccaggtggagcactgccagctggggctccctgctctgcaacgtgactgagaataaaaatcctacattggttttacgtaacagaaggtgaacatctgataagaaagggtgacaaaaggaaaagtcaaccatgcagatgtctctgggtatgtgggggagtgactggtctcaccttgactttattctgcacctgggcaggtgggtttgtaattgacacgaccagtgtgcaactgaacagactttagttttaggagctggacttagactgcagtcctaaagtttcaattggcctgtcctcattcatgagaggccagcagagaattcacgcagggatcatctgtgtgggcagcttttccagatgcctgaggcctttcccattctctttgggtctggctgatacatgatgttagtgacagtcaattcatttggaagagggagtgcaatgactttcccttttgcataagaagttttgggggtactgagatttttagtttcctttacaagaccttcccgcaaataagtacaagaggacccagagtgtggggtgtctggctgtctgagcagttgggccactgacgctgaggacaatgtgagaaagcctgtcctggtggaagggagagcaaaggtggagagaaaggaagctccatgttagtttttgaaacacaccacagctgaaggtcagtccccaaagctggttatggttgaaagggaggaaaagctgctcccacgtggctctggctgaggcttccgagactctgcaggtgggggccgtctgtcttccccaggtgggagctacttctttttagaagcaggctccacggcggttttcaggtgtggccttgcccagcgtcccgatgttttgcttcctgcctggcctcggcgctctttgatgacctcctcttgccacacactgtggtctccataggctgcccactgctgatccgaggctggtggcccccagcacacgtgggtttctgaggaacacgctgagactctcgggccatgccgtgacacaggggagacagcgtctgctctttttccatttttgttcgttttcagtgctctgaccctcaggaagcccacttaagcatcccagaatccagacggccgtgaacaaagctgctgtggtttggggctgcaaaactggcccacagcccacctggataactgaatcgaacatgcctcagccgccctcaccacaggcaccatccccctcacagaagtttgatgtctgatcattcagcactggctgagcctcagagctaaaatggaaaatgcattttatgagcagataacacatttttggaatggctactttaaacattgtggatacagattcacagagactatttttagatgaattatttcttctatttaccatactgatttgctggaagaaagaaaaacaatattttaaaaagggaaaacattctttaaaagcagtgactctaaatttcccctgaagagcaaaatgctgtctgtgtctcactcaatgtggtggctgctacaggaggatcttcccaggccttctcagggaattcccatcaggatcacaggaatggtacctggcagacacaacccagtctgcaccttccatgggccacagctgatggtacgaggagaggtgtgacatctgcctgacctcaggtaagtggtcaggtt

SEQ ID NO: 37453 - DNA, 2300 bp, Homo sapien
cagatccacctactttgctcccttctttcagagcgcaggtagccacttgctctcccagagagtgctgcagcggtgatgatcggtttcccccctccccacctgctcagtcctgcaaagcctggactctgctccaaggcctttgggacccaacacctgctttccagcctcagggcctcaggcctgagaccacaggggctcttcccggcggctgtacctcctgccattcacctgctgatttcttcctcatctgtttattcctctgatccaacaaggtcaggatggtatgcaaccgccaccccccccccactgcccccaccaccacagcactgccacgacccttgtctgggacggatgatgtggggctgcacttcctctgtcggccccctgccctcgtcaggaggcccagcatgtagcaggcaagcagcaggcagcaggcaggtgctgagtgggtgtggaaggtgtggcccctcacacctctgtgtcctatgctcagcgctgtgcttgggcatggcgaggcctcagcagatactgtgcagcacagtgacaccaatggaacccagtaaaaagacagtttccaattttcctcgctgctggggcccacccagatcctggagcagagcatggcctgcaggaagcacaggctggtggactgtggctgtgtcacggcgagcttccagtggctctcgcagaactcaattggcacggtaaagggacaaatgaagtttccagcttttttcttttaatagctcagatatcaattttatagctctgatggacataatttataaaataagtctatatcttactgtaaatttgagacggttaacctttaataaagttaataaggggcttgtcaaaactcctgagctgaactttgcttgctcgttacataataacaacgaagtgattttaacctaaactgcagctattttggccatttaaaggtgaggaaagagaggggatgggcaggaaaagtagtttttccatcgtcctggaagaactgccaggtgaaggtgatggggaggctggcgttttaattcctctaatggctcagatcagctgcacctgggtgtgtgtcccttgctcatcagcgcacgctggcgggcctgcggaggcacgaggtgtctttaagccgagagcaggaagcaaagtttctggaaaaactgaggggcgcagggagcacggactgggtcttcaggagcagtgtggctgagctgtggaaatggacacatccactgtcccagatattatgaaaatgaacccctcactctgagctctttcgagaggaatcctcaagtatggagcccaaagaaaaagggctgtgtccatgcctgggctgggctctgcaagaatgcacaacaaatcaccaccccagacaaacacttccaggcacctcccgacatactcctaaacacttccccaggcactccgggcgcctccccacacgctgccaggcgcctccccacacgctgccaggcgcctccccacacgctgccaggcgcctccccacagactcccaggcgcctccccccacgctcccaggcgcctccccacacgctcccaggcgcctccccacacgctcccaggcgcctccccacagactcccaggcgcctccccacacgctcccaggcgcctccccacacgctgccaggcgcctccccacacgctgccaggcgcctccccacagactcccaggcgcctccccacagactcccaggcgcctccccacacgctcccaggcgcctccccacagactcccaggcgcctccccacagactcccaggcgcctccccacacgctgccaggcgcctccccacagactcccaggcgcctccccacagactcccaggcgcctccccacacgctgccaggcgcctccccacagactcccaggcgcctccccacacgctgccaggcgcctccccacagactcccaggcgcctccccacacgctgccaggcgcctccccacagactcccaggcgcctccccacacgctgccaggcgcctccccacagactcccaggcgcctccccacacgctcccaggcgcctccccacacgctcccaggtacctccccatggtcccagctacctccccacagattcccaggcgcctccctgcacgttcccagacaccttcccaggcgctgccagcctcctcctgcgcacagatcgggaggtccctggacttccacttgttgagctggactcaagccggatcgcctggaggatattctcagggcacagcggctgcctgcgcctgagcagtgctgaggagatgccaaggtcaggcatcag

SEQ ID NO: 37454 - DNA, 2300 bp, Homo sapien
gttgaccgctgttgccttgtcttctcacccagggcatgtgggacgtgctcttggctgtgaagctgtggggtgtgtgcagagagcctggggcctggggttcccagaggagcatcttggggaggcctgcacagtaggatcctgcccatgtgccctgagctgatgtgccagccgtgtgaaagtgctctgacaccgtgggccgtacggagggcctccagaggggatgttgaaggcaggagacagctgtgccgggagcctctgcaggccgtggagggcccgtcctgtgacgtgtctgccctccctgctccacctctggtgttgctgcttctgcgtcaggacccttgctgcagcgccatgtctgcatcttctttgcttttgtagctttggatcttcagtttgatggatggacaccattatcgtcgtgtggcacgggttgacctaaggaagaagacagagactttctccacaagaagggttaagtctgggctgtgcagccagccaggtgggttgctcagaccctccctcaggcctcccacttggcccagatctttcaccaggcgccatgtcaagggccctaggtcacacaggggagagagagatcccaatgtaggagaagccaagggctgcaacctcagaaaaccactgaggccctgcaggtcatgtgaggggtgggccatcagcagatggaggcacctggtgtgggtggggacgggggtgagaggctttggtgaacagaagagcagaggcaccaaggcagcagctttgcagctatgggttgctttcctgcagtgggtgaccaaggagggcaggtcatgctgatcagaaaggtacactgcatgactcagatgccacctgcacctacccagcaccctccacgtccccacctggcctgtgaatcttagacgccacctacacctgcccagcaccctcacatcctcacctggtctcctgcgcatcacagatgccacctgcacccgcccagcaccctcgtactcacctggtctcctgcgcattgcagatgccacatgcacccacccagcaaccttgtcctcacctggtctctggctgtccagagttgcttcctgttgacgacagctctcctcaggtgcgctttttatctcctgtactgtcacaaaggagctgaccctctcctggaagaaaatgttgattttacttttcaatccaggggccacctctttcattggtgtgtgcagctgacgtttcatattacagaaatcatctctgggctcacagcctacactctcttcctcattctggttactcattctttcttttaggttgtgtttttttgtagatgactttaaactatttcttttcatattaggtctgaaattacttttatccagtataccaattttttcctgatgttttaaaccttggtttttgttatttatttgataatatctactgctgaaggaaatcttaaacttagttttaggaaatatgaagttaagttctttcaattgattatctcctctttcccactcccttgctctggttctgcacttgaagttgcattgctcccaggtagcgtcatgctgggtgttaccttagtgctttcctcgatgcgtgatctgagtgactccatggtgcatacacatcatcctgggtgttacctttgtgctttcctcgacgcgtgatccgagtgactccgtggtgcacacgcgtcatgctgggtgttaccttagtgctttccttgacgcgtgatctgaatgctccgcggtgcacacgcatcatgctgggtgttaccttagtgctttccttgacacgtgatctgagtactccgcggtgcacacgcgtcatgctgggtgttaccctagtgctttcctcgacacgtgatccgaatgctccgcggtgcacgcgcgtcatgctgggtgttaccttagtgctttccttgacacgtgatctgagtactccgcggtgcacacgcgtcatgctgggtgttaccctagtgctttcctcgacacgtgatccgaatgctccgcggtgcatgcgcgtcatgctgggtgttaccttagtgctttcctcgacgcgtgatccgagtgactccgtggtgcacacgcgtcatgctgggtgttaccttagtgctttcctcgacgcgtgatccgagtgactccacggtgcacattcactgcagcatctctgtgtggcagtcctcagcctttaaacttgacggatgcatttaagttcacttcttagattctcaataattctgtccctagaagaaagccagcttccctctacaagtgctctgggaaaaggagagcaggttgaagtaacat

SEQ ID NO: 37455 - DNA, 2300 bp, Homo sapien
gcagcaaaagtgagggccactcacgtgaccctgaaaacctgctgagaagagggctgtgagcagacgtcccccgctcccacgggtgctgcccgcgccccggagaggcgccctggacggctcctgtgtggcatcccccgtgcccgcacgctgcccgcgccccggagaggcgccctggacggctcctgtgtggcatcccccgtgcccgcacgctgcccgcgccccggagaggcgccctggacggctcctgtgtggcatcccccgtgcccgcacgctgcccgcgccccggagaggcgccctggacggctcctgtgtggcatcccccgtgcccgcacgctgcccgcgccccggagaggcgccctggacggctcctgtgtggcatcccccgtgcttcttgtgctcccctttcctgtcatctttacacactgttgaaaaacctgaagatgttggcctttttcaaaacattttttaggtgagccttttaagttcatttcacaaagcctggataaagttgctgtttttataatttgaaaaagataattttgaaaacttagattttttttttccttttgacaaagttgaccgctgttgccttgtcttctcacccagggcatgtgggacgtgctcttggctgtgaagctgtggggtgtgtgcagagagcctggggcctggggttcccagaggagcatcttggggaggcctgcacagtaggatcctgcccatgtgccctgagctgatgtgccagccgtgtgaaagtgctctgacaccgtgggccgtacggagggcctccagaggggatgttgaaggcaggagacagctgtgccgggagcctctgcaggccgtggagggcccgtcctgtgacgtgtctgccctccctgctccacctctggtgttgctgcttctgcgtcaggacccttgctgcagcgccatgtctgcatcttctttgcttttgtagctttggatcttcagtttgatggatggacaccattatcgtcgtgtggcacgggttgacctaaggaagaagacagagactttctccacaagaagggttaagtctgggctgtgcagccagccaggtgggttgctcagaccctccctcaggcctcccacttggcccagatctttcaccaggcgccatgtcaagggccctaggtcacacaggggagagagagatcccaatgtaggagaagccaagggctgcaacctcagaaaaccactgaggccctgcaggtcatgtgaggggtgggccatcagcagatggaggcacctggtgtgggtggggacgggggtgagaggctttggtgaacagaagagcagaggcaccaaggcagcagctttgcagctatgggttgctttcctgcagtgggtgaccaaggagggcaggtcatgctgatcagaaaggtacactgcatgactcagatgccacctgcacctacccagcaccctccacgtccccacctggcctgtgaatcttagacgccacctacacctgcccagcaccctcacatcctcacctggtctcctgcgcatcacagatgccacctgcacccgcccagcaccctcgtactcacctggtctcctgcgcattgcagatgccacatgcacccacccagcaaccttgtcctcacctggtctctggctgtccagagttgcttcctgttgacgacagctctcctcaggtgcgctttttatctcctgtactgtcacaaaggagctgaccctctcctggaagaaaatgttgattttacttttcaatccaggggccacctctttcattggtgtgtgcagctgacgtttcatattacagaaatcatctctgggctcacagcctacactctcttcctcattctggttactcattctttcttttaggttgtgtttttttgtagatgactttaaactatttcttttcatattaggtctgaaattacttttatccagtataccaattttttcctgatgttttaaaccttggtttttgttatttatttgataatatctactgctgaaggaaatcttaaacttagttttaggaaatatgaagttaagttctttcaattgattatctcctctttcccactcccttgctctggttctgcacttgaagttgcattgctcccaggtagcgtcatgctgggtgttaccttagtgctttcctcgatgcgtgatctgagtgactccatggtgcatacacatcatcctgggtgttacctttgtgctttcctcgacgcgtgatccgagtgactccgtggtgcacacgcgtcatgctgggtgttaccttagtgctttccttgacgcgtgat

SEQ ID NO: 37456 - DNA, 2300 bp, Homo sapien
ttgaaattcacgtggatttcacggaagggtttagctgatggggcctcccaggttctgggaccttgcccagcggtcttttcttttttcctgtactcctttttttttaagctatatcttcaatttagtttacttttataaaatcatatctttatcttgcaattggaaaaccactggtatcagatagcaatatttatataaatattaaaactctttatggaatctgggtgtcaggtatgactttagagaaacatgttctgcaaaactattatttctcagatattccctgattgtaggcatccttcctagcatagcgcttttgtttatatcttttatcaaaatgttcttttcatcaagaatcagacttttcccaccagggttagttaaaggaaatgtgtcacctcttcctgcctgtgtgatttcgacctcgtgtgtgactagaacagtcagctgccccattgcaatgttagaaagcagtgttagaaatcaggaagtgggaatctaagggaacacgaaggaggacttttgtttcctctgaattgttgctctgcccaagcctgattttgtaggtgaccccaggcctggggtcgttttgtcaacatggctcacaaagctgttggcctgaatagcttttcttttgatagccacttaataaacgtaggcgaggaaggatgttcggcatggaatgtgaattggttctcatgggcctcatgtgtaataggcgttttgggagagaagacatttatgtcttcagactatttttggactaattatgaaattaaggctcataaatttaaaaagttcacatcatgagttaagccacagagagatgatgggaagtatctaggagttaggtaaagggcttcacactatttctagtctgtctgtgaaagctttctggatatgttggtgtttgagctgtatttcatgttttgttgtaaacatcctgtgatagattaacattaggccaccccaccatttataacaaaactaccattaatgtgcaaagaattaacattgttgtgtcaggaaaaggaaaaccaaagtgaattaggaagaagcagaaaactgttagtgtttgaaggaagatactgggtcccagatggagagaaccatcagcctggggtcaggttggagccacacccctgagtcaggcacatagcaggtgagtaagcaggtgcctgctgcagatgtgtgtgcagcccgtgagatcctccccacgcttccttagcagcaggcgtgtcaactgaaagacacttcactcggggagaatgactttcagacatgaggaatggttgtcacgtgagtccgtgaagtgctcacattcttttaacagcatactcaacaagtcaacagtttataccatttgattttaaagatttcaaatgaatactgagcatttcctggtaaaaggcactttttaatcaacataaaatgtcaaaaggaaataacttaaatatttttcaggatatgatgttattcatatcatagacaatggactagctttattttatagaaactggagaaaatggaaatgtatatttcataacactcagtgtcataactctccctattcctacacaggttatagtcttgccttttatttttaacaatctgatggtaactggcataatgtactcagtattctaagttgtatttgttgatggcgatatgtcgtattactaaagaaagtcttccagagttaaatgtctgtttgtaagttaagtcaccatatatatacatgtttattttttctgcatgtatattaagggatatttgtcttatttagatggagtgctgtaaaattcaagaacagtgcccagcacttcgtgcctggagttccctggggatattctcagggcgatgactgaccattaggaacccccgatgctctcactactccattcctcagtcatgctgttcaagcctgatttccatataaacgggaagccctgtgtgtctccagcttgtgacgctgacttctggggtgctgtcttggctgtcggaggttttagggacttgaggaggaaagggtaactcatgagcgcctattgccgcaccgtcttgtcttgtaggaagccctaggtggagaacagatgctgagggattgggaaggcagagcagtacattctgagttacaggcggggagcctcagggcagatgcatggggcagccggtggggagacaggattcctgaggagacgccagcttcctaattcgctcagggttagctccagtcagtgtcggcttttaacactgctgagactgtgcctgtcgcctgagctttcctcttagctcagaca

SEQ ID NO: 37457 - DNA, 2300 bp, Homo sapien
tccaccccagcatcacttcaaaactgctatagaccagtgtctgccatgtgtctcccttttccaaaagggagatggttacaaaaaccatggtcatatttaaccactgcattttagtggggagagcaactagtttgtcttcttagtccatagggctctggaccacgaggaaccacagccaggcctgatggagagaactgtgcaatcctgagaaatgttctgtgttgcactaggcaccttgacaaagtgtcccccttggggtggggagagtgtgttctccatgtgggatcaagagtggagcagagatctggtcaccagaagagagactacggtaagtgctgttccttttccactaagccacttccctttccttctagacacagaactaaactacactccctagcttcccttgcaattaagtgcagccatgtagtcgttgagtgcctggcccataaattcctcctgcactgcctctcttctttccccacccactggctaaatgcggagaattcagagggcctaaggaaaaaaaccacaacatggaagaattttaggctgcagcttgcagagagctgcccaaaggaatcgtctgactagaaaccgctacacaggactgtgtgagcaagaaacatgcaactgttctattggggtgaattgctacagcacttaacctacctccactaatataaattgtttaacatttttttgaattacaaaagcaatacaatacaaaacatttaaacaatgcagaaataataaagttttttatccctacctcctctccctgctgtgccaaccctaggggataatcaatgtcacaggatatccccaggaatatccatgtacatacatgcacagaacaagtcagggaaaataaactaaatttattattttagtgagattctagtgcacctaacactaggtaagcacttcaggaaaaggcagtgacaagtgattgctaaagataccatagtcttaaagttaagtcagtaaacacaagatagtaatcccagataaactggaagctgtagagttaatactcctttactggtacagagcagtgtgtgtaaattgtagaaaatttagaaatacataaaaagatgaaaactctactactcgaggagtaccactgataaaatcctgtgcatttccgtttttttaatgtacatacgaatatttttaaaaagagaaaattactcccttctgattagaaaagatcgaaatttttctcttttagtgataatcaagtcagaaacttgctgtttggctcgagttaggaaaacctagcctggtagttaccacgcaggttgaaaggccagtggggcataattaacgagccctcagggtccacgctcccgccctcggagctcagaaccgacgggaggtgcaggaggccgggcatttctacagccctggttcgttcctaaactactgaatcttttaaagagatctgagtgctccttatacacagctgctttaattaaaataaccacctgagcccttttcctccgaactccacatgcgctcagttctcaaagcgccgatctcaagcggccgcccggatgctccggcccgacttgtgccccgaattcccctggagaccctcgcactagcacggcgtcaggaggaggcttcgggtgacgagacagcgggcaacggctctggtccagagcgcgcgtgtccgccgttggaagcggtcacggcggaaccctcaaatcgccccctttcctagagacctcagcggagccgcgagcaaccgcgcagcccccgcgctccagccctgcgccctaggcacacgccccagagcagcagctcgggttcggcgccgactccgcgccgagaccagcccgctaggggaggactcacagcacccagctcccaggagggcacgcagaggactaccgagccacactccgccccacgctcgccgctatggttacttgccagccgacccacgcgagccgctatggttactagcccgccgcccctcgcgcccacgcccctttcgctatctcgcgacagctggagaagcctcgcttccggccggctcacttacggacctagcgtcacttccgcctccggcgaggctccggcctcgggtccggatgtataaagcgcggccccctgcggggagtggtggtgagtccgagggtgccacagcggccctgcccctgcccctgcccctgccctgagtgggcgccgcgctacgggggaggggttaacccacccctcctccccggggcctcacgcgggtgggaagggacagtcccagcgacagaccaggcgcctggacgcgccgtgga

SEQ ID NO: 37458 - DNA, 2300 bp, Homo sapien
taactgtttctccatagccccaaaagttaattttcatgaaacttcctaatctacattgtttccggcctaccataggtagcactgacaaagttatttaataactgaagaattttcataggtatgacaaatggcccactaagatttggtgcagctggatttagagttgtcattattggactggtacaggaacaaactttgtaaatacctgcctgccaggaaatcctttttgtatagaaaagtaccatcacctacttggggtacaggcatgaggctttagtccaggctcagggaagtgtacgtaaatcatttccaacttgattttagtaactcttgaaaacttacaccaacttcggttagaatctccagagtaaaattacaaagttatcaaccttttgatttgtgtcacagcatgaaaggttgctctattttatataaacctgttactgcaatcatttttagtcaacctgcctaatgaaaatggagtctaaacactttgtgcacagtccttttataggaattatgatctttaaaatactgtgcttgctgcttttcctatttttggggtaactgaggtaacaaaactgcgtatggctttatttttccatcccttgactaaaggtacctagaacttcaaccaagtacaagtagcaaggttcacagcaaactgcaatcagcttcacagatggagggttttatatcccagagtgtggtcaacgactcaaaagagaatttcaagtaccagtttcaaaatgctaattaatatcgtccagagaacagattcctcctcttgcgaggcgtcttccggggcaccagcgtgcttctggccggcatctgcgccgtcggcggggtaggcggcctcgccgaacgggtgctgctcgaccgtgccgtcgtagtacaccttcatctcgaactcgctctccaggtgggaggggtgtccatagacgccgatgcccactgggcgccggaagtgcgcggggatggacacggcgtccgggccgcaggtggccgattgcagctcgtagtcgtcgaagctggggtgcaggctgctggcggagacgtacagatccgcatctcccttgaggctgcgcatcctgaggactatcttgccctcgtggttcagccgcaggtagctgtagttcccggcgcctatctggccctggacgacgtgcaggagcacccactcctcggggacctcctcctcgtccgcgcagcttcccggagacaggacctgcgaggctaggagcagcagcagggccgtcgtccagggcgcggccctcccgcggggagcggccatggctggcggctcagctccggggcctgcaagtgggtcagtgctgctggggacaccggaggcgctcagcaccggagcctgtccccgccgtccgcacgcgggtccacggcgcgtccaggcgcctggtctgtcgctgggactgtcccttcccacccgcgtgaggccccggggaggaggggtgggttaacccctcccccgtagcgcggcgcccactcagggcaggggcaggggcaggggcagggccgctgtggcaccctcggactcaccaccactccccgcagggggccgcgctttatacatccggacccgaggccggagcctcgccggaggcggaagtgacgctaggtccgtaagtgagccggccggaagcgaggcttctccagctgtcgcgagatagcgaaaggggcgtgggcgcgaggggcggcgggctagtaaccatagcggctcgcgtgggtcggctggcaagtaaccatagcggcgagcgtggggcggagtgtggctcggtagtcctctgcgtgccctcctgggagctgggtgctgtgagtcctcccctagcgggctggtctcggcgcggagtcggcgccgaacccgagctgctgctctggggcgtgtgcctagggcgcagggctggagcgcgggggctgcgcggttgctcgcggctccgctgaggtctctaggaaagggggcgatttgagggttccgccgtgaccgcttccaacggcggacacgcgcgctctggaccagagccgttgcccgctgtctcgtcacccgaagcctcctcctgacgccgtgctagtgcgagggtctccaggggaattcggggcacaagtcgggccggagcatccgggcggccgcttgagatcggcgctttgagaactgagcgcatgtggagttcggaggaaaagggctcaggtggttattttaattaaagcagctgtgtataaggagcactcagatctctttaaaagattcagtagtttaggaacgaaccagggctgtagaaatgccc

SEQ ID NO: 37459 - DNA, 2300 bp, Homo sapien
ggttattaatattttttgtgatgttcctctttgccttaacatcctcttccctttcccccagctctggcaaaggcaattattaaaaattgtagaatattttcttcctgttctataatgtgccatcaaagttggtcttgctactgagtgtaattaaaaagcaattttatgatagtaaaatacatacatacataaaattaatcattttaacaatttttaagtgtgaaattcattggcatcagttacattcacagtgttgtgcagccattaccaccatccatttccaaaactttcactaccccaaactttataaccattaagcaataacctccctttctccctctatttagcgccttgcaaccatcattctactttctatttccgtgaatacgactacttagttacttcatataagtggaaccataaaatatttgtccttttgtggctggcttatttctcttagaactttgaatatcttcaaggttcatctttgtagcatatgtcagactttttttctgtttttaaggctgaataatactccattttatgtatatactgattttgtttatccattcagatgttgatgggcatttgggtttccaccttctggccaaggtgaataatgctgcagtgagcattggtgttcagagtttgtgttttcagtttttttggatgtttatctaggagtggagtagctggattatatggtaatcctatgtttaattttttgagaagctgccaaactgttttccataggggctgcacaccaatttacattcctaccagcaattcacagtttccagtttcttcatatttctcaccaatttgttatttttcattttttaaaataatagttaccctaaaaggtgtggagtgatattttattgtgattttgatttgcattttcataatgcctactgatattgaacatcttttcatctgcttggccatttgtatagcttctttggagacatgtctattcaagttctttgtccattttttatttggggttttttttgttgtaggagctttttaaatatattttatatattaatacttcatcaaaaatatgatttacacatattttctcctgttctgtgggttgtcttttcactgtcttgatagtgtccctgtacaaaatttttaattttgatgaagcccaaatttttcatctattttttcttttgttgcttgtgcttttggtgtcatatgtaagaatctaccttcaaatccaaggttgtgaaagatttctatgttttcttctaagagttttctagttagctcttatatttaggttgttgatccattttgagttgtgatatgaggtaaaggtccaattttatacttttgcatgtggatacccagtttcccagcaccatttttgagaacactgttctttttgaaggttactttttaaatagatggatgcataacatagtgtcactttcccatgtccaatatagaggttgaattggcccatatcctgaaatctgtactctgttactcaggatggagatcgactgtgataccctggcaccttcaaactaggtccattctttgcttctgggtttgtggagtatctgagaacaaacagttacggtttatgatatgatgcactgagataataggtttttaagagttctgttttctcagctatttatgactcactgaacagtagacaagagacagaagttgattattctttgggtggatgaaatactggctatgcattttaagcccaagagaaagaagtcagagctgataccatcatcaccttgctttgccctcataggtcctttaaactaaaaatgccttcgttcttagcaattgtgattctacgttcttcccagtgtataaaagatgttattttcacatacctttttgacttggtagaccagataattatttctattccttgtacctgttttgtaattttctttgatacacaggaagtcaagtcataggaggcaaataatttaaatacttaaaatagttttcaaaatatcctcaataaaagtgattaaaaattaatgaaagctacatttaatgcataatatgtatttctgtacttagttttagttactatccagcagaaaacttgatagagtacaaatggccacctgatgaaacaggagaatactatatgcttcaagaacaagtcagtgaatatttgggtgtgacctcctttaaaaggaaatatccaggtactagtttatataatagattaatttataattgatagtaattctttatgatacactgtcaacttctgaatttttctgtagattatattttatattctt

SEQ ID NO: 37460 - DNA, 2300 bp, Homo sapien
aacagacaggtttgccaaacatgacaaatttatttgaaagtgggcattgcaatgtagaatatggtgtcatagtaaactataggtgtattcagggaggtaaaggaagataaggggtttaaaaggaaaaacgaggaggattacgtaagttgttttgaaacaattatccttggctacaaagatcagtaacaaaggggatggccagtccaaggttggacaggcagttgctgcgcaaatgtccttgaagcatttttttgtgtagttttgtggcctttgtgcaaggttgtggttttggcagtcttttgtgctaattctttatatcaggcaattattagtgagaactttcccatcacggctttccctgactccattctctgacagctttcacaatctagagacagaatcccggagggagaggagtaccaaatagcttaagagtttttttttgtttttgttttttttcttaaaaaaaaaaccgctaaactctaccctgatcagtgaaaagaatttagctgaaagatgcagtttcttcttggcagattcagacaagaagtgcggcggaagcttacacctgcacgtggtgggacagaggcaagaacggatggtctggctgaggctgagagaaccaagctggattaggatcggcttgagggcccggcgtcgtcagtggtgacctctctgacctgaggcaagtgagtcaggctggactgagcgtgttaacgtcggtgtttgtcaatgtgacgcgctagaataatccctttatctttcccaacttttgtttgttgagtgtaggcaactataatgaatggaaaggaaaccggattgtactttaaatccgagaacattctctactctccagaacaagtcatctgcaggcgcaggcagtggaatccgtgaggccagctgtacggcgggccgccccggacccaggcttggctcctcactttccgctgtttttagtgcggtcctacaagtgccctggtgcagcccgagatcagtaataaatgcagctgaaatacaccggctcccacgttctcgcgggggtacctgccaggccggcgtccacgctcctccccggctcccggccgaccgcgttctcggcggaggcatcaaccacgcgggcacgcaaagccacgagggccgaatctcagcgacttcttcccgctgtgcctcccgcacgctccggggcgggcgccgacagcccccgggtgcagctgcggatgctcggggaagcgtggcctgggcaggtggctccgctgctctctcggagcgccaccagcgagaggggcgacccgagaacaaaggcgggagaggagcggcgaccgcgagcgcgtagaggcggaggccgcgcagtctccgcgcgactgctccgggcagggcgacccccggcagagagggggcggggcggggacccccgggaggggcggggaggggcgcggcgggggcgcggagagagggagggaacgagggtgacgcgcggaggggccgggccgggggccgcggggagggggcggctgcgagcgcgccaagtggcgacgtgccgggccggggcgggccggagggcgggcgggaggtggggcgcgccgggggctggggggagccgcggccgagtacaacgccgggccgtggggagccaggcggcggcggggctgaggcggccgcggggctgaggggagcggcggggctgaggcgagcggcggggctgaggcgagcggcggggctgaggcggccgcggggctgaggcgagcgagcggcggggctgaggcgagcgagtggcggggctgaagggagtcgcggcggcgctgaggccagcggcggagctgtggggggcaacggtgctgaggcggtggccgcggccgggcgggttgggctgacgtgagaagcgccgccgccgctgggcctcctccattccggcccgcagccccgcgccctcccagcctttggcgccctcccgcgcgggcggcgcgctggcgacggccatggcggtggcggcggcgctggcgggccgcggggcgcgcggcggcaggggccggcccccgggcgggcgggcggagggggcggggccggggcggcggggggcccgcgcggcggcggcggcggcggcggcggcagcggcggcggcggccgggacaaggcggaggcgacggcggcggcggcggcgcggggcgctcgggctgatggcggcggcggccgggcccggggctgcgctgtccccgcggccgtgcgacagcgacccagccacccccggagcgcagtccccgaaggtgaggaagcggccggtgcgacccgaccctgaccccgtc

SEQ ID NO: 37461 - DNA, 2300 bp, Homo sapien
taatttattggaaagatacagtttacataacagcagagaaggctgatgaaccagattcagaaagacacagggaacactttagcttctcatcttcaatgtgaataaacctcaatcattttctttgcattatttcaaagaattcatctaattagcttagtttgggtctcatccttattaaaaagttaagggaagtagctgacaatctcaccaaagctctatacaattgcagatgagttaattctctaaaagttaactgaggtgctaccactagaaaaaaagaaatggaggcaagacagataaaatcaagagatggtcatattgatgaaacagtatgtcttaaattttcctatgctccaaaatagggaaattaacagctaccttaaattagaaataactaagtgaacagtttcctcaggtacatttagtgagcatttgtagagtcctttctcaatttcttcccaattattgttctattcaaatttctcacctctaaaagaatcaactttaaagatagctataattgatcacatccatatcaaatactaataattactttggtccatgtcccctcactcccagattttaacctatataccaggtgcacctatgtgtctcctcattttgagttcaggctcattgaattttaaagaccacttcagacctcagataggcagtaagtttataaaagccacccttgtctgcctcaatatatagaaatttttctttactgttggtgacctgttactcagactcattgccaagaaatacagcatagtgtttgggagtgtgaagttttaagtccaactgatttaggtttctagccctgctctgctctttttcttagctgtgtaaacttggcctgtttgcttttcctcctttatttagttcgttctttcctctgtaaaatgtagacaccagggaaacaagaacctgaaatttcgccattattttgagaattctctttttaagagtaatcttaaaatgttttagggtcttcaaaaaattgttttgcctgtcatctctatcttcatcctattataggtccacgaagtaagtacgaagagaaaccagtataggccaattggaccgagtactagcatacaggttctggtcccagctctatcattacagctttgtatccttgggcaaactaattttctgttaaagtatcaataaaatatagagtctttaatacattaacggttttcaaagcctaatcatatagaaatacctgttataccaccaataaaactgaataatgaccctttccatcaatatcagtaagttttggacagggtattttcaacttaagtttttttctcctgtacattcttcaaatatccagactgctgatgttttaaaaacccaaaacatggcactattctgcctggtttatcaaattatttttttaatacaacacactcatttttcgctagcaaaactgcttataatggcactaaatacactaacatactgtgttttagtacaaagcaataatactcagagtactctcaggaaatccgcaagctgagtaaatttgaaaagaagatcttgtaaccacccttccaatcgacttatgtagggttctatggccctaattaaaaaacaagaaaactttagcactcaagtccaaaggggactgcccaactcagtctcaggcttcaatttcgcatctggggaaaaaagaaacacaaaagggagatgctgcctccttggctctgggggtggtgacgggagcggggcccactggggagcgatttcacttaaacggtcggacatagccgtctcgggcccctagcagtctccgcactcactgcctccttctcgaacatgctaggcctcctttctttcctaggcgtcaccggagcctgctgaggggtctggttcggggtctggatggggctcgacttcacgcctcggcctcgcttctccatctcgctctgttctccaagacgcccaccgcctccccttcaccgccggcggtcaaacgccctagccagtcccgcgagggcggaagtctcccacctgcgcctcgtacggtaggaagtgcccgccagggctccaaagcgcctggaggaggggcgcgcaggcgcctgcgtcattcacgcgcgccgcagcggggcaccggaagttatggaggtagggcgggtgtagggcccggttcgatcccgagctaggcagggagtcggcgccaggctgggtggtgctcggctacgcggagtgggcgagcgagcacgcgcctgcggtggccggcggtcccgcgctggagggcgctggcgacgtcgcggccctggcctctg

SEQ ID NO: 37462 - DNA, 2300 bp, Homo sapien
tttacataaatgttctcaaatatgataaaggcttaaagacctaaaattatcaatcataatatttgcaaactgctctgtctatggggtagccattgtttattcctttactttcttaataaacttgcctttcacttaaaaaaaaaaaagaaaaaatacaagttcacggaagctgaatgtgttttacgaccagagcattattgctctcagcattccttcactatcccagagttatcaaaataagcaatttttttaaatggggaatgggagagcagaaaccaagtataacgaacaagaaggaaaaagaaccccacgtacctctgactacctaaacggtgttgaagaaaaccacaatgtcatcccaaaacatgcctcttcgatataaaaacaacaacaaatttgagctgaagacaagaggcagcaaatgaaggaaaagctctctctatcctccccctcttccgcccaaagacaggatataaattctttactggggataactttagacttaccagaccagttaaggtaccaggggaatctgcaaacaattcttactccattagtttccgaatatgtatctaccttcccaatttcctgccctttgaagcctaaaactgctctcctgtgtcctgtcacttctctgcaaatctacagttctttgttgaagatggtatacaaatgtagttctaagccaccatttcaagttacttctcattaaggtttatcccttgtgatgtgtactctgtccaagaataaacttttttcttgttatcctttcatttgttaaaggggtcactccgaactaagatgggcagaggtaaagtttagccttccctgccatgtaaaaagtagcaaaccgtactggttttccatggagaattaaatacaatcgaaatcctcacaattaccccacatgacactaagaccatcgtataaacctgcaaagaagtcaaattcaggatctaaagcggaaccgaagctctttattttggtgtgttgagttaagggggggctgtgttgtgacagtcataattagctctgggcagcttcctaatgtggaaactgctatcagttgccctgtttgctcctcctgcacccagaagttgcactttccactctcagccctggttttcgaacaatcccagcaggccctaacaattaagtcatcactaaagaaatctacatcaactatttgttgattggcgattgtcactcgcatcctccatgtggctctatggggctggaactctgcagactacactgggccggtgctttggagctggacttaaatttgaatcattcctcagcctctgactacctcttgccttggaaaagttactttatcggaatctcagttctaagtgaaataaaacggtgccaggctgcacctggtagggctacagtaatcagataacacatgaaaagcatctagcacatagtactcaaaaatggtagttatcgttatcatcattttggagacggggtctcgccgtcgcccagacaggggtgcagtggcgcgatctcggctcactgcagcctccacctcctgggctaaagcgatccttccacctcagcctacggagtagatgggaccacaggccccaccacgcccggcgatgaacacaaatttactgtccgagtgtggaccctacaggcagcgactaggaaactgcgcttctaggaacgagccacggtcaggtgagagcccgacctgcggctttccgcccccgcgccaccgcgcacagccctccctgaccgtccgccgcgttccagctcagggccaggaggcgacggagaaaccgagcctggcccagggaggccggcagggcccgccaggcgtcttgcagggccgagcgtccgataccgccacagaggccagggccgcgacgtcgccagcgccctccagcgcgggaccgccggccaccgcaggcgcgtgctcgctcgcccactccgcgtagccgagcaccacccagcctggcgccgactccctgcctagctcgggatcgaaccgggccctacacccgccctacctccataacttccggtgccccgctgcggcgcgcgtgaatgacgcaggcgcctgcgcgcccctcctccaggcgctttggagccctggcgggcacttcctaccgtacgaggcgcaggtgggagacttccgccctcgcgggactggctagggcgtttgaccgccggcggtgaaggggaggcggtgggcgtcttggagaacagagcgagatggagaagcgaggccgaggcgtgaagtcgagccccatccagaccccgaaccagacccctcagcaggctcc

SEQ ID NO: 37463 - DNA, 2300 bp, Homo sapien
gcgggccctgccggcctccctgggccaggctcggtttctccgtcgcctcctggccctgagctggaacgcggcggacggtcagggagggctgtgcgcggtggcgcgggggcggaaagccgcaggtcgggctctcacctgaccgtggctcgttcctagaagcgcagtttcctagtcgctgcctgtagggtccacactcggacagtaaatttgtgttcatcgccgggcgtggtggggcctgtggtcccatctactccgtaggctgaggtggaaggatcgctttagcccaggaggtggaggctgcagtgagccgagatcgcgccactgcacccctgtctgggcgacggcgagaccccgtctccaaaatgatgataacgataactaccatttttgagtactatgtgctagatgcttttcatgtgttatctgattactgtagccctaccaggtgcagcctggcaccgttttatttcacttagaactgagattccgataaagtaacttttccaaggcaagaggtagtcagaggctgaggaatgattcaaatttaagtccagctccaaagcaccggcccagtgtagtctgcagagttccagccccatagagccacatggaggatgcgagtgacaatcgccaatcaacaaatagttgatgtagatttctttagtgatgacttaattgttagggcctgctgggattgttcgaaaaccagggctgagagtggaaagtgcaacttctgggtgcaggaggagcaaacagggcaactgatagcagtttccacattaggaagctgcccagagctaattatgactgtcacaacacagcccccccttaactcaacacaccaaaataaagagcttcggttccgctttagatcctgaatttgacttctttgcaggtttatacgatggtcttagtgtcatgtggggtaattgtgaggatttcgattgtatttaattctccatggaaaaccagtacggtttgctactttttacatggcagggaaggctaaactttacctctgcccatcttagttcggagtgacccctttaacaaatgaaaggataacaagaaaaaagtttattcttggacagagtacacatcacaagggataaaccttaatgagaagtaacttgaaatggtggcttagaactacatttgtataccatcttcaacaaagaactgtagatttgcagagaagtgacaggacacaggagagcagttttaggcttcaaagggcaggaaattgggaaggtagatacatattcggaaactaatggagtaagaattgtttgcagattcccctggtaccttaactggtctggtaagtctaaagttatccccagtaaagaatttatatcctgtctttgggcggaagagggggaggatagagagagcttttccttcatttgctgcctcttgtcttcagctcaaatttgttgttgtttttatatcgaagaggcatgttttgggatgacattgtggttttcttcaacaccgtttaggtagtcagaggtacgtggggttctttttccttcttgttcgttatacttggtttctgctctcccattccccatttaaaaaaattgcttattttgataactctgggatagtgaaggaatgctgagagcaataatgctctggtcgtaaaacacattcagcttccgtgaacttgtattttttcttttttttttttaagtgaaaggcaagtttattaagaaagtaaaggaataaacaatggctaccccatagacagagcagtttgcaaatattatgattgataattttaggtctttaagcctttatcatatttgagaacatttatgtaaattatctttaatatttaatcactatgttttaatcatacagctctcacgatatccagaaagcatgttaacagcaactatacctgagtgcattcagttcttaagagatgtgtctgaaatatataatactctatttttctttctgttaagcagtgccttttattttattttattttttaggtattaataggggaccctattaccacatgtctttctccctcagtgtatgatataatttgtaatcttgggtttcaactcagagaaaattgtgatatcaatagcattgtaactcagaatggtgaagtatgctggaaaacaatcacagactgtgtgagctacacagagtcaggtttgtgctgtctttgtactccaaactttcataactgtcccattgaaaatgtcttgacctgtaaaattcccctttctgaccattggttccttttgttagataatgttataatacaggcctaactccaa

SEQ ID NO: 37464 - DNA, 2300 bp, Homo sapien
ttctgtctcatcttggaggcagtcctgctttgccttactcgtgtgcatttctgcagaggtctctgcgggttctctgaggcaggcctacacgttgctgtcgcctgctgcccatgcccagtgccttccatgtaggccactcagcgcggtgtggagcgaagcttcaggaaagagctgggccccacccattagagcccttgcttcatgatacctgcatggggattggctgcacggtggcacgcaccatcactgtagggccatgcggtgcaaataaatttggatatttacttgtcatttgacttcataaataaataacatggctgtttccacagaggatataatctatcaaagaatatattattagcacaggctttcacccagaataaacaggatcagtttttaaggcagtacatatatgaagatattttataaaacttaataagacactgcagatgctgttattatttactgattacttttgtgtcatgaggtttcttcaggaccagtggaagatatgaatatgagtgagattttctgacttcagaagcttatttatcatgggagagtgagaaggcatttatactaactctgtaaaacaaagtagaagctaatgtgtgtagttgatgtaggtaaatgaaaaattctgctttttggagaaagtgggaatatgtggtagacgttggatatttagaactcagagggaattttagggctagcaatacagatttcagagctaaagataacagattttagagtcatctgtgtagtaatgttgaagaatattggcaatatgaaatttaaaatagattattaaacatttattattaaacattaataaatcaaaaaacatttcttgagagctagcttacacaaaatcctgatttcatcacatcacaccgcatggccctacagtgatggagcgtgccaccgtgcagccaatcctcatgctgtcaaatctcactgaagtgatttcatcaggctgtctgtcaaatctcactgaagtgatttcgtcacgctgtctgtcaaatctcactgaagtgatttcgtcacgctgtctgtcaaatctcactgaagtgatttcgtcatgctgtctgtcaaatctcactgaagtgatttcgtcatgctgtctgtcaaatctcactgaagtccccaaaagccttttgagataggcattcttaacttctccttttgcagagaaaacctgcatctgtggagttcaatcggttgcctgtaggtttcatgtctagaaaatgttgcagttgggatcagaactcaggacagcacatgtctgtaggccgtgccgatgatgctgagaagcagcgtgcatgaaataaaataaaaacagacaaggctattcattggagaaaataggaagctgtgctcccttgtgcacaaataccagtcgtcaggagaagtattctgttgtatgagcagcgatttgtgagggcctgggattgtacattttagagataactgggctaaagctctgttgagagcagtgtcctaatgcggcttcatggccagctgcactgtgtttttgcgtcttttgtaatgtgtttattttgtcagtgacattcctctcatagtgtttctagatgaatgtttgttttaacaaaaaactttgggatgtgtggccatgtaccagaattttttcttattttgcatagtgttagtgtatttgtattttgctttaattgtttattttcatttctttccttttctgaagtcaacagctctttataccacctttgatcaagtaagtaagtaaacttgtaaggtaacttgaaacaaacagaacgctgtcttcttttaaaatacaaattaaaatgcaaaattaaagatcagccataaatcatatacttacaggaaaatgtccatagtaatataaaccaaaaaaagctgataattgatatttccggttaattttggggcccagtgttaccaatctagctcccaaagctatccaaagctcaaagttggaaaataccaagggatctaacatgattagctataattatttagaggcttgcattttagatttaggggtgacatcttttttgtacaggaaatattccccgctactgttacaagtgtgtgggatacattgattcatttaatctgcatgttggcggtgtgaatagtagaaaactcacagttgaaaatgcctcttgtcagccacggagcgcacaggcatttgtgtgcgtaaccccgggtagcgttcatgtgcacctaaagtgtgacgacagcctatgggaaaccaagggaagggtcacctgtagaggtccggacattcggttttgcct

SEQ ID NO: 37465 - DNA, 2300 bp, Homo sapien
tgctccactcagtagagacatgacctgcccctcgaatctctgctcattccactgccttcctgacaggcatgtgcgcagcttcaggaagctctctgaggtcagaaaccctgtccttttacctgtttgcaccccctctttgtgtgtcctgaatatttttactaccttaaatgtgggttcttttccccacaacatttgttttaaataattttaaagctacagaaatgtttctagaatagtccaatggattcccacatgacagttcaactatcgttggcattttgccacacttattttccccttttaagtacacatatatcattcttttgactgaaccattttgaaagttagtcattgtgatgtgatgttttgcccccaaatacttgagcattcatctattgagaacaaaatcattccccttcagttatcaaatggaggaaatttaacaataacacagcaccattatctaatacatggtccatataaaatttttcccagtgtgtataataatatcgtttataccttcatttatacctgttgtttgtttttatccaagcaccacaactgcttttagttactatatcttttatttttaaaatctggaatagctccctttttgttttttttctttctgtgtcagagacatttttgaagtatttatgtcacctttacagaatgttcatcaattggcttttgttagattgtttcctcaaatttgacagttttaaagaaacactgcatccatgatactgtctgaaccagtgcatcacatcaagacacatgattgacacaataatgctgtgtgccactcgctgcatcacagcaggacacatgaggcacatatgtgctgctgtgcattcctcagtgaatattgcaggacgtgtgggtggggccaggtgttgtcaaggtcccggcaggtcgctctgccctctaaacacaatggctggatgggcggtggacacctgctctgcggagcctgggcagcagctgaagatgatgtggggaggggctgctcagctggggctggaaggtgaggacagggctgggctggccgccttgtggagatagcaggacttgttgagggaaagtcaggccagggatgcaaaccaaagcctgaggagaaactgcagggccgtgcatggcctcagctccctttctgaggctccgttgatgtgagtgctttcaacaagccctccagggaatctctgctgcttgcaaccaaaaagtagtgaccactggaagagccagcccctgcgagaggacagaggcatggccgccatcaagaggcaggcaaaccccagagaaggaggccacggacttggcagtggacgaccggtgtgcgatctcagtgccacaggttactggttttgtggcaagatgtgtacctgctgacagcatggcttcctcgtctgcagagtgtgacagtgacattccctgcctcattagacgttaggatacagtgaggcgccgtgctcagccccattctggcacgtagcatcgataaacaccagctcttaccggaccgttcccttatgctgggaggaaagaaacgatttggatttcctctgtctagaagtccagctatctgcatgtgtgttcagaggacgttctcgtatctcaggagtgaaaccaaagcatcctgtacatctttcccccacccccactcatagcctcggattctctgcacagctttagtaaaggagctgatggggaatcggatgcctgaccccgagtcctcactctggggctcgagcttaggataacttcaggttcagctgaggcctctgaactgtgactccgccccgtggccgcatgcgtcggaactcctacctgccctttgcccttctcgaggccggtgcttgactggaggagggctggcagcagaagtgcagctgaccgggttgcgttttcgtacggctgactaaagcggataccggtggcgactcatttctcgttttatttttcaacgatttggcggagaagctcctcttgtgaatggactttggatttcttggagctgcgctgcgggtcccacagtgtggctttcggcccgtgctgtgctggcgcctgcacttcctctggcggggcacggggtggcgctccctggtaaagcagcggccagggggagccgtgagtgaggcgctgcctctcccgctgaagcgggttccaaggccaccgtgagggggaccatccatccaggtaaaacgtgttctttccttgttcctttgcgaatcgatggggatcaggcttccccaggtggtgaagtgaggaacagggaccgcggggctcgcctgaccagtggg

SEQ ID NO: 37466 - DNA, 2300 bp, Homo sapien
tgactcaggtccctcactggagacaccagctgagaggagagactgcagggcctggcacacacagggccactcttcctgctgccggccagaaggagctgtgtacacacaaggcagagagagagagagaaacattaaccaaattgcaagtttcggatcatttgtcttcttgttgcttcagaaaaagtttatctttcaagcaggcccacctgttcttgtaaaaccttatctgggctatttgggagcgagtcatcagtgcttgttcaaacattccactgaagaggggaacagaaaggaggggaggtgcgaaggtcattttcaaatttggaaatcttttttcccttgcttgaagaaagagagctctgcactgaatgggtttgtccctcacatttccctctgatctttcagggagcccaggtcggtccggggtgcagctgcatccatttgtgggtacataccagccagaaaagttgtgttaatttgcagcgaatattttcaaactcctttcttaaagatgaaagtgttgcaaccttgtcttggctcctgccaggctgtgtggcaagcgtgtgtgtgagtgcaatgtcctgattcccggggatgctgaatgaaagcccaactctgcatgatcccctggcccacgcctccgagcctttcctgctgggaggtgcacctgatgtgcacaggcccttggatcaggcatgcgtgttctgtcttaagattatgctaaaggaattcaggccaaaggcaatgacttagatttttggctgacttagatttttggctgaaatttcacatcacagtgctgtaattgtaattaattatgttgctgtgtttctttacaaggttgtaaagcacaaaagctgaggtcgcaggatggtcttgaatgattgactaaaattgtctgcttctctaatgctaggcagaatatataaaaagataaattctattaaaacccctccttccagagagcagaaaataaagggactcaaagtccatcactctcgtgtgctgcctagggcagcactggggccacagacactcttgctgatggctgttttgtgtgtgctgcaggcttcctaatagaaaggaggctttgtaagagcacagaaacatgcccatgcttcttggatgtgccctggaacagagctgagcaaacaacgtgaaagcaatatgtggtattgattactcagcaaatataaacaatcccatactctttacagtaatcctttattcagcgtttttcaacctttaaaaaagttgaagtcattctactttgatgcctctctcctttgctcaactgccctctgcctagagcaggccacgtccctactggggcagggagctcactggcctccaaggtcctgtttatccgcagcttcagtggaaggaggtccactctcctgctgttgccacctcctggttgagcagcaccttgtccagaaccgcctcgtcttcattctcattgtctttatttctggttttctgctgtgccgcatttatcccatgcatatatgacagcctttaagaaacatcagagagtaacagagacggaggtgccgagaatcagcaaatggagaagccctgggctctgttccccagtgctgttgtgttaaaggattttgttattgtcagtggtggtttgccctttttgaaaaatggaagcatcaaagttttaaacttatgctatcattaaaataacaacaacattcattgtctgaaacaaaaattaactgtgaagtgagaatttgagaagtctcagccagaacacagtgctgaccttcatctgcgttttgtagccaccacgtccaatccatcacctgctggttgtagcggcagagagaaggatgcaacccctgtcctgctgttgttttatggctgatgattcatgaagacagaaaaaatgccctcattttggcagctttcatttgatcattctttcccaccttccccagcctctgggagatgtgtttattgccagcttcactgcagaggagacaaataagtaacccagatgttggtgtttgtggtgcctttgcagacacctccatgacacgtcatatcatacactgcatattggatgtaacgtgagcaatttatgagtccagacgcatcgactgctctccttgtgcccctgctgacattcccaagagatcaatatcctgtaaaagcctgaagattgcttcctttaaatggtaagtgcctgctccatgccttggagataagacatttctactcttggtccttagtcactataaaatcacaatgtgattctgtagaattaaaaggtgataaataagcttagg

SEQ ID NO: 37467 - DNA, 2300 bp, Homo sapien
ggccgtaccactttacatcttttatgtcttgtttttactgtacctcttttctattttttagatatgtttaggtgcacaaatacttaccattgtgtgacaattggctgcagtattcagcactgtgtgagtttgtagcctggagcttcggcctccagcacgtagcctgggtgtgcggtgggctacaccttctaggtgtgtgtgtgtgtcctcagtgatgttaacacagtgacaaaatcacctcacatgcatctctcagaacacacagctgtattcctcctcctcctgccttgcatgcggaagctttttctgatggcgtcagctgcccatggctcccacccagacccctcagcactcatgcagaagtgtcatgttctgtgtggcagggaccggtgagtgcatgtttaatctgctgttagaagggcccctgggtgttccaagaatggccccaatgcaccaggactggaggccccctgggtggagaaatcacctctcccagcctttcagttcacagatggggaaactgattctaaatccatttcatcaggccccgtgatcacagtcgacgcccttgccatcggatgtgtaacagctacacactccctgcacctccagactgcagggaccgtgcggagaacgtgggaccctcgtgctctctgtgccttgtgactgcaggggcccagcgtgtttgctgaagggaaccctctgcctcctccggtttgggtctttccaaggaattgcaggcagtggatccaggagatcgcagaaatcccagaatggaaatgtgaataaaaacacttccctggggtcagcaaaggtcaggaaaaacctggtaattacttcagtagagtgcagggaaacacaatctctgcaaaactaagtttcaaagtcctgatttcaagggaggtggatattggaaaaaagaaacagccaacacccaacctgagtctctgcctgtggagcctgggaccgcctggctgctgtgtatctgctgaggtgacattgctcagaacacaagcacgtgggctcacgctgtcctgctgtggggtcctgaccagaagggaggtgatgagcaaagcccaggtcctcccaccgcgagcgtttcctgcagggcctgtgggtgaaggacccttccctttccctccaaatgtcaccctgcccctgaatcccttgtctcacgtctttgctggtggatgtgagtaccttctccactcctttaaaactacatagaacaccttacaatgtcccgattatgctctgaaaggtaaaagctgtttcacagggcgtgtgtgtgcatgtgtgtagaccagtgctgtacaatttggtttagatccctgaaaaaaatctcaattctttctcataatttagtgcagagaatagaatagaagacagcgtcagtgtggcaagcttcaaaacgtgtgagtagaatcgtgccgtggctcacgcctgtaatcccaacactttgggacgaggcaggagaattgcttgagcccaggagttcaagcccagcctgggcaatgtggcaagaccccatctctaaaaaaaaaaaaaaaaaaaaaaaaaaaaaaaagatacacaaattagccaggtgtggtggcgcatgcctgtagtccgagctacttgggaagctgaggtggcaggatggctggagcccaggagttcaaggctgcagtgagctatgattgcaccactatactccagcctaggcaacaagcaagtctctgtccctaaagaaaaaaaaagcgtgagttgctgaggcccagagaagccaagggactggcctgaggtcacacagcaggggcacactgtgtggggacgaagctcgggctccccccaccatgtgtgctttccttgttattaattcacacgagtgaatagttgcaaatgatgcatctggataaacactggacttctgtttccccacagctgcaggagaatcacagtctcagcggctgctgctcctgacgggcacgcgtgatgcccagtctggagggttcgctgcaatcagtgctacagctttagaaactgtgatttactgctgatttaaaactctttaaagagccgacttcctgccgatggggctgagggaagagcggcaggcgcagtgctggcagagactccggcagggcctcgtgcgggggccgggagcagcgccttctttttaggaaacgacgcttcaggctcaggcccgtccatgctcctctcccgtgtgagtgcagagaaggtcctgggttctgtctgctgcttcactctgggggtgagtgtgcctctggagtctctgagggggcgcgggaaggaccttc

SEQ ID NO: 37468 - DNA, 2300 bp, Homo sapien
gcaccctgaaaccgctcagggcatggaccgcggtgacgtgccgcctccctcccagtgcccactgaagcgtcctgctcccttcttcgcacagatggcagtgtggggccaggggacgtgtggcatcatttgcccatgccattttcactttgttttttttgtttgtttttgtttttttgagacagtctcaccctgtcactcaggttggaatgcagtggcacaatctcagctcactgcaacctctgcctcccaggttcaagcaattctcctgcctcagcctcccgagtagctgggattacaggtgcacaccaccatgcctggctatttttattttattttattattattattatttttgaaatggagtctcactctgtcacccaggctggagtacagtggcatgatctcagctcactgcaacctctgcctcccgggttcaagcaattctcctgcctcagtctcccgagtagctgggactacaggcacacaccaccacacccagctaatttttgtatttttagtagaaacagtgtttcaccatgttgaccaggctggtctcaaactcctgacctcaagtgatctacccacctcggcctcccaaagtgctgggattacaggcgtgagccaccacgcccggccaccttcttcactttcatagaatgtctggactaagtcttcaaggcacaagggcatcaagctctaatgagcacacgggggcaccactgcagatggccagggggcaggcggaggccaccatgcaccctccctcttcatcggctcgcagcccctcctggggagctctcgctgccatcacaagctgagaggcttacaagacacacattcatcccctcacggttctgcaggtcaggagcctgacaagggtcccactggggtaaaaaaccaaggcttggccagcctggctccttccggagactccgagagaacctcttcatgtctcttcccgtttccagaggccacacattcctgggctcctggccccttccctgtctctgagccacactgcatctccagcctcgctgacccacccctgccgctgccgaattcctccctctgtcccctgtacagaccctgttcttccactgggctcccctggggaatccaggctaatccacatctcagggcctggggcttaatccacaacgtgctgttggctctggggtcgggaggttggggaggccgtgcccgggggcctttcttctgtattccacaccattgatccacatcatgttcaaatgatctcctaaatggaatggcttcctatcaacccacgtcactggcttcaccccactgttaccaggagctggttcttgttgggctctggaggccaagaaggggctccttccctctgcccatcagcaggttgcttggcacggtagggtgggtgcccccgtgagacacagcttgggagcacgaagcggccgcaggccctgggcccgggctacgggctggggaggagggaggatgaggcgtgcagacactgaaagggcggctgcagagacttttttgtccagaagtaacccagagcgagcaagtccctgtgggtgaggaccacgcatgcccggttggcgctgatgtgtgggaaaacgacaaatggtgcaagccacacgggtcacgtgcgtctcctgtgctaatcgtggattttcatttcctccggagacccaaatgagaaagtaaaagtgtatgcaggagtcaaacccactttctagaatgtggttaatttctagaggcagctgggtttcctgtggagaagacaggtttgcctacgcagcgtagagaggagacggctgtgtgggctccagccccaggggaagtagggcccgggggtcaccgcgaggaagctccatcggccgcggcggctctgtggaatctgaagcgcgtggtctcacggccacctccccctgcaccagccgtgtggcccaaggtgatgtctgtgtgccttggtttcctgatgcgtagaacgtagccagctggaggacaggggggctgtcgggttctttgtgtggaggtctccagaaggctgttcgtgctgtaggcaaattccacaagacctaggagccaggaccccaggtgccttgatgctggagggaagaacctggctgagacgcacctgcaactgtttggagctggtgaccttgggcccagcacaccctcgctgctggtggacacagcccctcacaagcagctgcgaggccctcgggcagtggcatgggcgccgtcgcttcctgctaaccccacatcctcatttcccacgcttctccttccaccttccatgatcactggga

SEQ ID NO: 37469 - DNA, 2300 bp, Homo sapien
ccaacttcctctgcttcctcggtgtctaaacccatggtcaaagcaccattcacgaaaagcatgttactgttttaagttaatttgaactttaaaattattgaaccataaggaaaaatatctctgctttgtggtcctggatattttacaagaaccttgattcctttagtgaatcttaattcacagctcagtgctgggatattcaacaaataaaatcacttttcagagacaggatcagaatctgctacttcctgctcctcagcctgccttgccaaacccccaagtggcaccctggtgtagacattatggacctcaacagcagtactttagcctgatgcctagaacctcttacacttttatggaagtggcctaagagtgtttgtgacgggattcgtggtgtctccaactttctctcttgcgctgtcccaccctgacctgtggggggagagaggaaggaaggaagaaggggggaagggcgtctggtgtcagacgcttacaataggaattgctcacctgcagaagggcaagtattgtttcttctagaattagtatgaattggattttgtgaatttcagctctttcttagaagcttagaaaaaaatttggtataaacatttgaaataaaaaaatgcaataagcaacagagttagatcttgtctctacaaaaaaattttaaaagaattagctgagtgtgctggtggcacctgtggtcccaactactcaggaggctgaggcaggaggacggcttgagcccaggaggccgaggcttcagtgagctgtgattgcgccactgcactccagcctgggggacagagcaagacttcatcttaaaaaaaaaaaaaaaagcaatattaaaaaggtgtattgaaaagggaaaaacactctaaatttgagagttttagttaaaatgaaaaagcaacagttaggaccatttctgatcctcaaagtcaatacttttgaaacaggagagggaagggaggtgggggagccctggagctgctcccaacgagtggggcaggggcctcagacgcaggctctagagcccaggctggacctggcagaggacagttcagtgtctctgtagtcaaacaggtgtcagaaatatcatgaaacccccagtttattcgtcatgattacactctagccctgactgggttttttgctcattttttgctcagtagcttaaagttaatgttgaaaatgtcaaagaggcctgcagatacccctagagagacagcagtttgttaaaggggataaaggggaagtgtttatgtttatagcacagaaagtcaagctgttagagaaactggacaatggtgtaaatgtgaaatgtcacatttgccaccacaaatggtggcaggaaggtgaggaagagaaagaaataaaaatacttgagatgaggcccgaaatggaaaatggaattaatcatcccattgctctaaatgctctaagtgcgctaaaagcatttctttttttctttttttgagacggagtctcgctctgtcgcccaggctggagtgcaggggcgcgatctcgactcactgcaagctccgcgtcccgggttcacgccattctcctgcctcagcctcccgagcagctgggaccacaggcgcccgccaccacaccccgctaattttttgtatttttagtagagactgggtttcaccgtgttagccaggatggtctcggcctcccaaagtgctgcgattgcaggcgtgaaacaccgcgcccggccaagcccttctcatcttaacgtcctctttcagcagaaggaacttatcctggtcctaactgttgaggtcactgctgactctgcccccggctccaacggtacaaagtcacctccaatttaaagatgctacagaggaccccgtccgcacgtgagctccccggagtgatggaggggaaagggctgccttcccattgccgtgcgtggagagcagcagagactgtgtttggactcctgccacggaaaaggctgcgttggccgtgtctccagggaggacaaactaattttaacaaactgacccaaacaggactcggaaggtcagtatgttgcaatctccggtcctcctgcctgcttcgtggttcgttccaaaagctaagtatgctgtttcaatttgatctgctatttcgggtgatctagtccctgttagttcttgacagtccaggaggcgcctggtgggtggagaatcttcccctttctcctccacaaacctgacccttgtggagaaggcagcctggaatcccctgggttctgaatgtctccgccttttctccagcgcaagcgctgggcctgagca

SEQ ID NO: 37470 - DNA, 2300 bp, Homo sapien
tatttgggaaacaaggtagcaggacacaggctgggtcacttgaagaggagccgcagagtagcaattccagctgcgtagcagccggagggcctgccctggacgacttcaccacgtgaccttcagatttctggctgcagtggttgtccttggtgtttgaagactttccctctgcttagacactttgatcaagacatttgccgggatgaaagtctcgttctaccttgacggtgccctgttctcaccaataaggcagctctaacacacctacagtgaggacactgtggccaggctgcttccttggggctgagctacaatcaaagggggcactccaacactcacctggaaccctaatgaagctacggaggtgttgggggtgggcagggatccacgggcgggatggtaaagagagggagaagtgcaaagctaggtgccagagtaggagtctctgccccaacttacttctccatcgtgcctaggagggcaatttagataattcattgtgtcatacgtgtgttctcggccctcccaataaactcatttccctttaaaaaatgaaaacaaaagttctagtgtctgatggacgtgtaaaaacctaataaggtgacggttgtgtaaaggttgtgggttgggggccggggctggaggggctttagaacatgcgccggacattgttgcagaggccgcggcgcgcgcggaggggagctctttctctccgcattgtgcggggagcaggtgctgtctgcattaccatacagctgagcgcacaaagagccactgattcagcctcgcacaataacaggctgccttaatgacagccacgcgaacgacacacaccaaactcacttcttaccaggcggagggaggccgagggggatacccgggagagaggggccgagacccggggaaggtggcggcggccgaggatcctgtgggggagggcgcgtgtctgtggggggagttgaaggccaggttctcctggctccggggatatgctgtccggcccccgggcccctactcccagtggccgcggaccacgagaggacaccgaaggcgcggggatgcgggtgtcccagggggcgtcccggccccgcccgcgcgtcggctctgcactccccgaggctcagtcgccgtcctgggccaggaggtgtccccgcctcggacctccccaaacttcccgaaactgccgcttcgctctggcagccctcggcccaccgctccgcccgcccctttcctacgatgctccccgaatcgccacccccgcctccgcccccaagagactcctccttaggaagcgcctgccccgaagaaggggcggccccgccaagagctcgggcctcgaacttcgtcctcctgctcgcagccgccctccccaagcccccgggacgctgtcggcgcaaggagacccctcggctgccgccgcggcccggagtttcggaggccgcgtcccgccgctcaagtggggcccgcagcgccgccccccgcgtgtggccgagggtctctgggcgtctgtggcccgggagggcgtgcggaggggacggggcggcggcaccagctccagaagcagggggattcttgcggtgaacattttgcaggaatgtaaatgagtgcgttttgtgtggtgagggaggaagggggggctgggggcgggggcaggggaggactgggggggcggggaagggtgggggcggggaggagggttgcacattttacagctcactgaccatttggcgatccattgagaggagggtttggaaaagtggctcctttgtgacagctctcgccagattggggggctgctgatttgcatctcattagccatgcgggcggccggctgaatataagggcggcaggcgccggcgagagccagatcctctgcgcgcacccgcggagacccgacccggccgagggcagagcgcaggggaacccgggcagccgcggcgcagagcctcctcccacggcccggcccctccggtcctgcgcgtgtgtactggatggcattggctggattcatcggaaagacgcggatctttgctgtgacaccggagatcggagcccggagtgctcccggaacgaccgccgccgccgagtgacaccgggccgcgatccgcaggggccgccgcgcacacccgccgccgccgaccgtcccctcagcgcgcgccgctggccccggattatcgccttgcccgtgggatttccagaccgcggctttctaatcggctcgggaggaagctctgcagctctcttgggaattaagctcaatctctggactctctctctttctctttctccccctccctctc

SEQ ID NO: 37471 - DNA, 2300 bp, Homo sapien
gccttcaaggcctccccagtccagctctgcttcctgctcccctcagcatgaacctcctgcgcatgagagtttggtctcctgaatttttccctcagtctctttcctaggtttgctccttctgcttggagtccttcctcttctaaccctttgtcagatcctactcctccttccaggctcagttcacaaacttgctccttgaagctttttcatccctgtcttagactgttcagactgctacagcaaagtaccatagactgggtttagaaattcatttctcatagctctggaggcgctgaggtctcagatcaggcaccagcatggttaggttctggtgaggcctctcttctgggttgcaggccatcttctcactgtatcctcacacggtggaaagtgggcaagagagctctctggcctcgttatggcactattcccattcatgaggctccaccctcatgatttattcacttcccaaaggccccacctccaaagaccatcacgctgggattaatttcaacctatgaacttggggggggcgggggacagaaacattacaacccttactccttacaatatgtttcacttgttgcctagtatttaaagtatgttagtttatgtccccaaccacgatgagcactccttaagactagaggtcatttcacatactgcttggtgtcaccccacagcactaatcagcaataggtgctgaacaccatttgttgattttacttaaagaaaagcccatcaggaaacgtaagccttgtatgctgaatcgagattccttcccaaatcctttaatgcatacgtggtgccacttcaatttggtaatgttttctgagtacctgatcaagtgctttgctagagattctgaagaaaatcaatagaatgtttttcctagaacaatatttgaccattttactttcctgatggaagactcattagctcaccagggcttatagctgccttgctgagacatactgtgtgtaaggataggtttggagatacatcctaaataagttgatattaaaaattgacatttgtcaataacttacttttcagaaaaataaatcagattggtttcaaggtcgtcactcacacgtgcctgccaaaatgtttgcttggttgtagagaaaaaggcggaactgcagctagaggggtggacttgcgcatcacccggagcccacctgatctcctagcccaagggagcatgtcctgaaggtgagtttcgccatcttagagcagctgcagaaataagactgagattgtggactgcagagtccaaactcctgaatatgacgacagggacctgcacgatcaggtggcacctgttcccctgtccccgccaccatgtatccacagcagccactggaattcctctgaagcatcctgctccctcactgccattgcctctgcctttcctctctctccttggaattctctcccacccaattccggactagcaaacctgcctgaaacaactttcagctgaagagtagtccagagcaacaatggtgacggtcagaacacccggccgagaagtgctcagcgctgactggggccgcgccgtcccgatacggaggcgagggtcgaacgccaggacgtccccgctccctccccaaacgtggcggggaagcgcgcggcgggtcccctgtgcaggagccccccgctgtccccgtttccggcccaggcgaggctcccggcctcagggccacccgcctgggccgcgctcgcacaacttcggcctgaggccccgggagccgccagtcctcagtgcctccggcaggacaaagaccggcatgcagcgtcaagacaccgtccgggccgcaggacagtgtatgaacaaagaggttcaagggcggcacccgcccgacgccagcgggcagctacctgactgcgcgacccgaggtccgccagcaccagagcagttgctgtggcaacaggccgcggcgtcccacgccgccggcgcctgcgcgccgcgtccgctgtccgcgcctgcgcgcctctctccccgcccaacccacgacgcgggcgctcctcactctcgcaacggtcacgcagaccccgcctctgcgaacccggccaagtcccgagcggaagcgccttgagcggaagcggaagtgaacgaggcggctgtggcggtggctgaggcggctgggcctagggtgcagcgggcgcgtctgcggctggtgttggcgcatctctaggtagggccgggcccgagggcacccgcgggtcttccgggccgctcccggcctgcgtgaccgtccgttacccgcgtccgaccctcgcgcgcgtcagcccct

SEQ ID NO: 37472 - DNA, 2300 bp, Homo sapien
atagataagtgctttttttttttaacgtttagcttaagttcaggaaaacaaaatactcagaagatggaccttttagtatgtgtgttcttgtatgttatgttcaagttttggtttttattttaattaccagctttatcttgagtagtataattttccgtggtggcacgccagagatttagggttatagaaagatgctctgtttaagactcttgacagggaagagctgtaaattgaaacagtggttatagttaccaatcaagccttgtacattaaaatatacacacgcaatttgaacgaaccgatggttcttaaaacagaaaatattggctgggcagtgtggctcgcacctgtaatcccaggactttgggaagccaaggcaggaggatcatcgcttgaggccaggagttgaagaccagcctgcgcagcatagcaagaccccatctctacaaaaataaattttaaaaacaaagcaaaaatgttaattggttcctcataaatttgaaatataaatgcacattttgggagtgtgttagaaagataacgaaagtctgattttagccttggttctgccactaaaggacactttgggtacttctgaacttcttgaacctaaatttccttatcttccttagtagcttcatagtttttggtgagaatcaagagagatgcattttgtaaattgcaagctgtcatcttatttaatcctcatgaaaagtgaatgttagatgatattagcatcctagggttatattagacgttaaactgtcagggtcagagagctggtgtgaagttgagccaggacttaattcatagctatttcaccactgagtttatggatgcttttccattatacaccttaacacttcctgtgatgactaattaagttgtatattgtagggagggttattggacccgtttcgtaaggctattctctataaataagaattttcagtgttcagtatgccctactcgttactcactttttaatcccttgtaatccagtttaagccattactgccctaaaaattacttagatctttctgattactttttctcagtcattgttctttttctttagtgtttactgcagctggctctcaggcagccttcgcttccgcaaaatgaggcctcattctcttttcctactctgtctttaaatgtagttaagtcattagccgccttgtttatcgctcagcactctttcatgtctcattgctgggaggattactcccaaatctggttttccagttctgcctctcatgagtccctcgattcggcttcttcagtaaaacatttttaactggtttttctgctctcagggcaactcaagacagctagcaaaacaaaaagcaagctaattattccccttcatctcctcttctcctttcttcttattttttgagacagagtctcactctgtcacccaggccggagtgcagcggtgcgatctcagctcactgcaacctccaactcctgggttcacgcatttctgcctcagcctcccgagtagctgggattacaggtgcctgccaccacgcctggctaatttttgtatttttagtagagatgggtttcaccatgttggccaggctggtctcgaactcctgatctcaggcaattgaccccccccccccccctcagcctcccaaagtgttgggattacaggtgtgagccaccgtgcccggcctcctctcctttaaaatacttataattatgccatcattctgttcatctaagttctaaatcttggatgtcataattggttttcccagttcctaaaacatttgcgtagatataaaaatttgtctattttgtgtgtttgtgatgattttggatttactgttcaccctgctaccttactattgcattagtagtattagaacagtgtttctgtcccatttcacatactatgttattgtcagagcagtcttcctaaaaccccactttgtaaatggaacttttctctctcttgcattccttttttaaagaccaggtctcactctaatgcccaggcacgatcatagctcactgcagccttgaacacctgggctcaagcagtcctcccacctcagcctcttgagtagttacaactacagatcattcttgctcagaataccttcatgatttcttgctaaaattccaaaatctttagcttggcatttgggattttctacagtaggaaccctgtccatcacataaaccttaacgtcactacatgtgcttatgcaaaaagggctgcctgaatgagttgcttgaatgtatgtactatttgaataattacctgtttgccattgcttgct

SEQ ID NO: 37473 - DNA, 2300 bp, Homo sapien
aatgtacaaggcttgattggtaactataaccactgtttcaatttacagctcttccctgtcaagagtcttaaacagagcatctttctataaccctaaatctctggcgtgccaccacggaaaattatactactcaagataaagctggtaattaaaataaaaaccaaaacttgaacataacatacaagaacacacatactaaaaggtccatcttctgagtattttgttttcctgaacttaagctaaacgttaaaaaaaaaaagcacttatctatgaaactaagtttgctcagccaatcccaccttctatttgaaataaaacaaaatgattaaactgctacaattagaaataacagaaatcaggcggctacaattagacatctcggctaccaacccagctatgcatctaacaacacagaccaaacaaccctaacttttaagtttcagacgctaaccctctaccctcgccggctggcataagaaacgtgtacatgaggtccagttttaatggtcttccacagagcagaggctatgtttcaatttctactttactgtcttacagcagcaaggagcacggagtggcggtccacataaaaactcaaatgacatgactgtaatgggaaaccctaaaaaccaaggctgtatcgcaatcaccaagtaaacttgagcaaagcgagcctgaagagggaaacacagggcatgagaggacggcagggagaccggccttgtgcggaccccctcagctcagggttctgaggcctgcaggagcccggggcagcgccatcacggcggtgactcctaaataggcttcagcagatgggggaagggcgaaagtgaaagccgcagctctctggggtttttaccctccgttgaaaacgtagggcgaaaatcgcagctgcaaagggcccgcggctctgtgcggttccatccccaagtctctgccaggagccgaatacatggctgtagaggacaacatcgcacggctgcgcctgcggatccgacacttgctgtctcacggcgagatggctgccttgaccggacgttacgccacttccggcttctcctgaagttcgctcccggcctctctatctcacgctagtcgttgctcctggagggctgcacggcggcttgtccctttggtagttgaatcccgcccattccaaaaagcgctgacagggatgtaaagggttttttttgtttgttttttgtttttttccccctcgaagaaaacattggaattcaccccaatggacaaaaatttaagtctgaccatacaaaaaaattgtcagaactatggcgcaacggcaactcgaataacggtgggaacgttaattgtcctggctaataaaaaatgtatataacatttcctatccttaaagagctcacaacctcactgataataaaaagtacaaagaaaacaagcagtataacatatgattacgccacaatgaactacagaagggaaaatcaaggcgtgctgaagtcccactaagaaacaactgcggaaagagccatgtgacaacagtgcatgaactgggagtggcagaactgaatataaatgcatgtgtaaacacaagctgtttgttttgcttagtgttccttgtcattctacacgcttgaagatcagctagcgttcttgctgacaggtaaggaggacgcgcttactgagtgccaagcactgctcaggcactgattctgtcaatctctgtcaatctcccgacagcccaagggtaagcactgttatcattattcaattttacagaaaaaaaatgcgggggagaggtcaggtaacttgtcgaaggtaacgccgctagttgctttaaacaacaacaacaacaacaacaaaacacactcacacatatacacacacacgccatttaaaaatcgatctttcctacgtccagcaagggccaattagagatggctgtggcacggcggccccgccccggaactcctcaagagcttcgcccctccttacctatggaaacacaggaagtgacctatgctcacacttctcatggcctcggccctagtgggagcaactcgctgaagccgagggcagaactggcggaagtgacattatcaacgcgcgccaggggttcagtgaggtcgggcaggttcgctgtggcgggcgcctgggccgccggctgtttaacttcgcttccgctggcccatagtgatctttgcagtgacccaggtaacagattgtactcttttctgacggttcgggcgaaggccaccactgcactgaggcctgggggcaatggtggggaagagactaggaattggcgcgcgtgcaggccc

SEQ ID NO: 37474 - DNA, 2300 bp, Homo sapien
attgcataggcaataataacagttatggaatttcggaagtgcagtatgaacagatctaatttggcaagactagatgaatttgagaggagtaaaactggaggacggaagtttcgtttcaggaatctaaggttgaggcaagagataatgacggcaggatttaaagccattataagtatgattagagatttatccaggaccttcggtggcttcaggccactttttgcaagtaagtctacagaagaaaccgcacagtgattactgcactaatttatcctcagaaaagagttgtttgctgggtatcttcatctcctggaaattgaaacatcaaatccgatattttttggaggcaatcaaattaattctgcatagccttctagtgtctgtataactaaatgaagcacagtcttttcacagaaaagtctacctagagatttggaaaaccatgatggcctgaaccgagagacgggagaccctgcaaataaagtggtgtgtattatatcttaagcgctaccgtgcccgctgtctcaggcttctgacaaaatatttaagtctcaatgttggcagcaaaacaggcgggcacagatctgggtgaatctgcttctaacatggagaagaagcggatggcaggacagggcagggtaaacttagggtcttcgatgcaagggactgtcctgtcccgcctgccgccgcccagccagccagtagtaccctgagccccacaatcgtacgatgggaagctgcctgcgaaacacagcagagtagggcaccaggcgggagtggcggccgagtggccgttacaggccggaacggcggcagcacgaaagggaggaacgtcccccgaggggcctgcacgcgcgccaattcctagtctcttccccaccattgcccccaggcctcagtgcagtggtggccttcgcccgaaccgtcagaaaagagtacaatctgttacctgggtcactgcaaagatcactatgggccagcggaagcgaagttaaacagccggcggcccaggcgcccgccacagcgaacctgcccgacctcactgaacccctggcgcgcgttgataatgtcacttccgccagttctgccctcggcttcagcgagttgctcccactagggccgaggccatgagaagtgtgagcataggtcacttcctgtgtttccataggtaaggaggggcgaagctcttgaggagttccggggcggggccgccgtgccacagccatctctaattggcccttgctggacgtaggaaagatcgatttttaaatggcgtgtgtgtgtatatgtgtgagtgtgttttgttgttgttgttgttgttgtttaaagcaactagcggcgttaccttcgacaagttacctgacctctcccccgcattttttttctgtaaaattgaataatgataacagtgcttacccttgggctgtcgggagattgacagagattgacagaatcagtgcctgagcagtgcttggcactcagtaagcgcgtcctccttacctgtcagcaagaacgctagctgatcttcaagcgtgtagaatgacaaggaacactaagcaaaacaaacagcttgtgtttacacatgcatttatattcagttctgccactcccagttcatgcactgttgtcacatggctctttccgcagttgtttcttagtgggacttcagcacgccttgattttcccttctgtagttcattgtggcgtaatcatatgttatactgcttgttttctttgtactttttattatcagtgaggttgtgagctctttaaggataggaaatgttatatacattttttattagccaggacaattaacgttcccaccgttattcgagttgccgttgcgccatagttctgacaatttttttgtatggtcagacttaaatttttgtccattggggtgaattccaatgttttcttcgagggggaaaaaaacaaaaaacaaacaaaaaaaaccctttacatccctgtcagcgctttttggaatgggcgggattcaactaccaaagggacaagccgccgtgcagccctccaggagcaacgactagcgtgagatagagaggccgggagcgaacttcaggagaagccggaagtggcgtaacgtccggtcaaggcagccatctcgccgtgagacagcaagtgtcggatccgcaggcgcagccgtgcgatgttgtcctctacagccatgtattcggctcctggcagagacttggggatggaaccgcacagagccgcgggccctttgcagctgcgattttcgccctacgttttcaacggagggtaaaaaccccagagag

SEQ ID NO: 37475 - DNA, 2300 bp, Homo sapien
atctctagtagaatatgccctgagaatgaaaagaatgtaacagtgttagtattttgaataaacatgttattactagactgttgcttttattttgagatggttgtgtgtgtattggggggaaaggaaacgagtaattatgttggtgttactgagaactgagatgttgggcgtaggaggaagataatgttgattgtgtctacgtaccatttctctctaaaaggaactccaggctctttggagaggtggttgattccagaactaggtcaggaaacgttcatataatgtgggaacatggtcatatcaaagattaaggataaggattactagggccatgtcagaactcaagcaacatgaaaaggctcctgcttgcaaaagatggacagtttgaacatccacaaggacgctaactgcatcagatatgtttaatgggttcaaaatgatactttaaaaaaactcagtaatcatctttataggatacttgggaacagactcattttcaaattggtaaataaaaggaaagagtttgccttcgaggggtacataacttaattatgaatgaagtgatatgtgtggaatttacttcagagtaatggaggtggaagtggcagagaaaggaaacactggacttgatagtgttgaaactgattaatgatatgtggcggttcattatagtatttccacttttctgtatgtccaaaattttctaaaataaaaggagaattgaatagaaaaatgcttcctggaggtagctgtgtcttacctgagacttggcaggaggcagtagggcctgagggaacagcatttacagtgtcctaacggttatactgaaactttccacgtatacttgatggaacatcaatctgaaggcatcctacacttcctccatcagacctgatggtgcaagtgaacaccatcagtgcctttccagtttcatcaaagcagttattttagcttctctgacccaaggtatatcagttctattttaacgtacattacaaagactaatggttatacttagagacacgggtctgttggggacagcagtggcttagggtggctgtaatcccaggaaggaatgtggagaaggaaatgaacatttttttttttgagacggagtctcactctgtcgcccaggctggagtgcaatgtcaccatctcggttcactgcagcctctgcctcccaggttcaagtgactctcctgcctcagcctcccgagtagctgggattacaggcacctaccaccacgtctggctaatttttatatttttagtagatacgggatttcaccatgttggccaggctggtcttgaactcctgacctcaggtgatctgcccgcctcggcctcccaaagtactgggattacaggcgtgagccactgctccaggccagaaatgaacacttgatgactgagtgagtgagcctaccagctgaggatactaatgataagggctcacatttgttgggtgtcctgtgatgtgctgggcagtcctaagcccttgaccattctgttattttgaagctttaaggagatgcactaaatggaagtccatataatagagttggatggagtacctggaaattcagatggtccaacttgaatgagtgaataaatagggaaagctatctgattaaaagtgggtcccctctccatgtgtgaattgtcaagttgtggggattactcctgtttttcataatagttacgttgatttttcaggtgaagcacttgaggaagaactggattccatggcaaaacatgaatccagggaagataaaatttttcagaagtttaaaactcagatagcccttgaaccagaacaggtaaagtggagctcatagctcctcatcgtgttctcttcaggccatgttttatgagtataatctgtaagaaataacttcatagtaacattagtctgttccttaggagcctataaaagcaggcttttgttatcttgttagaggagttcctcacacagatgggccatgtagaaaggtgttttgcagtgctgatccatttaatagttactaaaagactaaaggttatactgtttatcatacagggttcattttctaaagcaagcatcagggatgggagatgaatgagatgttgcctaaggtacatgaggtttaggcaccattggcccccccgccagaaagaaaaaaggttatttttgcccatttccaacaggtaactttggcttgtaaaatgtgacatgttaacatttttctccttaacctcccctaccataaacgtaaatcacgaaagaaaactaaactcccataaaccagtcactggttcaa

SEQ ID NO: 37476 - DNA, 2300 bp, Homo sapien
taaaactcaggaccacaaaatcactaaaccaaagggtaaagtcaagctggaaactatgtcaggcaaacctgcctcccattctattcctaaataagatagctgccaagataagaggctacgtacctcccttaaaatttgcccacaaggaaattccttgtggataaaggacagacagaactcaaagttatccctttaaggtgcgcctgagacaaatgcatatctaattgcttcccctcccctattgtttacgtaaaaatgataattcactgagccagactaaattgtgtattcagtggaaggctgatcaaggactcaaaaaaatgcgatcttttgcctcttatctactcatgatctggaagccctcacctcaagtcccgctttacctgactaaagtacatcttacacatactgattgatgtctcatgtctccctaacatgtataaaagcaagctgtaccctgaccaccaagggcacatggtcatcagggccttctgaggctgtgtcacgggtgcaaccttaatcttggtgaaataaactttctaaattgatggatgccggatgtggtggctcatgcctgtaatcccagcactttgggaagctgagacggacagatcaactgaggtcaggaattcgagacaagcctggccaacatggtgaaactctgtctctaccaaagatacgaaaattagctggttgtattggcacacacctataattccagctgctcaggaggctgaggcaagaggatcgcttgcctgggaggcgaaggttgcagtgagccgagatcatgccactgcactcctccagcctgggtgacagagcaagatgccatctcaaaaaagaaaaaaaaaaattgatggagagttaacttttggtttacaatgtaaatgtttatttaaaaacagacattattttatgtaccattacaaatatactgctacccagctgctcgggaggctgaggcaggagaatgcttgaactcgggaggcggaggttgcagtgagccgagatcgcaccattgctctccagcctgggcgacagagcgagactccatctcaaataaaacaaaaacaaacaaatatactgccaactaaactgtgattttgtcaaaaataaatgttgttgatgactttacttccattaaagccactgtagtagccaagggaaagcttcctttttgtcctctgaaggttcactgaaaagtcaactgacaaaaggcacattaattggagaaagggcatacaaatttattaacatgcacatgggggagaaccagagtgattttgctgaagccccaaatggggttcagaaacttatataccatcttgaggttacagaatgggggtttggattgtggcataacaggttatgcgggtggagacctggctgacaaccacggtcttgttatgtaaatgaaacctcctaagtagaactccttaaagagaacaggtggtacatgtttctttcagacctttgcaaaccaacagtaaaattctaaaccctccaaccgactgatggaccctctgcttgcccaagggcattctgaagttaacctgaaaaactagttcaggcaatgatgggaagtgggggttggccatgcctcattatacactcctcccttggaattcaggtacagcaagccagcactaacattaaaacagagaccttaagactgacagaaaagactcttctgcagaggcttcttcattactctcaggcacacaggattcttggtttccgctgtagggtcctcactttacctgttcaaccttcatttgtctttcactgcctactcttggttagcactcggccagcgcacaggtttcccacaccctgaggtggacaccagcagggaaggtttgcgggagggctctgcctccctggcggccacccgcaggcccacagcaagacatgtgcagaggtgagcggagcgccgtcaccagctgccactctcccaaagaccagaaccatcccagagcacccggaggcaccaggaaagcggctcggaggcagaggcgccaggggcggggctgatgccgagaggtttcctctgccccgttccctcgcattggtcctgcaaccgctcccgtcagacgcgtttccgcctcctgtcctccggaaaggtgcccgcctcttgccttccggcccggcgcccgatttccgccttccgacccagctgtgggctgcgccccacgccagcccgcgccccgcatggctgccgccggggccaggcctgtggagctgggcttcgccgagtcggcgccggcgtggcgactgcgcagcgagcagttccccagcaa

SEQ ID NO: 37477 - DNA, 2300 bp, Homo sapien
gtgcttattctaaaacaagtaaatgtttgcctatggtctgagattctaatccacggagttcattctaatccacattcaacactatcatgtaccagtgggcctcataacccacctagccctgtgatttttcaggttcacttttctaaacttgtgaattaaatatttattttcttagttcagaagaggaaaaaaactcttgtaattgttgcccatttcaggagaaatcttgcatatgaaaacaagagataaatatacacaactgagggctgtggtttaaacaaaatcttgagaatgttttttgaccttatacatttgtgctttagtataacaaaatgatatagacaaaggtaacttttaatagaaccagtcactaaattaaaaaaatgacaaattcttctgcttagctaagcaacagagaaggtaaaatactaattcaattcatcaatttaagcaatactcattaagagccaagtatgtgcttactgaataagctgctaaggtttggtggttacagagtgtgcggtgaaatgatgtctacatcacagtccaacattcacagagtttaaaagcctaccaagaatcaagacagacacaaatacctaacatagacgtttgtatatgataagagagccagagtacaatttaggagaagaaattgtatggaaggaaggttcatttccattagaccagaaaagacagcacatttgaaggcctgaataagaaatattctggataagatactgtggctgctaccagaatggctcttgatgatctctacctcttggtatttatacccttatataatctctttcctatagtgtaagctggtcccaggtacttgtttctattgaatagaatagaacaaaagaaatgagatgccacttctgagattagattataagatactgtgaatttcttcttgtgccctctccctctctctctttctcttgccctctcatttgaatgaagccaactggcatgctgtcagtggcccagtgtaagtcctgttacaagaaattgatgattacctgtagccaaccctaagtgaagaactgaggtcctcagtcctacaaatggagagaaactgaatctagctaagaaccatgtgagtgagctgggaagaagatccaccctcagttgaaatttaagatgacatattgagcagacatactgagacacactgaaagtaagagagcaggaggaaacaaaaccagggtcatacaaagaacacaactgattttgagattctcacataagtattacaccttcagtgagcacgtgtactagaaatttaaaaaataaataaaataaaccttcaaagtgagctagcaaataaatttccctatggtctcagctctgagtggagagagaaaatgttccctgtggagtttatagccagaatccagctctcaaacaggtttcagcctgaactcacacaatctgtgtggcttccaaatttgcaagctgagaatttaattcaaagtggtctcaggttgatagcagtccaaaatgctaggtaggaaaaaaaatcctctctggacaaataaatcatcaaagcaagctcataagagcaggtttcaaaggtcatgagcttctaacacacacacaaaaatcacacacacaaaatgggggtagcagcaacatgggtagcatattcaaacttgaaaagactttaaatatttgtattattagatgtagattatgaaacacatattttaatgtggttaatttttttaaggaatcaaaactatgagtaaagaccaagaaaattgtgctggatggccacttccaccatggctcccctcctatttaagtctgggtactgtgtcacccgaagtcttcaggcacattgttccaggtttgggtttgcctatgaaagaaactcatgagagctggaagtgaggagtgaagaggaggtcttcacataaagcaggcttaaggattagacatagcaggtttgacagatgtgatggcttgcagaatcctttatgagctcccactgtccatctggataagatttacagacctttcagaaattcctataagcttgggttctgtgcccacactctagactgtcaggctaagatctctgatataaaacagacctcttctgatttttgtctagctgcttttctaatatctattcaccaagctcttccaataatagcataaggccctaattaatattaaacttttatcattataatacataggatgtcttctgttttcctgatcaaattctgactactattaaaatataaagaattgtccagaaatatataaaaaaagaatcacacatt

SEQ ID NO: 37478 - DNA, 2300 bp, Homo sapien
gtggatcttgactctgaattggctggggcatgcaaaatcgggggcacgcttggtgttgcccaggctcagctctgcctagacacacgtgagggccaagatctggtttgtgtttcatgagctctcccaggatgaagacccagccaggctgtctgaagaaggggtgttcttgagtaggagggaaggactgctccaatacgaaaaatctaacaatagcatagtccttaagagcttgagctttgaagagggagaacagacccatttaaggcatgaaaaataaaggaaactcttgagtccctccaaggaaaattccagccacctggctagcctcaagaagtagatgagcaccctgataagtaagaaggtaataatagcttaaaacaatagtcaagaaaattagagccacaaactaatcttaaatgacgagttaatgggtgcagcacaccaacatggtacatgtatacatacgtaacagacctgcacgttgtgcacatgtaccctaaaacttaaagtataattaaaaaaaaaagaaaattagagccacaaaatgtttgtttccctatagaaactagagataacatcttaacatatgtccctgagttgttctgtagaaacccagaccccgctaaatggaaaataccacctgttggctcgtagatctcagataaggaggaactgaggactgaacactcacaactgttctttgttctaaatttcttcctgagggacctggaggaagtcacacccacaggccagagcagaacattcctttctgctgaccccaagtttgtagccaaaacttaaccaatcacaaatcagaaaatctttgggtttttgtttgtttgtttgagacagagtctcactctgctgcccagcctggagtgcagtggcacgatctcagctcactgaaccctctgcctcccacgttcaaacgattctcatgcttcagcctcctgagtagctgggattacaggtgcacaccaccatgcccagataatttttgtatttttagtagagatggtgttttgccatgttggtctggctggtctcaaactcctggcctcaagttatccacccaccttggcctcccaaagcgctgagattacaggtgtgaaccactgcacctggtctcaaatcagaaaatctttgaattcatctaatggtcacctatcctgtgggccctcactttgagatattttgccttttttggccaaaccaatatgtagcctccatgtatggtatgaccttgcctgcaacctctgccttcccacctttaaaaacccttacacataagccatcagggagattaggccttaaggattagctgcctgatactccttgcttgctgcctgcaataaattcctcaacttctgtctcagcaatgccgatatcagtgcttgactttgataggctgggtgggtggacccaaatttggtttggtgaccctttgagcttagattcaaaattctagttttgtcactctgcagttttgtgatcttgagcaagttacttaacctctctgagccttgtttgtcatgtgtaatgaaaagagctatacttaccttgtgaggtagtcctcaggattcaatgagataataagtactcactaaacaaaactcgttattacagaagaatcactttgtctctgaagtgggcaattcaacccatttctaggagattttaaacatgattttagatatttggtgtgattttgtgaatgggtttatcgttaatagctttcatgctccagaattttcttgaataataggtttttgcaaagtgcattccatggaatactcatttgggtgacgttaatagacatcactcaaaagctgggtgaatattacaatgtttacttcatctgtaacaagctgagtagctacagtacatatctaagagggggctctaattctcaatattttccaaatttattagatcacagacttttcttttagtgaagtgcttaatgaaacttaagttctgtgaaaagtactttgagaaatattgctttaaaaagaaaaagattgagccctgtatcaggggaaatatctaatattatattaaacaaaaaagtcccactgaagaaaatcatcttattgttcatagaccttagtttaggtattggggccaaaggatggatgaccatttcaaacgatccaggctaagccaggaggagagctcaaagtctgatctggtgagtaagttgtgaagggaatgtgatgaaaaagtacacttctattgcaaagaaatcatgagctaggtttatacgctatgctgtgaatggccaatagattataaattca

SEQ ID NO: 37479 - DNA, 2300 bp, Homo sapien
agagtgcaccattgcactccagcctgggtgacagagcaagactccaccttaaaaaataaataaataaataaaagttggccgggcgcggtgtctcacacctgtaatcccagcactttgggaggtggaggcgggcggatcacaaggtcaggagatcgagaccatcctggccaacatggtgaaatcccgtctctactaaaatacaaaaaattagctgggcgtggtggtgcgcacctataaatcccagctactcgggaggctgaggcaggggaatcgcttaaacacaggaacccgggaggcagaggttgcagtgagccaagatcacaccactgcacaccagcctagtgacagagcaagactccatctccaaaaacaaacaaacaaacaaaaaacacctaaaagtaaaactgctgtatgatccagtaatttcactaactgggcatatagtcaaaagaaacaaaatcaatatatcgtaaagacatctgcactctcatgtttactgcgggactactcacaatcgccaaaatacggaatcagcctctgagttcatcagcggatgatggataaacagaacgtggtgtggatacacagtggaatattcttcagccatacagaggaatgacagcctgttatttgtacaagacggaactagggatcattatgttaagtgaaataagccaagcacagaaagacaaacattgaatgttctcacccacctactaaaaaagtagctctcgtgaagacagagggtagatgcgtggttaccagaggtggggaaatgtagcggggagagggggagaaagagaagttgattaaagggtacaaatacgtggtttgatagaaggaataagacgggccgggtgcggtggctcacgcctgtaatcccagcactttgggaggccgaggtgggcggatcacgaggtcagaagatcgagaccatcctggctaacacggtgaaaccccgtctctactaaaaatacaaaaaattagccgggcgtggtggcgggcgcctgtagtcccagctactcgggaggctgaggcaggagaatggcgtgaacccgggaggcggagcttgcagtgagccgagatcgcgccaccgcactccagcctgggcgacagagtgagactccgtctcaaaaaaaaaaaaaaaaaaaaaaaaaaaaaagaaggaataagacctagtgttacatagatcatagttgacaattgcctactgtatatttcaaaatagctaggagagaagaatcggaacggttctagcataaagcaaaaacaaatatttaaggcgatagatattccaagtaggctgatttgattttcacaattatataaatgcattaaactatcacatgtaccctgaaactatgtacatctattatgcatcaataaaaaagaaaaaagaaacaagaacttagattttaaactcagcactctcctagtgggctccttaaaaatatttttgtttgggaggacaaagtaggaggattccttgagcccgggagcttgaggctgcagtgagatcgtgccactgcactccagcctgagcgacagagagatacactggctctaaatataaataatataaatatatatttatggaataaataaatgaataaaatatctttgcatgctggtgagcccagggtacagtccgcccttggcagctcggtgacacagccaaggcagctgaacaatcctcgcccactagacagtggaggtcgccctccagaggaccttatcagatgtacgtgcaaagcagttttcaagacagttttctattcagagtgtggtttggccgttcagggagagagatcacaaaggaaaaccacctttaggaaagcaggtgagaaaggtgtaagttcccaggcttgggggtcctggcccagcctagctgtgggcaaccccgggaaggctgagccccgcaggctgtatggacaaagcatctcgctttccacactggccacaggtctatccctggcagtaaacaggtcacaggtgggcagcaggtctaacacctgtagcgaaagaacgcaggagaggaactgaggctctgctaccagcagatgctccaagcacatcccacggggaggaccatgcacaactcagctggccacaaccaggaaaagggtgtccagggcctcagagctgcttcagtggggccatttccaggctcccaagcagtaatgtgggtgccctctcaagaacagaagcggaacagcctaacgctaatgtttgggaagaagagaacagtgatccccctggttacctcccatctctctctgcagttctcatgcatctgtgca

SEQ ID NO: 37480 - DNA, 2300 bp, Homo sapien
ggagatgacaagcttaaatcataggatcagactcttagcacagactgataccataggctctcatctggcccattctcctgactctttacctttcaggaaaggtattcctgaaaaattgcaggagagaccatgctgtaggtctctttctagcgatctaggagttaatgccacagtgtgttcaaagccctttgatgcgatcagataatcagtaatgtatggaatatttgtgttcataacttgtgagaacggctgcatggcaggacaagaccccagcacaacagtatggaaaatccaccctaagcagacatgtcatgactgatgttgaacaatggactcaccagccaggcacggtggctcatgcctgtaatcccagcactttgggaggcagaagcaggcagatcacgaggtcaggagatcaaaaccatcctggttaacatggtgcaaccccgtctctactgaaaatacaaaaaaaaaaaaaaaaaaattggccgggcatggtggcgggtgcctgtagtcctagctactcgggaggctgaggcaggagaatggcgtgaacccaggaggcagagctttcagtgagccgagatcgtgccactgcactccagcctgggcgacagagcaagacttccgtctcgaaaacaaaacaacaacaaaaaaaacaatggattcaccatccgatgggctccctcactgccaggtcactcttcatggaagtatttgtattccagtcctttctgtggaaagaacttaacattctccttttcataacactgtatcttcagaaacaagagagtcgaagtctcctaattttcaggagtgtctatgttgaacatcaaaatatattctttagagcagatctttaataatcatatgacaagagaaaaactttcataatcttatgacatgagggaaggaatattaaagccgttctgtgggttattatctctaacgttcccaatagaataggctttgccagctgggtgcggtggctcatgcctgtaatcccagcactttgagaggccaaggcgggcaaatcacgaggtcaggagtctgagaccagcctgaccaacatggtgaaaccccgtctctactaaaaatacaaaaattagccgggcatggtggtgggcgcctgtaatcccagctactcaggaggctgaggcaggagaatcgcttgaacccgggaggcggagattacaatgagctgagatcacgccaccaactccagcttgggcgacagagcaagactctgtctaaaaaaaaaaaaaaaaaaaaaaaaaaaaaaaaaaaaaaaaaaataggctttgcccattatactctctcatattcattgacctgaatcctcaaatgaggtgtgtccattagtcaactccaatctcttgtcatatataagatggtagagatgagaagaaggtagctcctttacagcccactatttccactaactactacctgtgtttcaagatacagcctttcatccttctccagtgttgagagtgttgaacctcagagtttctcctctcattttctctaaatgagatacaatgccagccatcccaagctcttggcctgagttgttcatcttgaagtctaggactccaagaagcatgaaagagcttctttagtgaagctatgtcctcagtactgccaaaattcagacaatctccatggcctgacaatttaccttctatttgggtaatttattgtcccttacgcaaactctccagctgtcatggcacagacatatgatctgtatttagctctcactttaggtgtttccattgattctattctcactaatgtgcttcaggtatatccctgtctagaactcagattggggttaaagagtctgtccgtcattgaccaacagtcttaaatacttgatttgttgtcgttgttgtcctgtttgtttaagaactttacttctttatccaatgaacggagtatcttgtgtcctggaccctttgcaagaacccttcccctagcaacagatgcgtcatctcaaaatatttttctgattggccaaagagtaattgatttgcattttaatggtcagactctattacaccccacattctcttttcttttattcttgtctgttctgcctcactcccgagctctactgactcccaacagagcgcccaagaagaaaatggccataagtggagtccctgtgctaggatttttcatcatagctgtgctgatgagcgctcaggaatcatgggctatcaaaggtaggtgctgagggaatgaaatctgggacgatagactacgaagcattggagaaaagacctatggacatt

SEQ ID NO: 37481 - DNA, 2300 bp, Homo sapien
aatcttacatcagttattccaagaaacaaagtaggctttaactaaatggaatgtcaatatagctccagaaaaggtacaaacaacttcgccataccattacttagacaatattgttactgaaagaagtgtacggcctcaaaagtagttctccataaagacaggttacagactttaggccggccgcggtggctcacgcctgtaatcccagcactttcggaggctgaggcaggcagatcacaaggtcaggagattgagaccatcctggcgaacacggtgaaaccctgtttctactaaaaatacaaaaaaattagccaggagttgtggcgggcgcctgtagtcccagctacccaggaggctgaggcaggagaatggcatgaacctggggggctgagcttgcagtgagcagagatggtgccactgcactccagcctgggcgacagaacgagtctccatctcaaaacaaacaaacaaacaaaaaaaagacaaatgagtgcctatgtggtagcatgtgaattaatgcagaactttataagcatagttgtattctgaagtccattctgaatcttagatgttatatttatattaataaaaagcatagtaattatctaaatgtataataatatgtttaatattacatagttacatcaactgatgtaattcatagttttccctagtgttctctttcctgaatattgtgaaatgtattagttagcaaagtcgtcttgtatcttcccttatgataaaacaagagaaacataatataaagtgctatagcctcaatcaaatgaggaaatcataatgggaaccaagaatgagggattgaacactcttcacataaaatattcattattttaaaacataatgtggccaggcacgatggctcacgcctgtaacccagcagtttgggaggccgaggcaggaagaacatgaggtcaggagatcgagaccatcttggctaacacagtgaaacccatctccactaaaaatacaaaaaattagccaagcatggtggcaagtgcctgtagtcagagttacttgggaggttgaggcaggagaatctttgaaccgaggaggcagatgttgcagtgagctgagatcgctccactgcactccagcctgggcaacagagacagactccatctcaaaaaaaaaaaagagttgttctatgaacagctgactttcacagtcttcgatcgatctctcagacccatgaatacttggattgcacagttgaccttatcacattgttagggtaaatgccatacaaagccaccttcaggccctccattgcacataggtggcccctgttagccccttgcctgtgtgtgttctggaggggccactaaacctgggggcagcatcaggagacacacttgaaaaagatatttttactcagattaaattattaacaaactttcaatttcctttaacttattaaagacatccctacctgtaaacaggtacggattaagctctctagtcaatagctgtcattctgtcatgttatcagatacccggggctgctgctccttcaggcgtccacagaatcacagcattttccagtattgaaagacctgaaagatcacagtgccttcatttcaactgtgagacatgaaataattttcccaaatctacaacattaagatatggtgcaataaggaccagtttaaatgtctccggatttacaaccatgttccttccatctcctttactcctaaacacactcacacactcacttctgcaaacagttgtcttgtcaagtgggaaatgaatgctcttacaaggctcaaacttacgaacacatcactgaccagcacagagctggctcacaatcggacccaattaaagtgttttacatgcaactggatcaaatctttcaagcactaatttaaaaacaatcctttaaagaaggaaattctgtttcagaagaggaccttcatacagcatctctgaccagcaactgatgatgctattgaactcagatgctgattggttctccaacacgagattacccgacccaggagcaagaaagtcagtaacttcctccccataatttggaatgtgggtggaggggttcatagttcttcctgagtaagacttgcctcctcctctggcccctggtcctttcctgttctccagcatggtgtgtctgaagctccctggaggctcctgcatggcagcgctgacagtgacactgatggtgctgagcttcccactggctttggctggggacacccgacataagcgcacattgtgggtgctgagctactatggggtggggaaaatagggagttttgtta

SEQ ID NO: 37482 - DNA, 2300 bp, Homo sapien
gaggagggtaaggatgataatgaggtgattcttttgaaggaactagaattgctacacagtatcttcctcaaatcgtatactgctgccattcattaacataagtagccatattgctatgtgcatccataaattataggaatataaataattttaatacataggacattattctcagaaataggatgtgaaggattatgatatagtggctgagcctgagggatatataatttggttcaatctatagtgtaccatttactagctttgtatctttgcaaaagttgtttcatctccattgttttattctctctacctgtaagcatgaaaagggtatttattttagtgagttgatgtgagaatgaaataaaaatatgaagtataaaaagcacttagtgcaattctgagtataaagtaaaatgctcatttttacggcagcatgatgagaatcctgcccctggaaacactaaggcctataaggaatgagtgcctatgtggtagcatgtgaattaatgcagaacgctataagtatagttgtactttgaagtccattctgaatcttagatgttacatttatattaataaaaagcataataattatctaaatgtatataatatgtttaatattatatggttacatcaactgatgtaattcatagttttccctagtgttctctttcctgaacattcaaaaatgtattagttagcaaagtcgtcttatatcctcccttatgataaaacaagagaaacataatagtaaagtgctatagcctcaatcaaatgaggaaatcataatgggaaccaggaatgagggactgaacactcttcatataaaatattcattattttaaaacagaattgtgaccaggcatgatggctcacgccagtaaccccagcagtttggggttacactgctggtgtagaacacgaagtcaggagatcgagaccatcctggctaacacggtgaaaccccatctccactaaaaatacaaaaaattagccaagcgtggaggcacgtgcctgtagtcagagttactcgggaggctgtggcaggagaattgtttgaaccgaggaggcggaggttgcagtgagccaagatcatgccactgcactccagccagggcaacagagcaaggctctgtctcaaaaaagaagaagaaaaaaaagagttgttctgtgaacggctgactttgagagtctttgatcgatctctcagacccacgaatacctggattgcacacttgaccttatcacattgttagggtaagtgccgtacaaaggcaccttcagaccctccattgcacataggtggcccctgttagcccattcctgtgtgtgttctggaggtgccgctaaacctgggggcagcatcaggagacacgcttgaaaaagatatttttactcagattaaattattaacagactttcaatttcctttaacttattaaagacatcactacctggaaataggtacatattacactctctagtcaatagctgtcattctgtcatattatcagatacctggggctgccgctccttgaggcatctagagaatcacagaattttccagtattgaaagacctgaaagatcgcagtgccttcatttcaactgtgagacatgaagtaattttcccaaatctgtgacattaagatatggtacaataaagacaagattaaaggactccggatttacaaccatgttccctccgtctcctttactcttaaacacactcacacactcacttctgcaaacagttgtcttgtcaagtgggaaatgaatgctcttacaaggctcaaacttgtgaacacatcactgaccagcacagagctggctcacaatagctccccaattaaagtgttttacatgcaactggttcaaacctttcaagtactaaattaaaacaatcctttaaagaatgaaattatttcagaagaggaccttcatacagcatctctgagcagcaactgatgatgctgttgaactcagatgctgattggttctccgacacgagattacccaatccaggagcaaggaaatcagtaacttcctccctataatttggaatgtgggtggaggggggtcatagttctccctgagtgagacttgcctgctcctctggcccctggtcctgtcctcttctccagcatggtgtgtctgaagctccctggaggctccagcttggcagcgttgacagtgacactgatggtgctgagctcccgactggctttcgctggggacacccgacgtaagagcacattgagggtgctgagctactatggggtgggggaatatagggagttgt

SEQ ID NO: 37483 - DNA, 2300 bp, Homo sapien
aaagtgaggccactcccacatcccaccccaggccactgaagggtggccccagctccatgccctccccacaactgcagggtgagagcagcaacgcaggagtggtgaaggctctgggcctgggggcggtcccgccagctgctcaagggtcggggcagtgcagtcagatgcctcagtgacgcgaggcacaggggacatggggtacaagagtcccaccacggccactgctccggcagtggatgctgccgccaccgcttgcaacttcccgcagcagccggccactctggacagctcaccactgccagcatcaccatttatcttaaaatactaatgtgaacctcagctggttttcctagattactatcatcacaattagtttctttttttcataatttgtttcttttttgtgtgtttctttttcttttctccttctttctgaaggagtatgatctagtggctgagcttgaggggtatataatttggttctatctacagtgtaccatttactagtgtatctttgcaaaagttgtgttatctccatcgttgtagtctctccacctgtaagcatgaaaagggtgtttattttactgagctgatgtgagaattaaataaaaatatgaagtatagaaagcttttaatacaattctgagtacaaagtaaaatgcttatttttattgcagcatggtgagaatcctgcttctggaaacactaaggcacataaggaaggagtgcccatcagaactgtggtacagtgtgaattaatgcagagttttacatgtacagttatactgtgaagtccattctgaatcttagatgtcacatttatattaatataaagcataataattatctaaatgtagaattatatgtctaaaattacatgattacatcagctgatgtaattcatagtttttccctagggttctctttcctgaacattctgtaacatattacttagcacagtcttcttatatcttcccttatgataaatcaaaagaagcataatagtaaagggccataacctcaatcaaatgaggaaatcctaatgggaaccgggaatgagggattgaacacttttcacgtaaaatattaattattttgaaacagagttgttctgtcaacagctgactttgagtccttgaccgatctcccagacccctgaatacttcgattggacagttgaccttatcacattgttagggcaagtgctatacaaaggcaccttcagaccctccattgcacataggtggtccctgcaagccccttcctgtgtgtgctctggaggtgccactaaacttgggggcagcatcaggagacacactttatataaaaccttttactcagattaaattattaacaaactttccatttcctttaacttattaaggacatccctacctggaaataggtacagattacactctccagtcaacagctgtcattctgtcatatcatcagatacccaggggctgttgctacttgaggcgtccacagaatcacagcattttccagtattgaaagacctgaaagatcatggtgccttcatatcaactgtgagacatgaagtaattttcccaaatctacgacattaagatatggtgcaataaggaccagattaaaggtgtcctgattttcaaccatgttccctccatctcatttactcctaaacacagtcactgctgcaaatacttctgttgtcaagtgggaaatgaatgttcttacaagactcaaagttgtgaacacatcactgaccagctcagaggtggctcacaataaggacccaattaaagtgtttcccatgcaactgggtcgaaccttccaagtactaaattaaaacaatcttttaaagaaggaaattatttcagaagaggaccttcatactgcatctctgagcagcaactgatgatgatactgaactcagatgctgattggttctccaacgcgggattacccaatccaggagcaaagaaattagtaacttcctccctatgtttgggatgtgagtggtgggggtcatagttctccatgaatgtgagacttgcctgctaccctggcacctggtcctgtgctgttctccagcatggtgtgcctcaggctgcctggctggaggctcttgcatggcacctctgacagtgacactgatggtgctgagctccccactggctttggctgtgggcacccgacctaagtgcacactgtgggtgctgagctactataaagtgggtaaagtagggagctaaatttgtcactatgcccaggccatgtcccttaagaatatgtgacgttttcaacagggattgccc

SEQ ID NO: 37484 - DNA, 1742 bp, Homo sapien
actttatctgcatagttatactttgaagtccgttctgaatcttagatgctacatttatataaatacaaagcataatagctatctaaatgtagaattgtatgtttaaaattatatgattacatcaactgatgtaaatcacagattttccctagggttctgtttcctgaacattctgtaacgtattagttagcaaagtcttttttttttaaaactgagtctcgccgcatcaaccagaccggagtgcagtggcgtgctcccaactcactgcaacctctacctcccagaatcaagcaattcttgtgcctcagcctcccgagaagctgggattacaggcatgcaccaccaagaccagctgatttttctattttttttttttagtagagacggggtttcaccatcttggccaggctggtcttgaactcctgacctcaagtgatctgcccacctcagcctcccaaagtgctgggattataggcatgacccaccacgtcctgccagcaaagtcttcttatatattcccttacgataaaacaagagaagtggaatagtaaagggccatagtctcaatcaaatgaggaaatcctaatgggaaccaggaatgagggattgaacactcttcacataaaatattattttaaaacaaaattgttctgtcaacagctgactttgagtccttgatcgatctctcagacccatgaatacttggattgcacagttgaccttatcgcattgttagggtaagtgctatacaaaggcacattcagaccctccattgcatataggtggcccctgcaaaccccttgcctgtgtgtgttctggaggtgccactaaacttgggggaagcatcaggagatacacttgaaaaaactctttttactaagattaaattattaactaactttcaatttcctttaacttattagagacatctctacctgtaaataggtaaagattacactctccagtcaacagctgtcattctgtcatatcatcagatacccagggctgctgctccctgaggcatccacagaatcacattttccagtattgaaagacctgaaagatcacggtgccttcatttcaactgtgagacatgatgtaattttcacaaatctacaacagtaagatatagtgcaacaggaccagattaaggtctcctggtttgcaaccatgtcccctccatctcctttactcctgaacacactcactcctgcaaacagttctcttgtcaagtgggaaatgaatgctcttacaaggctcaaacttgtgaacacatcactgaccagcacagagctaaaataattggggctaaaaataccgccccaattaaagtgttttacatgcaactggttcaaacctttcaagtactaaaaacaatcctgtaaagaaggaaattctgtttcagaagaggaccttcatacagcatctctgaccagcaactgatgatgctattgaactcagatgctgattcgttctccaacactagattacccaatccaggagcaaggaaatcagtaacttactccctataacttggaatgtgggtggaggggttcatagttctccctgagtgagacttgcctgctgctctggcccctggtcctgtcctgttctccagcatggtgtgtctgaggctccctggaggctcctgcatggcagttctgacagtgacactgatggtgctgagctccccactggctttggctggggacaccagacgtaagtgcacattgtgggtgctg

SEQ ID NO: 37485 - DNA, 2300 bp, Homo sapien
ggggcaggtcctgccagctgctcaaggtttggggcagcgcagtcagctgcttcagggacacaaggcacagaggacatggggcacaggggtcccaccatggccactgctgccacagtcgttcctgccaccactgcttgcaacttcccactgcaactagccactctggagagctcgccactgccatcatcaccacccttttatcctaaaatgctaaggtgaaccttagatggctttcctagattgtcatcatcacaattagtttatttttttcacaaattctttcttcttttcttttttcttcctttgtgttttttgtttttgtttttgtttgtttttgacgggatcttcctcttgtcgatgatgatgaggggattcttttgaaggaaccagaattgctacatagtggctttctcaaattatgtaatgataccattcattaaaagaagtagtcttattgctatgcacacccataaattatagggatataaataattttaatacaaggaacattattctcagaaatagaatgtgaaggagtatgatatagtggctgagcttgaggggtagataatttggctcactccatagtgtaccttttactagctttgtacctttggaaaagttgttttacctccatctctttattctctccacctgtaagcatgaaaagggtgtttattttactgagctgatgtgagaatgaaataaacatatgaagtatagaaagcccttagtacaattctgagtacaaagtaaaatgcttatttctgctgcagcatggtgagaatcctgcccctggaaacactaaggcacataaggaaggagtgcctatcagaactgtggtagagtgtgaattaatgcagaactttacatgtatagttgtactatgaagtccattctgaatctcagatttcacatttatattaatataaagcataataattatctaaatgtagaattatatgtttaaaattacatgagtacatcaactgatataattcatagtttttccctaggactctctttcctgaacattctataacgtattagttagcacagtcttcttatatcttcccttacgataaaacaagagaagcacagtagtaaagggccatagcctcagtcaaatgaggaaatcctaatgggtaccaggaatgagggattaaacactcttcatgtaaaatattaattattttaaaacagagttgttctgtcaacagctcacgttgagtctttgatcgatctctcagccccctgaatacttggattgcacagttgaccttatcacatttttagggtaagtgctggacaaaggcaccttcagagcctccattgcacataggtggcccctgcaagccccttgcctgtgtgtgttctggagctgccactaaacttgagggcagcatcaggagacacacttgaaaacaaccttttactcagattaaattattaactttccatttcctttaacttattaaagacatccccacctgtaaacaggtgcagattaagctctctagtcaacagctgtcattctgtcatatcatcagatacccggggctgctgcttcttgaggcatccacagaatcacagcattttccagtattgaaagacctaaaagatcacggtgccttcatttcaactgtgagacatgaaataattttcccaaatctacgacattaagatatggtgcaataaggaccagattaaaggtctgcacatttgcaaccatgttccctccatctcatttactcctaaacacggtcactgctgcaaatacttctcttgtcaagtgggaaatgaatgctcttacaaggctcaaacttgtgaacacatcactgaccagctcagagctggctcacaatagggacccaattaaaatgttttacatgcaactggatcaaaccttttgagtactaaattaaaacaatcctttaaagaagacaattgtttcagaggaggaccttcatacagcatctctgaccagcaactgatgatgctagtgaactcaggtgctgactggttctccaacacgagattacccaatcaaggagcaaggaaatcagtaacttccttcctataatttggaatgtgggtggaggggggccatagttctccctgattgagacttgcctgctgctgtgaccactggtcttgtcctcttctccagcatggtgtgtctgaagctccctggaggctcctgtatggcagcgctgacagtgacattgacggtgctgagctccccactggctttggctggggacacccaacgtaagtgcacattgtgactgcagagctac

SEQ ID NO: 37486 - DNA, 2300 bp, Homo sapien
tgctgggctccccacactgccctcgcagtgctgtgatggtctccatgacaccgcccagctcttcccacgggtgccatgacatctcctgggactcgcgtgtttctcctaaaggtgcctcttgcttctgccttgggtcgcttagtggctgatccaggctggagcatccccgtctgagagcaagtggttttttactagtcctcttccaggctacccaccaacccatccccggggcctggtggttaagcatctggtacccaaaaacagacagcctgggttcaaacctcagctgcggtgtagactgaccatgtgacctctgcaagccttctaattgccctaattcgcaactccctcatctggaaaggaggggaaattgtaattctcttatggtgtaggtgttacattaaatagtgaccacaaagtgcctaggaggtgaaaagagctccaaatgggtaacaatttctaccctcctgcagttccctgggtagggatgggcacaggccggggaactccttacgagggtctgtgagctctgaggcacctgagacctcattgccctgacccgtaggatggactccggtggcagaggaactggaggctggtagtttggacacagacctgtttacagccttcgaacctcactttaaagaaatttctgcccttgcacctagcttattgctcaggaaagtagaaaagcgaaaagccttttcctgctgaaaatcaatggctctctttaaaatattaaaagaacagacaggaggagatggcacgccacgatggcaggggcaaggccaccgccctgaggctgcagctcagaacagatgctccgagtgcagccagatggtgtgattgaaaggaagagagcggccagcagttccagagtggccgcctggagacagccctcagaggtgcagctctgccaacactcacggacccacggcactgacttgccatcaccaagagaatattctgtgattcattcatgaaacaaaggttttcgtggtatgtgaatgttgtgtaaggattgtgaaggatataaagaagttatttcgattatctcagtgtttcctgtcagtatagatcatgtgtgcacaaatcttataataaatgaaattagttttgcatttctgagtgctttgtttgaaaaagataccctgtagtatatgataaaaagtaattctttgccaaaacaaaaagaatccttcgccaaatgtgtctttcacagcccatactcctccccctacaaataaaagtccaaaaaaaagaaaaagaaaaaaagaaaaaagagagagaaaagaaagcgagaatgtggccctgctggttcgtgtaacagcaataatcctgaagatgaagattctcagtagagaaacagatcacatatagccagaagtgtcaggataaatcccttcttattacaaagaacaatagcaattttaaaaactcatataaagataactttacattaaaaaactctttattgcttttttcctgtccgtaaaagaaatacagcctagttaaaaatatcaaacaaaaaaacctaaacagtggagaaatggaaaaagatcagaaattaaatacttccatcatctccactgcccctcgagccagagcctggtaaacacccttcacgttttgtttctcgctgcctgttctgagacaaaggtggcacatgagttcatccttataagaactggatcatgctctacatatggctctggcacatttttttaacttaataatatgtctcagacttctttgcacatcaatgcctattgatctatttcattctttttaatggctgccttgcatggctctaccatgatttatttaaccaaatccctgttgattgacatttgggttctttccaatttttgctattacagacaatgttacaatagagatctttgtctgtaaatccttgtggacttcgtgaatatttctttggacgaatcctcaggagtgaagttgcttggtcatagagatgtgcgtgagcgtgcacccccaggctccacgcccaccttgccctgccctcccccatcagaggatgggaaggggcgggggagttgaggtaggcctttataaggaagcagaaagcttggtcttggtctatggttgcagcttttaggaggccacggcttttactcccaacaggcccactgagactaatggggccacactactgggaggggggtgagaattaactcattaaatgagcatcattctgcataattgtgtgaaatacggattttattgtgagtggaaggccttgcaaacgaaggacagagactgtttctttcatgttt

SEQ ID NO: 37487 - DNA, 1588 bp, Homo sapien
accctgccgtccgtccctcaccccagcctccgaccctgcccgccagccctcacccccgcctccgaccctgccctccgtccctcacctccgcctccgaccctgacctccgtccctcacccccgcctccggccctgcccgccagccctcacccccgcctccgaccctgccatccgtccctcacctccgcctccgaccctgacctccgtccctcacccccgcctccggccctgacctccgtccctcacctccgcctccgaccctgacctccgtccctcacccccgcctccggccctgacctccgtccctcacctccgcctccgaccctgccctccgtccctcacctccgcctccggccctgcccgccgtcccccacccccgcctccgaccctgccctccgtcccccaccccagcctccgaccctgcccgccagccctcacccccgcctccgaccctgccctccgtccctcacccccgcctccgaccctgccctccgtccctcacctccgcctccgaccctgccctccgtccctcacctccgcctccggccctgccctccgtccctcacctccgcctccggccctgcccgccgtcccccacccccgcctccggccctgcccgccagccctcacccccttctccgaccctgccctccgtccctcacctccgcctccgaccctgcccgcccgccctcaccctcgcctttgaccctgcccgccagctctcctgctgccgtgtgccgtgcttgtgctgggacagttttccgagatgtggcagccagcacaaaccagctgctcgatctggtactcaagcaaaaaaagaaagaaagaaagaaaaatattattcccaacttagaggaaaactggggctcatgtcaggttcccgcgtgacaccttcctgtggggttttaaaggatgattttgaccatatgtgcatgtcgtcttacacgttgtctttttgagccctttcacatgactgttgaaggtagcagtgatctagtggtgtgatctcaagagtggtgctcaccattttggttaaaatataagaatatgtggtgttgaatggattgaggcagcactcggtgtcccttgcctattcatagggtttgttttttgtttttttgtttgtttctttttatgaccagcctgaatttctcttcatcagtgcagtggtcctctggggctgtctgtatttgagtcactctctgagggcctgggagtgtgcagagagagcatgtttgagactggcagctgcaccagcagcaacaggaagggcctataacggtcatgactaatactccgtgctgatcgcattgttggacaaaaagtatttccagtgaatgttgtcacaagtttaaataaaaggctttactttgtgtttgctttttgtttaggtaactactccagacccccagcgtatagtggggtgcccagtgcaagctacagcggcccagggcccggtatgggtatcagtgccaacaaccagatgcatggacaagggccaagccagccatgtggtgctgtgcccctgggacgaatgccatcagctgggatgcagaacagaccatttcctggaaatatgagcagcatga

SEQ ID NO: 37488 - DNA, 2300 bp, Homo sapien
aaacatctctggctccctccttcccttagaatcagacccttcaaaatcttgtggtatttccccaaataccataattttgagttgtgacatctggtttccagttctcccaggctggggtttcttgttaaagggacatcggaatctcgacatcccgagctgccaccctgaccttgtgcaggagtctcactgccccacttcctggcatccatgcactctagatggttctggcacttcccccagacaaggaagctacatttttttctaggatgtacctttttagaagcctttgtctcttccagaaggtatgtccggcacgatgggactcccccactctcccttgcctcaaacatcacggaacatctagacatcagtgagcgtcccactagaaaaaggcccctgaatcttcaagaagctccaagaggggagttagattgtctggaaattccccgaagttcttcctgctacacccactggagcccaggatttgagaaccaagcccgccggccgcggcatactaggctcggctttctgtttcgaagctcgaggctgtaccggggagagaggatgtggtccatgggaaggggaagtgccactgctccagggagccaagcatggcttcctcagggcctggctcctcaggcagcaggaggtgggcagcactgtgcagcgggtaagagcacaggctgtgatatcagataggcaggtgttggactcccagctctggccaagtgacctctggcaaacccctttcctcccaagcactggcatcctcacaggtataacaggatacagatggtgggcaaatgccgcggccacatcctacacggggagagacgcttcatcaacaacagccatgaacactgtctggcctgttcatcagggcccagcagacccatcacacagacacatggtaaaagcacgaggaatatttcatttcatggtcacaggtaagtgcttaagctggtagtgaaggaggaagcccaaaggctactgaggcggcatcacagtgatggtcaagaacaggccagaggctggctgcagtggctcaagcctgtaatcccagcactttgggaggcccaggcgggcagatcatctgaggctgggagttcgagaccagcctgaccaacacagagaaaccccatctttactaaaaaaacaaaattagccgggaatagtggcgcatgcctgtaatcccagctactcgggaggctgaggcaggagaattgcttgaacccgggaggcagaggttgcggtgagctgagatcgcgccattgcactccagcctgggcaacaggagcaaaactcagtctcaaaacaaacaaacaaacaaacaaacaacaacaacaataacaacaaaaacaagaacagggcggaaagcagcacggagggaggatgggagaggcagcaaggacccccacaccggcaggtgcaatccattctgcatggacctccatggcctagtcagagtgagtgagaggctgaaagggccactgcaaataaaaacgacacaaagcatgaattgtggtgatattggaggtgagtaaaaagatgcaaatatgaattgggggaaatgttcagaaaatctcaccttctgaaaagaaaactggcaaaaagcaatcaaattagccaactttaatgcctgctatgttgaccctgccagattttttttttttggggaggggtgtatattcaacagtatggacaactagtatacagtacacaaagtgactgcgcagtgtatgaagattcaatcacagatcaaccacagccagtagactactcattaggcaaaaatcaatgaaaccaaatcaatgaaaccatcaaattttaaagccattttatggtgaatattgacaacagaaaatgaaattaatactgccttaaaaaaacccaacaaaaagacccccaaaattgcatatggtaaaaaatcaaatcacaaaaaaaatttttcttagtagaaataatagttctataaaaaattcataatggcagctttcataatactgattggtgaaaaatcttagttataaattttatgcagagaagaaatgactccaataaaaagaattttagagtggaatagggaggagccaagatggccgaataggaacagctccggtctacagctcccagcgtgagcgacgcagaagacgggtgatttctgcatttccatctgaggtaccgggttcatctcactagggagtgccagacagtgggcgcaggccagtgtgtgtgcgcaccgtgcgcgagccgaagcagggcgaggcattgcctcacctgggaagcgcaaggggtcaggg

SEQ ID NO: 37489 - DNA, 2300 bp, Homo sapien
gcttattctaaaacaagtaaatgtttgcctatggtctgagattctaatccacggagttcattctaatccacattcaacactatcatgtaccagtgggcctcataacccacctagccctgtgatttttcaggttcacttttctaaacttgtgaattaaatatttattttcttagttcagaagaggaaaaaaactcttgtaattgttgcccatttcaggagaaatcttgcatatgaaaacaagagataaatatacacaactgagggctgtggtttaaacaaaatcttgagaatgttttttgaccttatacatttgtgctttagtataacaaaatgatatagacaaaggtaacttttaatagaaccagtcactacattaaaaaaatgacaaattcttctgcttagctaagcaacagagaaggtaaaatactaattcaattcatcaatttaagcaatactcattaagagccaagtatgtgctcactgaataagctgctaaggtttggtggttacagagtgtgcggtgaaatgatgtctacatcacagtccaacattcacagagtttaaaagcctaccaagaatcaagacagacacaaatacctaacatagacgtttgtatatgataagagagccagagtacaatttaggagaagaaattgtatggaaggaaggttcatttccattagaccagaaaagacagcacatttgaaggcctgaataagaaatattctggatgagatattgtggctgctaccagaatggctcttgatgatctctacctcttggtatttatacccttatataatctctttcctatagtgtaagctggtcccaggtacttgtttctattgaatagaatagaacaaaagaaatgagatgccacttctgagattagtttataagatactgtgaatttcatcttgtgccctctccctctctctctttctcttgccctctcatttgaatgaagccaactggcatgctgtcagtggcacagtgtaagtcctgttacaagaaattgatgattacctgtagccaaccctaagtgaagaactgaggtcctcagtcctacaaatggagagaaactgaatctagctaagaaccatgtgagtgagctgggaagaagatccaccctcagttgaaatttaagatgacatattgagcagacatactgagacacactgaaagtaagagagcaggaggaaacaaaaccagggtcatacaaagaacacaactgattttgagattctcacataagtattacaccttcagtgagcacgtgtactagaaatttaaaaaataaataaaataaaccttcaaagtgagctagcaaataaatttccctatggtctcagctctgagtggagagagaaaatgttccctgtggagtttatagccagaatccagctctcaaacaggtttcagcctgaactcacacaatctgtgtggcttccaaatttgcaagctgagaatttaattcaaagtggtctcaggttgatagcagtccaaaatgctaggtaggaaaaaaaatcctctctggacaaataaatcatcaaagcaagctcataagagcaggtttcaaaggtcatgagcttctaacacacacacacaaaaatcacacacacaaaatgggggtagcagcaacatgggtagcgtattcaaacttgaaaagactttaaatatttgtattattagatgtagattatgaaacacatattttaatgtggttaatttttttaaggaatcaaaactatgagtaaagaccaagaaaattgtgctggatggccacttccaccatggctcccctcctatttaagtctgggtactgtgtcacccgaagtcttcaggcacattgttccaggtttgggtttgcctatgaaagaaactcatgagagctggaaatgaggagtgaagaggaggtcttcacataaagcaggcttaaggattagacatagcaggtttgacagatgtgatggcttgcagaatcctttatgagctcccactgtccatctggataagatttacagacctttcagaaattcctataagcttgggttctgtgcccacactctagactgtcaggctaagatctctgatataaaacagacctcttctgattttgtctagctgcttttctaatatctattcaccaagctcttccaataatagcataaggccctaattaatattaaacttttatcattataatacataggatgtcttctgttttcctgatcaaattctgactactattaaaatataaagaattgtccagaaatatataaaaaaagaatcacacattg

SEQ ID NO: 37490 - DNA, 2300 bp, Homo sapien
agctacttgggaggctgaggtgggaggatcacttgagcccagggaggctgagactgcagtgagtcatgatcaggcctctgcactccagcctgggtgacagagtgagaccctgtctcaaaacaacaaaaaagtagcagccaacatcaactgaccttttgtaccaggtgcctattgataccatagtttaatttcttataactgtttcttatttcacttaccaactctgtcttcagttactcccagatttttactgtgtgtgtacagatgaccttttgtttagactgaattgtctccccagaagtaagattactgtgagtcatggtgaatggacattctccttacccttgatgtaaattgacagggttttgggtgcctcccagctataatcttagcactttgggaggctaagagaggaggattgcttgaggccaagagttggaggaggcagtatggcagtatggtgagaccctgtctccattattttaaaaaattgacaggctttaccctggaaggcttatacacaatttaaccacctctcatagtataagaaagtgcccatttcactgcacctttgccagcacagggtattataatttagtaagtcattttttgtttgattattttaaatagacaaaagacctcatgttactttacttgtcacatttcaacatctttcctcagcttattagctctatttcttttctgtctgtaaatggttgttgctgttttggtctttgagacagggtcttgctctgtcaccaggctggactgtagtggcataatcatgcctcactgcagccttgacctcccaggctcaaacttcagcaattccgagtagctgggactacaagtgtgcaccaccacccccagctaacttttttcttcttttggatagagacagggtctcactgtgttgtccagaccggtctctagctcctggccttaagcaatcctcctgcattagcttctgaaattactggaatttcaggcatgagccaccatgcctgggctgggctagtcccatattctctagagttctctttactttgtgctagccaatctctcattatgctgttcacctgttataatgaataattctctgtattaaattttaccactttaaacttttgagtggtttatgcttcctgattggactctgactaatatgttaggaagggtcccaggaggtagacccacaccgatgggatttgggcataggtttggtttcccagggggcagtgctgagctctttgccagtgggaaatgggatgctggtgatttccagtaggtgacctcacagtgactcaagctaccacttactgttgattgtgacgaaatgccagctgaggcacatgccttgggagctaagtggttgctgcccttgaccactgtgaagactggtgtgggaagggtcgctttggatgcacttgagcaggggtccccaacccctgagccatggagccgcaaggagccacacagcaggaggtgagcggtgtcgagtgagggagtgagggaagcttcctctgtatttacagccactcccctttgctcacattcccgcctgagctccaccttctcagatgagcagcagcgttagattctcataggagaacgcaccctgttgtgaaccgtgcatgtgagggatcgaggttgcgctgtccttatgagaatctaatacctattgatctgttactttctcccatcacgctcaggtgggaacatccagttgcaggaaaacaagcttaacacgcccactgattctacattatggtgagttctataattattttattatatattacagtgtaataatggaaataaagtgcctaataaatgcaaatgtgcttacatcttttggcccagctcctacctcccggcagcctctccaggcccagaactttctccagtcagcctctacagaccaagctcatgactctcaatggcctatttaggcccataccctacgtcacggcagcctccgcagatgaggctactgcctcacaacagcctccacaggcacagctccatcgttacaatggcctctttagacccagctcctgcctcccagccttctctccaggccctgaactttctcaagttgacctcaccaggcccagctcatgcttctttgcagcctctccaggcccagctcctgcatcttggtggcccctccaggcccagcctctgcctcccgtcagcctctacagtcccaacgtctgcctcacagcagattcttcacgcccagcttctacctcactgtggaccccccaagccaagctcccaacctttcagcagcttct

SEQ ID NO: 37491 - DNA, 2300 bp, Homo sapien
ttcacaacttgtgattggcatctgaggttgtggacagtctggtgttactaagcccttaacctgtagggtgtatactaactccaggtaatcagtgtcacagttgaattacaggatacccaattgttttccagagagttggaatattggttggtatgggaaacaccccccaccccccacaatttgctgttaaaagtggagtgttgatagtatagaggaaaatcatggttatttttctttttacagatatagtagtttcaaaattaactattatccctatgggaaataactttataaaatagagtccactgttcgtgtatatagtacgttttgtttttagtgtatggattctactcatttccagctcagcacctttggcccaccacttgcaacatacattggtaatacagttagattcttggttgcactctgtattttgtccttatatacttccacatcctaaataatttaatttgtgtagcttgtgatttgttctttgtgcattaaaattctgtgggttttatcaaatgcatagtgtcagatatccactactgaagtagcatacagaatacttcaaatccccaccccagacagtcactgatctgactatcatctctttggttgtgctttttccagaatgttatatgaatggagtcatataatgtatagcatcttcatactgccaccctttacttagcaacatagatgcaagattcattcatttgttttcatggattgacagttcattcctttctgttggtgaatggtattccattgcatggttgtacttcaaattgattatgcattcagctattgaagaacgttctgactacttcaagttttggccattatgagtagagtggctcgtatataattacatgctagtttttgtttgaacataatttttcaaagcagctgtctaaacatacacaatttaggggtgcatttgttggattgtaaggtaacacttgtttatctttgggaaaaactgtcaaactatttcccaaagtggctgtacccattcatgcattctgccagtaatgaatggccgtacctattgttcttcaacctccaattgttactgttgagcttttttaagagtcccacagttgtactaggtgtgcagtgatatctcagcattattttaatttgcagtctcctaatgagatatattgagcatccttttgtgtgattatgtgctatcagtatattttcttttttttttattttattgagatagagtctcgttctgtcactcaggctggagtgcagtggcgtgatcttgggtcactgcaacctccacctccgatgttcaagcaattctcttgcatcagcctcccaagtagctgggattacaggcacccaccaccatgcctggctaatttttttgtatttttagtagagagggggtatcactatgttggccaggctgatctcaaattcctgacctcaggtgactcacccgcttcagcctcccaaagtcctggggttataggcatgagccaccacacctggcctgctatctatatattttctttggctggatgtctgttcagatatttacccagttttatttgggtttttagttttcttagtgttcgtttgaagagttctttgtgtattttcaatacagtttttaaaatcacgtttgtattttgtaaatatcttctgacagtgtgtcttgtctttttgttctctgaatagggtttttcatagtagaaaatttagttttataaagtctgttctcagtattttcacgaattggcacttgatgctgtgtgttaaaactcaacaccagatccaatgtctcttaggttttcttttagattatttatagttttgcatttgaagttgtagtctctggactattttgagtaggtttttgtgttttactttgtgtatagagtcatttcattctatatggcttccaaataattcttccatcaccatttatgggaagggtatggatatactggcctttatttcggtttgaatttccaaaattatgacactgaataaactgaatattgaattttataggtatttcaggacagccaggagggggcgcacatccgccgagaaactgtgagcaagagcgtctgtgctgaaccatggcgccaccagagggcgcgcgatcccgccccaaccaacttcccgctgaagtgccagaagcagcgaggagcttcaacttcctcagggcagcacgggggtcgtgttaatttggtgttcttcattggtgagtaaaaagctcctgtccacggccctgagtgccaaggagtgagtctttagagcactcagcagag

SEQ ID NO: 37492 - DNA, 2300 bp, Homo sapien
tataccccataagtgcacaaaacagacccccttctcacttctgttgttcacagaggcggaagcaacggaaaaacattcaaagataagagtctcatgatagtaagaagtcttgatccatgatcttcagaaagagctgctcacatcaaggatgccatcttcttctggggagaaacttccctgattagctttaccttaagggtttcaatggatgtagagttccaagagtgaccctgctcagttgtgagattatgaccccaaggttcaagatcctgatgttttgttgcagtgatgatgccaagggcagcgtttctctgatgttctcagaagatcccatctttgggttctagattgtgaaggggttgattgtcctcagtgaaccataaaaagctctttacctggtgaaaatacactgatacatagtaatctactgttataacattagccctcctgcatgggaaagctttagtacaaccagaacacatacattgaaaatgacaactgaatgaaacccctttataaatgtttaaatgcctcatcaggtagccaaatgtacatgaagctttgattgacttcccaggagtatgggtttgacaaactaaacattgtttataaactattttaacaatctgtaagtcaccacaccaacatatttaatttggatcattttatcttttccaggatgagtcatggaatgcataacttttaataacaaaagctttaaggactcacgaaggacaaggcagccatcttggttctccatgagtccatgcttaacatcggacttatgtcctcttgggtgccagttgtttctccaaattgggcacatagcatggataactgatgggttatcacaggtaatttgacttagaccatggagttcattcaaattgtatatctaaacaatttcagtataggctgattaagtatgcaaacctggtgaagcatttcctcggtattcaattaatttttattctatttgggttagcagttttataagccagtcagtcttttcattaaagtttcagcaattcttacccagtccaaatgatgtgattttgaagttactagaaacctgtattccacagtgcttttcagggtcctccccatccgttcacgaacctcctaaaagacaccatgttctaggatttttgtgtgcttgtgaagttttcagaaactacatcagcatgaagcaattaactgcggaaatgactttaaatactcaaaaagacacaattgacaaagaaatttggttataacaacaacataaccataattatgatcggtagcatatactcagaaaaattagaattttagaaatcccatacaactttggaacatatattaatatcattcactaaaatataacctgaagaaggttaaattttttttttgacactattctgtatcgaaaagtccaaaatgtttcttaaaaagtaactaaaaaaacactggagtaattaaaggacacttcctgtgcaggggatggaaaaatctcaacaaaaaaggagcgcagaagagcctggctaggcgggagaacacggtcaggcccgcaggagacgccgcggcacctgccagaaagagagccgcaggccaagaccaggagacgcgagagaggtgggcagggctgcccgagagacccaggcggccattgcccgccctgcgtctgcgcctgcgccggagcctcctccacactgcgccagcgccgagtccggccgcctcctcattgcgccggcgccggggcttcctccacaccgcgcctgcgccgatgacaacccgcctctacaggacgcctgcgcaacgccatagtcacctcatcagctccgtgcacttacgagtctctctctgatcgaccacgtgttcctgtcggctcacagaggccgcctcagggtcctcccccattgtcttcctcgcaccctccactgttcccggcccttcactctgcgcttgcgcaggagtcgctcgctcctctctgcgcctgcgcagaggccacctcctccccgcccgtccgctcccttggcgtcgtcttgggccgcgccccgaccccttctgtttacgcatgcgcaggagccgccctgcgcgggtggggggctgagcccctgtggcttcaggtttaaaggcgcgagcgccacccacgcaggcacaagggctcctagtcgttttatttttagcgtaaggttttcctctttaacaaggaagtaaaaaaaaaagttgtgcaataaatattaatcgtccttatatgtactcgggaacgttcgtcctttaggttttctcctggcgcatgggcgccgccaatcatttcg

SEQ ID NO: 37493 - DNA, 2300 bp, Homo sapien
cctgtagaccacgggagagatgggggggccaggagcctatagaactccaagtccaaggggacccttgctgggagaacacaggccaagaccttccttcctgccacaggcttctgtccctgctgtctgctcccccaggactccccccacacccgggatcttcctcctcaccctccttggcctctctcagtgaccctgtctacacacagatgtgctgtccatgtgagtggaaggaaggaaggatgaggtccactcacaggggtgaagctgtctcctgagggggcagcccacctccaggtcacaccgccccacccaacacagcctccagtccagctccaggtgggccgcacccagcccttcactcacttcaaatggcccaagacgcatggattccactggccagccggactggaacaacttctccccttataagtatctagtgggtgcccacggaatgccaggcaatgggccaggctcagagatgagtgattcctcaggaacaatgggctcaacgcccttaattcacatcagaggaaactgaggctcagagagggcggagagggccctggtaacacagccagccggtgaaagtaagagggggggcccaggccctgctcccggcccacccgcctgggcttgctggcgaggctgctggcccaggcagtctgggcactgtggaagcagccggcttgaggcacaggggatgtggcctcctcccacacacttacctccctgactacatcttaggctgacatccagattaactcatattccctacagggagctgcacggccagaagctgctggttgcagaagccaccagctggttgtacaagcaccgctcccctggttgtgggtgacagatgagatgcactcacgtgaacacacatgcatgtgcacacacacatgcacacagacgcacacacaaacacacacaggcatacacacgcacacgcacatccacacacacacatgcgcacacacacgcacacgcctgcactcacacacccccgtcggccccaagcaggaaggcgcccccggcacaccagcccctctcagcgcccccagcgggcccggcgcctggagggttaaggcgggcgcgtcccgcgggtgggcggggggggggggacgggaccggtgccgggagctccgctgccctggcgtcccctgggtccaggcccagtcgctccttgggcctctctcgcggggccgcctccgcctcctccttgccgagacgggcgtggggcacggggtcgccgcccggcggggagctcatccggcggcgcagacgccccgcggctccggggagggacttggcctgggccccggccccgcgctcctctggggaggagccgagaggctgcagctggcggcggcggccccgggcgggagggggtcccaggaagcggccaggccggagccccccactcggccgcagctgctggcctggccagaaccgagcgcgccctcccggtctccgccgcttccctctgcaaaccgcgggcaggaggagccctctccttagcgggcccggagctcagaggcgtcgcggggcgcggccgaggggaggaggaaggagagcgggagcgcagccggcccgggcccagccgtgactcgtggggcggcggctccgccaatctgtgggcgctgacgcggggggcggctccgcggcgctcgatatctgcccgcccgggacgcggggcgccgagaggctcggccaggcgggagctgcgctcggggcggccgctgcacctgcccgggaccccgccggccgctccccgcgcccaccccttccgcccttcgccccccccttccccccagccccggtctcccgggcgcggcgtgagagcagagcccggcccggaggagccgccccttccccgcccgcccgcccggcgcctggagaggagcgcgctgaggatcgggacgcctgcggccgccgccaccgcccaggcccgtcgcgccccggccgggatggacccacacgcccgatgagccccgcgccggcggctgcgagcgccgagcctccccctgctgcggccccagccgccccccgcgcgcccggctccgcggaccaggacccctgggctccccggctgagggcgcggccgctccggagaggccgagcggggacgggcccgagatggcgcggggacccagcgctccggcggcgggcgccctgcacgcggcccgggcccggggacagccccggagctggtagccgcccggcaccgatggaccttgacccgcgaggcggcgccgcgctcgtgcccagctgcagctagaggggcgcgcgggcagaac

SEQ ID NO: 37494 - DNA, 2300 bp, Homo sapien
cccagtgtcttctgtctaaacacactggctgtttggaagcctctgagccttgcctgctggtcaggttcaaggaaatgcttggaaatttgagaaccagagcattggcctgggctgtggctctcggcagggagagacggccgcccagagcagcgagtggccaggaagtgtatcctagccccccaccccgcccccgtgtccaccgcaggacagagcttcggcagaaagcacctcagctttaggtgaattcgagctaggacaagttccgcgtttccctccagcccagcaggcagacggagggtctgtccctcctccagaacggtcccttgaccccagagatgtgaggacaggctgcgtgggcggcgggtcctccatgggagcctgggctggagagagtgctgcctccttcctctctccccacccaaggctgctctcattaaaatcaaatttagcctcttgcatcattgtgcccctggttgttggaacaaaagcagagagctggggaaggttcctgacagactgggcgtgtctgtgagtttcatgcagcctgtggtcaatggtaggttctcccctctactccaggggagggccacagcccctcgcaccctcagctgaggtcatggttgggccatttcggtgaccctgggacagacgtggcggggatggcagggcagcgctgacgtcctggaattagttttgctgtagttagagctgtctgtggtgtctccagagggtgagtaagaattacaggcctttcaccgtgttattagttggcagccgagcggccacagaagaaagcgcagacgttgcagggccctctttaagcagaggcgccttcaacacatctgcacttgcttgaacccaaagttaaaaacactggcgtcggtgccctctccccgtcatccgactcacgggcctgttctttccatgctgatgttcgtcctcgctgctccctgcaggccgcatgcgggtgctgaaggtgcagaattcctctcccccggggaggcggccgtggactcctatcccaactggctcaagttccacattggtatcaaccggtacgagctgtactccagacacaacccggccatcgaggccctgctgcacgacctcagctcccagaggatcaccagcgtgggtaggtgtccttgggtgcactcagggccgtctgtgtgccggctgtgtggcatcagggctgctggggcaggctatgtgttagagaggtctgggaggccgttgctcattacggcagcgtcacctcctgcagcaatctgcacgggcagcgaggagggacagagggctcgcgtctcgtgtgctctcacactggatgtgctcctgatctgccgcacgatgagcggggagacgcctggacagccggtccactgcgctctgcgtcctcacctgggtggtcccgggggtgccaactggatgacagagtccttccctcctggggtagaggaatagaggggtatctctggcggcggtgacccctccaccggaagcgtgtgcatggaactctcctgcttttctacacacgaccctggctgggtggggagacagccatgagcctgcttcttgtggttttgaagccgtccttcgtcagacctcagcaaggcgctgtgcagtttcatactgaggagacataggcagggctcaggacggaggcctgggcctcccagatggaggagtttgaaggcaacatctccaggtactttgggatctgctgaattggacaaaaaagggcatccagttgctgatttcaggaaaatatgccactgcagcttctgagcgtggaggtttggtgccattgttctcagcttgtaggcgattgtttgtgaaggtcccatttgtcaccagtgcttggagaggtagtgagggcggggctgaggccctttagtgggagcagctgctccccggggattgcagggagtgggcctgggtgcacacagctgtgggcaggtgcagaggccatgacagcctgaaggcagggctttctttgcgctgtgtgatgaggccagcagtcccaggcattagcttcatgtgtgtctcagaagcaaccttggtgctgaaagggtcccagcagcctggggttctgtccagttgctgacacaggacttaggtgtcccctttcaggccagcaggtaggttctcctgagctcttcggggctgtttctggctctctctgccgggtgctgagttgtttgctgggcactcacctggtcatggggagacagaacttgcagctctctccccaccccttgatcagctcacctcataacagagatcagctggacaagctggga

SEQ ID NO: 37495 - DNA, 2300 bp, Homo sapien
ccctcctggaaacaggcaggcagcctcctgaccacacttgggcttaccaagaacaccatccccaggccaggccacacagtgcagctgctggatgacctcagccagaaccctcctcccacggagccctccacgccaggaccctcctcccacggggccctcgacgccgggaccctcctcccacagagtcctccacgccgggaccctcctcccacggggccctccacgccaggaccctcctcccacgcggccctcgacgccgggaccctcctcccacagagtcctccacgccgggaccctcctcccatggggccccactgatgcgtgtcattcaccaccaccaaagtgtcagtcgacgtctcccgccccggccaccccgggctccccgaacatgctgctgctgctcctgctctgccctccaggggtcctcgctgccccggaacagaccccccagcgcacccactcctgtctcccgtctgcatgatggttggggtcggccacgccagccttcctgatgcttggatgggagggtcctgctggggctgctgctcctgcctctgtactcgctgccctggcctggaccaccctggcctgtgtcttccagcatcatctcccaggccgtcttttctttcatagctcactgcatcctcagcctcctgggctcaggcgaaactcccacctcagcctcccgagtagctgggactataggacccaccggggtccagcagcgggtccacactgaagccaggttgatgtggcgcttttcccttcatttactggtaggtattattcagtatattattgagagcagtaaacacacaggactcttcccttcattaaccgataggtattattcagtatattattgagagcagtaaacacacaggaattttcccttcatttaccaataggtattattcagtatattactgagggcagtaaacacacaggactttccatgtgccaggctctatcctcagagctttctgtatcgcgactcatctaataccaggctctatggggcaggcgtttttccaccgattttacagatgggaacactgaatcggggagacaccaaggacctgtctgaggtggccggccagggtgaggcatgtggaccagacggcccggccaccctccatccacccacggccccacaggagcctcgtgaagggctcctggtgttccgaacgccgggacacagaggtccagccacgaggctctgctgtaataaataaccacagacaggggcactttaagccacggggatctgttcccccccccccccaccccgtcctggggacaagaaatgcaaggctgagctgtgggcagggctgagctccccgtggagactctagggaggatccttcttgcctctcccagctctgggggctccaggagctcctgggcttgttactgcagccctgcatccccttcccttggcctcctcctctgcgtttaatctccctccacctccctcttatgaggacaggggattgcattttgggcccagggaaagtcctcatctcgaagtctttaatttaaccacacctccaaagaccgcttttccaaagaaggtgacatttacaggttccacggccggggcccgagatactcggggcaccttccagagggtcgcggaagcggaagctggtccttccccatccccctaccccatctttctatcccatttctcttggattcccttctccagggccaaactcagggaggcccaaaactagataagacagacactttcttattcctccaaacacactagatccctgactcactaaatgaaggcacggaggcaaaaattagcctttctatcttgggtaatcttctcatcactcacacagcagaaaaccaccacctgtcattagcgagatatattaagctgtttaataccaggctttcagccggcagagctctggaaggtgcggggctctccctggcagtgactccggcacgaccttttggtccccgagttcgcggtccacgcttcctgcccatttctgcgtcacttgttccagccccgtggggtaggtgtttggcaaaacgcggccgtcttatttaaaacccctggcaccttgctcatcccccatctgtcattctcacgatgtgccaccgctgtggtctggactgtttgcgtgaggacggcgagctctccagccacagggctgcaggcaggaggggccccattgggctcggccaggacctggaccagctgcagccaaggccttcccgctcaacacaggaggtctttttcagcggccatgtgtgagtcaggagaactgggaatg

SEQ ID NO: 37496 - DNA, 1389 bp, Homo sapien
gatctttcccacggaaaccgtgtgacctgggcaagccccccgctgtctctgagcctcagggtcccccccgacaagtgggaacagggtcaccaaattgctgacaagatgctttgtattacaaggagccccatagggccaggaccagctcgacggttacattcccctccatggagggccctccccacgcaaccttcccttcgcctggcctctctccacagacccccatccccagccagctggtgaattcctcacacccgctggcaggcgacggggctatttttagtgaccagggctcaagaatggagccatgccaggacccatggcgtccgtcggaatgtgaaagctggtgcatccctccttctggtcgctatgtggtccccgacacagcacagtggccagtgctgcaccagggcttagcctcaggcctgcatgaacacagcctctgccctggcaccctccatctgaaggacagccccattccctgcccggggcagtgggccttcctgcaccttctctgggcctcgggtccccatccacatactgggtgctggaggcagaggccacgtgcagcatctcagcccccaggtctgcaggggcttgtcagtgacaacaaaacgtgaactggctaggggtcagaagatgtggtaccggagaccacacaccaccaaattccacaagtttcaaaatgttacagcagctgctgggtgtggtggctcatgcctgcaatcccaacactatgggaggctgaggccagaggatcgcttgagcccaggaggctcaagtccagcctgggcaacacagcgagactctgtctctacaaaaactaaaaaaaaaaaatagctgggtgtggtggtgcacgcctgtggccccagctagtcgggaggctgaggcaggaggatcacttgagcccaggaagtcgaggctgcagtgagccaagatcgtgccactacactccagcctgagcaacggagcaagactgtgtctcaaaaaaacaaaaacaaaaatctcagggcaccaaacagccaggaccacaggcaagatccacgcaggccacgatcacctgggggaagtggtaagaaagacctgaggttcttctctccactcacaaatcagacaaagcaagagggcttgttgtcactgtggtattagatagcgccagccctggagaccctttgaaacaggctccacggagagctgcaactgccccgcagctccaggcgcaggccacgagacttgttattagctggaaaacgctaggcgtgtggaaaatgactgttctcttaaaaaggttgttgtcttttcccggcaggttaatgagctgtgtgtgcattcacggtggtcaagtcagccccaagcagccacatcccagccaggtcaaagtcccagctt

SEQ ID NO: 37497 - DNA, 2300 bp, Homo sapien
tgggggacatggaacccttgtgcgctgctgtcgggaatgtgagttggtacagccacagtggaaggaagcttggcatttcccaggaaagttaaacatgcagtgaccacaggacccagcagtgccactcctaggtacacagcccgaagaattgagaacaggtcttcaaacacacgcctctacatgagcgtttggagcagcactgcttacaggagccacgatgtgaaaacctcgcacgtccgtcagctcgagaggacaaacagtgtggcctctccacgcaagggaagtccctcagccacagaaaggagtgaatcacctgacacgcagcacagcgcggacgaacctgggacacgtaatgccagtgaaatgagccagacgcaacaggccaaatgctgcgcaattccgcttctgtgaagtagcaggaacaggcagttgcacagagacaggaagtcgattcggggctgtcgggggctggggcgggtgtcgggggacagctgctgaatggcacagggtctgcaaaggtcctggatctggatggaggtggtggttgcacagcacggtgaatgtgtcgacgtggctgaattgtgcactttaatacagttgattgttaactttaagttatgtgacttttacctcaattaaaaaaaaaaaaaaaagctcgacaggacccactggctctcacctgtaatcccagcaccttgggaggccgaggcaggaggatcacttgaggttaggagttcgagaccagcttggccaacatggggaaaccctgtctctaataaaaatacaaaaattagctgggtgtggtggtgggcgcctgtggtcccagctactcgggaggctgaggcaggagaaaggtgtgaaaccgggaggcggagcttgcagtgagccgagatcgcaccactgccctccagcctgggcaacagagcgagactccatctcaagaaaaaaaaaaagtcccactcacctgctcaaacaaactcctcttctcagccccctccagcctgcagggcatctgggatgaagccccaggttttcctactatggggttgagaacctgcccttccctgtccagggctgtcctgcctcttgccctctccctgactgaacgtgcgttgagtgcccgggtcggtctccggctgtgttcctgcctccccaaccttcaggaggcaatgtgaactgctgaaaaattactctggtatgagcgcagtttggcctgaggtttctgtttctcccgggcgactgcagggcctcagtgttgatataaacaatttgcactgccgtcaggggagcggtcccaaccaacctctctcaactccctggcttcaggttcctgccgactctattattgctactatttctagtaatttctacaaaggcccagagcccctcacttgtgatgcacctgccttctctctcttctcttctcttctcctcttctcttctccttctctctctctctctctgtctctctgtctctctgtttctttttttgagacagagcttcgcccttgttgcccaggctggagtgccatggcgcgatctcagctcactgcaacctccacctcctgggttcaatcgattctcctgcctcagcctcccaagtagctgggattacaggcgtgcgccaccacatgtggctaatttttgtatttttagtagagatggggtttcaccatgttggtcaggctggtctcgaactcctgacctcaggtgatctgcctgccttggcctcccaaagtgctgggatgacaggcatgagccaccatgcctggcccacctgccatttctagtgagacctcctggtttgtgtaggagcagtggatgacgatgtgatgatttccctaagagcgggtcccatacagccgatacctgaggtcgattagaaggatgcaaaggtttgagaaagtatttgcagcgtctcacccttgatttccgtctcccagtgattcagcctggggatggatgtgagcaagggactcgcagctccagggaggcgtctgtgccattctgagagattgtgagatggcccgttgtcatggtgaccggagagtgatgaggtgtttacttggcagggagttcaggggatgcgccgtcctccgcaggaggtgattgccggtgtttgtagagccctgtggtccatcccctcagcaccctggattcccctccccggggttttgtccacgaggagctgcttttgaccgtgtgaggtcacagcactgggtttccaacagctccctggagacctgggcggaggccacatgccattcagcacacggcagggcgtccacctcactttgggc

SEQ ID NO: 37498 - DNA, 2300 bp, Homo sapien
gtacaggtgagtgtggaaaaggtgagcaagagacgggtgagtgggagatggtgtgtacgggtgagtgggagacaggtgaagatggggcagcatagtgggagacaggtgagtaggcaacagggaagccgggcaggtgagtgcaggacccgggggctggacaggcgggtggaggatccgggggctgggcaggtgggtggaggaccccgggggtagacaggtgagtgtgcacagggaggcaggtatcatctccttcacagctggaactgcctacccctctcctggcatttggagcctctggggagggaagatggagtttctgccgccgccaccctggcaggatggggcaacggtgtgcggtaggaggatgaggttgattccctttcctgcagggctgggcttgtgggttaggaccgtcaccaagaggctcctcctaggcctccgtgacctctggatccccaagaaaggtgggaaagaatttaggagggttccgatttcccactgggcatcggggtgaagctggtgcgcctaagcgctgggagtcacctggggaagcggggctgggcccacctggccaccctctctggccgctaaggcagagtgagaccccagggaacgggcgtgcttgctgggtaccgggtgtcctgcagaggcagggatgtgatcccctaggtgtgagcagctcaggcagccgcggtggtcgtgaacggggcgggagtggggggtgcccaggccatcagaggcggccccgcggcctgcaccggctggagtgggcgactcagagtctgagtggagggggcggggggcggcgagagcggggggtcctggcagcgatggcctgaacctgcgccggtgggggatggggcgggggcggggagagccgggggtgggggccggggttgggggccccgcggggaggcggtcggggggagacgggctgcaggcccgcgcgggcggcgttgggggtgcagcagctgcgcgcggcgcgggggcgggcgtggagggcggcgccgctgcagtgcggggacccgctcgctcgctcgccagccgtccccgcgccccgcgtccccgcgcagccgcctcctggcctcgggcgccgcgcatccaggtacgcggggccgggctggggtctgcgccgggagccccgggcctgggaggccccccggggatgcggacatttggaagggttcggccccgccgggagtggggcgcgcggggcggggccgggcctggggctcccggtcaggggtcccgggagggtcctcgccggcgctgaggccgggtttggggcggggggcgcggggtctctgggtgggcgccttcccggcggtctgggcactccgggggcggcgtggcggggggctggggtcctgcgccccgcggtgcggtgccggcctggcctggccatggtgacttcgctgcgcggccgccgcatttgttctcccgcaccccacccccccaccaccgccagcttcccttgtttacctgcgtttctgtcttttcctgtgcagaggccgccccagcccatccacagtctcaccctcatctccccctcccctgaggccgcgcgcaggggcccccagcattcacatttcacataagtgcccccaaaaaggggggatggaggaggacgaggccctggaaccccccggctggaccctcagggcgccgggcccccccactcttcccacccggaatcctcagaactgcagaaggggcttctcagccgcgtgcacccctgtctgcctgagccccctcccccgctgcctgagccccctccacccctgccgggggtctgtggggagggaaggctctgggggccgtcacgtttaacacctcacctggccccacagaatgaaagatctttgacaaatgcagaatcagtgactttcttccacgctcctgggagaagcctggttcacgccgcctgcgtttatctggcgcgcagccccgggcagctctcaggcctggggatctgtgtgttttctggacaggaaggaagcagccaccctcgccatggcctccccgcccgcctgcccctcggaggaggacgagagcctgaagggctgtgagctgtacgtgcagctgcacgggatccagcaggtcctcaaagactgtatcgtccacctctgcatctccaagcccgaacgccccatgaagttcctccgggagcacttcgagaagctggagaaggtgagtggcccccgccgcccgctgcttcccttcgcacgtgtcctggggcagaggcggcagccggggaagccttccctctgtcccgtggtcctcgaaggctgggtgcccca

SEQ ID NO: 37499 - DNA, 2300 bp, Homo sapien
ggggtgggggccactggaacagggatctgagtggcggggaaaagtgtgaaagagagaggcagtgggagctgccgtcgtggcaatgaggagaggagctcagcagacgtcacagctcagtggggccaggggccgcatgtctggctggccacgtgcatgctgccagcccccaaacctgggagatccttgtctcaaaaggacgcaggcaaggaggctcagcctgaggaggtattgcagcagaaggagggcttgtgtgtgcgcctcgggatcagagggctgtcctgtgaggtcagccagagaggtgcctccactctcctctagaggcacggtgtgggggaagtctttacagggagtctccagagaaccccaggacagcccgggagagaagcagccaggcctggagcatctgccccccgaagcgagacgtcgccttggttaggtggcacctgggtcttttttgctgtcctcaccagtctaccctggaggagcaggagtaattggaggaggaggaggagggagtggaggggccgcggggagcacgtgatggtactgctggtcagcagcagctccaggcaggccagggctgggagagccagaggtctgagtgggttgtgggatggagttctaattcagagaccaggcctggatccctaagaaagtctcaggacaaatgcaggtctgcctgagacggggctggggccagtgggtgctgagggtgagggctgaggaccaaggaccttcgtgtttgacccccgagggtggcctgcttggtttacgttcaccctggcaggaagaggctgaggcaatgtcagccctgctggggaatgtgctcggcagggctggtgacctgtgtagtgcctgtgcaggcaggtgagtgggagacagctgagcaatgaacaagaaagctggacaggtgagtgtggaccaggtgagcatgggagggctgagtgagagacggtgagtgtgtacaggtgagtgtggaccaggtgagcatgggagggctgactgggagacggtgagtgtgtatacgtgagtgtggaccaggtgagcatgggagggctgagtgggagatggtgtctgtgtacaggtgagtgtggaaaaggtgagcaagagacgggtgagtgggagatggtgtgtacgggtgagtgggagacaggtgaagatggggcagcatagtgggagacaggtgagtaggcaacagggaagccgggcaggtgagtgcaggacccgggggctggacaggcgggtggaggatccgggggctgggcaggtgggtggaggaccccgggggtagacaggtgagtgtgcacagggaggcaggtatcatctccttcacagctggaactgcctacccctctcctggcatttggagcctctggggagggaagatggagtttctgccgccgccaccctggcaggatggggcaacggtgtgcggtaggaggatgaggttgattccctttcctgcagggctgggcttgtgggttaggaccgtcaccaagaggctcctcctaggcctccgtgacctctggatccccaagaaaggtgggaaagaatttaggagggttccgatttcccactgggcatcggggtgaagctggtgcgcctaagcgctgggagtcacctggggaagcggggctgggcccacctggccaccctctctggccgctaaggcagagtgagaccccagggaacgggcgtgcttgctgggtaccgggtgtcctgcagaggcagggatgtgatcccctaggtgtgagcagctcaggcagccgcggtggtcgtgaacggggcgggagtggggggtgcccaggccatcagaggcggccccgcggcctgcaccggctggagtgggcgactcagagtctgagtggagggggcggggggcggcgagagcggggggtcctggcagcgatggcctgaacctgcgccggtgggggatggggcgggggcggggagagccgggggtgggggccggggttgggggccccgcggggaggcggtcggggggagacgggctgcaggcccgcgcgggcggcgttgggggtgcagcagctgcgcgcggcgcgggggcgggcgtggagggcggcgccgctgcagtgcggggacccgctcgctcgctcgccagccgtccccgcgccccgcgtccccgcgcagccgcctcctggcctcgggcgccgcgcatccaggtacgcggggccgggctggggtctgcgccgggagccccgggcctgggaggccccccggggatgcggacatttggaagggttcggccccgccgggagtggggcgcgcggggcggggcc

SEQ ID NO: 37500 - DNA, 2300 bp, Homo sapien
gaggtatttatttattatttatttatttcgagacggagtttcgttcgctcttttgctgcccaggctggagtgcagtggtacgatctgggctcactggagttcaagtgattctcctgcttcagctttctgagtagctggggattacaggcgtgcatgaccatgcccggctaattttgtatttctagtcgagacaggatttcgctatgttgcccaggctggtcttgaactcctgacctccagtgacccacctgcctcggcctcccaaagtgctgggattacaggtgtgaaccaccgcatccggccaaaggtatttattgatgaacataattgggaagtccagatacgggaagggcctcaggtttggtttgaggacggccgtggctccatttctctaggatcctgtttcttcccacttctgtgttgatttcatcctctggcaatgatcagacagtgagcaggacactaaggaagcgtctgtccttggctcaagccagtaaggctgaagcaagagaggcctgggagtcaggcagaaacttgtctgcaggttggggcggtgggggccacgcctcgcactcctaccagagccagtctggagagggagtccttgtgtggggtgggggccactggaacagggatctgagtggcggggaaaagtgtgaaagagagaggcagtgggagctgccgtcgtggcaatgaggagaggagctcagcagacgtcacagctcagtggggccaggggccgcatgtctggctggccacgtgcatgctgccagcccccaaacctgggagatccttgtctcaaaaggacgcaggcaaggaggctcagcctgaggaggtattgcagcagaaggagggcttgtgtgtgcgcctcgggatcagagggctgtcctgtgaggtcagccagagaggtgcctccactctcctctagaggcacggtgtgggggaagtctttacagggagtctccagagaaccccaggacagcccgggagagaagcagccaggcctggagcatctgccccccgaagcgagacgtcgccttggttaggtggcacctgggtcttttttgctgtcctcaccagtctaccctggaggagcaggagtaattggaggaggaggaggagggagtggaggggccgcggggagcacgtgatggtactgctggtcagcagcagctccaggcaggccagggctgggagagccagaggtctgagtgggttgtgggatggagttctaattcagagaccaggcctggatccctaagaaagtctcaggacaaatgcaggtctgcctgagacggggctggggccagtgggtgctgagggtgagggctgaggaccaaggaccttcgtgtttgacccccgagggtggcctgcttggtttacgttcaccctggcaggaagaggctgaggcaatgtcagccctgctggggaatgtgctcggcagggctggtgacctgtgtagtgcctgtgcaggcaggtgagtgggagacagctgagcaatgaacaagaaagctggacaggtgagtgtggaccaggtgagcatgggagggctgagtgagagacggtgagtgtgtacaggtgagtgtggaccaggtgagcatgggagggctgactgggagacggtgagtgtgtatacgtgagtgtggaccaggtgagcatgggagggctgagtgggagatggtgtctgtgtacaggtgagtgtggaaaaggtgagcaagagacgggtgagtgggagatggtgtgtacgggtgagtgggagacaggtgaagatggggcagcatagtgggagacaggtgagtaggcaacagggaagccgggcaggtgagtgcaggacccgggggctggacaggcgggtggaggatccgggggctgggcaggtgggtggaggaccccgggggtagacaggtgagtgtgcacagggaggcaggtatcatctccttcacagctggaactgcctacccctctcctggcatttggagcctctggggagggaagatggagtttctgccgccgccaccctggcaggatggggcaacggtgtgcggtaggaggatgaggttgattccctttcctgcagggctgggcttgtgggttaggaccgtcaccaagaggctcctcctaggcctccgtgacctctggatccccaagaaaggtgggaaagaatttaggagggttccgatttcccactgggcatcggggtgaagctggtgcgcctaagcgctgggagtcacctggggaagcggggctgggcccacctggccaccctctctggccgctaaggcagagtgagaccccaggga

SEQ ID NO: 37501 - DNA, 2300 bp, Homo sapien
atggtaagtgtgattccattattgtcagagaaggcgttctgtgcaagtctttttttttttttttttttttttgagagggagtttcactcttgttgcccaggctggagtgcagtggcacaatcttggctcacttcaacctccgcctcctgggttcaagtgattctcctgcctcagcctccagagtagctgggattacaggtgcgtgccaccacacccagctaattttttgcatttttagtaaagacaggatttctccatgttggccaggctggtcttgaactcctgacctcaggtgatccgcctgcctcggcctcccaaagtgctgggataacaggtgtgagccaccgcgcccagccctctgtgcaagtcttctacatttgctaaggtttgccttatggcccaggatatggtatatcttggtctctgttctgaggacactagaaaataatgtgaattctgcgattgttgagtggtgtgttctgcaaacgtcaattagatcctgttggttgatggtgttgctctgctataccttaatgactatctgcctagttattctagcagctgctgagttgggggctgaagtcgtcaactgcaacagcaggcttgtctcttcctcctttcagctctatcagtttctgctttatacatgttgaaggtctgttgtttgctgtacacacatttgggattgctgttatcttcccagtgggttcttttatcattatgtaatgtccctctttttcccaaggaatttcaacagccactcccgctttttaaaatttatgtttacatgatactcttttgccgtccttttactttcaatgtgcctatgttattatgtttgaagtgagcttcagcatatagtagacatcatacagttgggtcatgttttgtatccacgtggcgaacctctgtcttctaattggtgtgtttaggccatttacatttaaattagtgatatattagggcttacgcttgccatttaatcatctgttctctcatgctttactgtgggatacctgaatgttttttagaattccacgttatgtttttgaggatatcaccatatacatatgcaacccatcggtctatcggcatctatgattttccaccttgagtgagtggacaaaccttccttccacttaagtccctaacccttctcactgttaaatacctagctgtagatatttcctccacatacatcacacaccacatgagtgttgtaatttttgcttcgatcatcaaatatgattaaagaaactcatgaggtgaaagatggtcagtgacattgacttctatttttatccagtccattgtctcaactttctggaggccccagccctcttctgttaaaattatctttctgggccgggcacggtggctcacgcctgtaatcccagcactttggggggcattgaggcaggtggatcacctgaagtcaggagttcaagaccagcctgaccaacacggagaaactctgtctctactaaaaataaaaaaatactcgggcatggtggcacatgcctgtaatcccagttactcgagaggctgaggcaggagaattgcttgaacctgggaggcagaggttgcagtgagctgagatcataccattgcactccagcctgggcaacaagagcgaaattccgtctcaaaaaaaaaaaaattacctttctgtttacagggtatcctttatgcattccttaaaggtaggtctgctagcaataaattctattagtttgcctgtctgagaacatctttactcctcttccattcctgaaggatagttttgctgggtagaggactcacagtcaacagctctttcccctttacagttgaacaatggcaggtcacttctttctggccttttgtggttttggttaagaaatctgccttcattcaaactggtgttcctctctaggcaaggcattatttctctctgtcagttagtacttttcctccttctgtctttagtttccaggagtttaattgtgatgtgtcttagtatggggtttttggagggcttgtcctatgaagccttgttgagcttctggaatctgtggatttatgtttttcattgaattgggggagttttcagccttttttttttttttttttttttgagatggagtcttgctctgtcacccaggctggagtgcggtggcatgatattggctcactacaacctccacctcctgggttcaggcaattctcgtgcctcagcctccccgagtagctgggattacaggtacccaccaccacacccagctaatttttgtatttttagtagagatggggtttcacca

SEQ ID NO: 37502 - DNA, 2300 bp, Homo sapien
tggcggccacacggaccttccagtgctggtgggagatggtctgcatcaggggcccgatcagagactccgactgcatgtggaagtggtctgagggacagggaggcccccagttaccagagctgctcccacacgcctcgcccagctctgtgggcttccagaggacggctgcctgcctatgagttcctcacctcccttcctctcccacgccaggtccttgctgcatgaacagtacacaatccaggctgccaaggagagctctgtaccgcccggcacaggaagaggctcagggacaagcgtcccaccctgatgacacctgtgcaacccagaggcttaggaggaccagcggggaaaggctgggggtgcaaacccattgtggctgaagaccagagagcctggacctgctgaagccaaggtggaggcctgacggggacactggccagaggaaagaagccgagcccagaagacagaggcgaggccacactcccagccccacctgagacgagaccccaggctcctccaggaagctgggccagcaccactccaggcaaagccactgcacttcctatttgtaaagtccccgcagaaagtcagaacaagaggtggcaggcgcctgtaatcccagctacttgggaggctgaggcaggagaatcgcttgaactcaggaggcggaggttgcagtgagctgagatcgccccactgcactccagcctgggagacagagtgaaaccctgtctcaaaaaaaaaaaaaaaaaaaagtcagaaccaaagggtctctggcatccaggccgcctcttgcctcagctctgcactacttggggcccgtctgggaaacggctattccagtgagactttgggtgagcgcctcaacctctctgccgttgcccagtgtgaccgagaccagaggtgaggccccccacccaggggagaggaaggccagaggtgctggagatgaggggatgctccaggcagaggcacagtccctcaccccacagcaaccagtgagcacataccccagcaggctgcgcttggggctggggcacagatgggcacagtgctgtcctgtggaacctacggtccagggagggagctcgtggggctgatgtacagactgggtagggaagtggttgaggatgaagaagaaatacattaaatgccaggaattctcaatggccatgtccatccagcccaaggttcttccccaagctccacaggagttctggaccatgtgaaatccaaagttaaccaacgtggaaatctcggcatttccccaagtccagctcttcctctacttctggaatctattctccacgcagctgcagtgatcttttaacaacctgaactcgggtctatcacttctattgacaccccctgcacttcccactacattcagaccatcactgggacatcactgggacggcctgagctggccagatccctcactgctttcctgctccctaccgcccacggatttatagcatcagtgttccctccttcggaaagccttcccgccagcaggaagcaggcgcctgctatcattccacatcccagccaggggagggaaagggcaagaccctgcaggaatggccagctaaggaaagggaacgaccggatcagatcagagctctaaaaaagatggggaacgttataaagtggaggggagaagcggcctccttccacttaggacagtggtccaagccagagcggaaaggcaggggagtaggatgaatgggacagaaagtgaaatgaccagagcagagtctcaaagcgcgtgccctcaaccaggtgcaagtcctgcaagcccccgagggaaggaaagggggcagctatcagggcacaccccaccccaaaccgcctaacaggaatttctgcggtggtttccaggtatctggacagaagcgctcgctcgtgggcccgggtggggtggagggggctcaggcagggaggagggtgggaggtgagggtcgcgggagggcggcgtgcaaggaggaggatggcacaggataggcaggtggagggggcacagggagcaggcaggtggggggcggggcttggggcgtggagggtggaggcggggagcaaggggacaggggagtgaggtgagtgagggccaagcaggaacaggggtcacggggcaaggagcacgtggcagcgcaggaaacaggtacatgggggtagaggacaagggagcagctgaagggcgcgttggtggcgggacgtgaggcaggggaagcagtggtggtgggaggagggggccgggcggggcgccgggctacttcctccccgccggtgcgcacgtgggc

SEQ ID NO: 37503 - DNA, 2300 bp, Homo sapien
ctgctcccttgtcctctacccccatgtacctgtttcctgcgctgccacgtgctccttgccccgtgacccctgttcctgcttggccctcactcacctcactcccctgtccccttgctccccgcctccaccctccacgccccaagccccgccccccacctgcctgctccctgtgccccctccacctgcctatcctgtgccatcctcctccttgcacgccgccctcccgcgaccctcacctcccaccctcctccctgcctgagccccctccaccccacccgggcccacgagcgagcgcttctgtccagatacctggaaaccaccgcagaaattcctgttaggcggtttggggtggggtgtgccctgatagctgccccctttccttccctcgggggcttgcaggacttgcacctggttgagggcacgcgctttgagactctgctctggtcatttcactttctgtcccattcatcctactcccctgcctttccgctctggcttggaccactgtcctaagtggaaggaggccgcttctcccctccactttataacgttccccatcttttttagagctctgatctgatccggtcgttccctttccttagctggccattcctgcagggtcttgccctttccctcccctggctgggatgtggaatgatagcaggcgcctgcttcctgctggcgggaaggctttccgaaggagggaacactgatgctataaatccgtgggcggtagggagcaggaaagcagtgagggatctggccagctcaggccgtcccagtgatgtcccagtgatggtctgaatgtagtgggaagtgcagggggtgtcaatagaagtgatagacccgagttcaggttgttaaaagatcactgcagctgcgtggagaatagattccagaagtagaggaagagctggacttggggaaatgccgagatttccacgttggttaactttggatttcacatggtccagaactcctgtggagcttggggaagaaccttgggctggatggacatggccattgagaattcctggcatttaatgtatttcttcttcatcctcaaccacttccctacccagtctgtacatcagccccacgagctccctccctggaccgtaggttccacaggacagcactgtgcccatctgtgccccagccccaagcgcagcctgctggggtatgtgctcactggttgctgtggggtgagggactgtgcctctgcctggagcatcccctcatctccagcacctctggccttcctctcccctgggtggggggcctcacctctggtctcggtcacactgggcaacggcagagaggttgaggcgctcacccaaagtctcactggaatagccgtttcccagacgggccccaagtagtgcagagctgaggcaagaggcggcctggatgccagagaccctttggttctgacttttttttttttttttttttgagacagggtttcactctgtctcccaggctggagtgcagtggggcgatctcagctcactgcaacctccgcctcctgagttcaagcgattctcctgcctcagcctcccaagtagctgggattacaggcgcctgccacctcttgttctgactttctgcggggactttacaaataggaagtgcagtggctttgcctggagtggtgctggcccagcttcctggaggagcctggggtctcgtctcaggtggggctgggagtgtggcctcgcctctgtcttctgggctcggcttctttcctctggccagtgtccccgtcaggcctccaccttggcttcagcaggtccaggctctctggtcttcagccacaatgggtttgcacccccagcctttccccgctggtcctcctaagcctctgggttgcacaggtgtcatcagggtgggacgcttgtccctgagcctcttcctgtgccgggcggtacagagctctccttggcagcctggattgtgtactgttcatgcagcaaggacctggcgtgggagaggaagggaggtgaggaactcataggcaggcagccgtcctctggaagcccacagagctgggcgaggcgtgtgggagcagctctggtaactgggggcctccctgtccctcagaccacttccacatgcagtcggagtctctgatcgggcccctgatgcagaccatctcccaccagcactggaaggtccgtgtggccgccattgaagccacaggcgcagtgatccattttggcaacgggaagtccgtggacgacgtgctttcccattttgctcagcgactgtttgatgacgtcccgcaggtaactggtgtt

SEQ ID NO: 37504 - DNA, 2300 bp, Homo sapien
gcctggagggcatgtcttggatctgaggccccagtgacttgctaaaatgctacacactgtggccaccggggaagctgagtgacctctgatctttctgtctctgagttacctgtcatcgtagtcagacatgtgatcttttgtgtctggcctcttcactgtgcatggttccaggtttcagccttgaagaggtaggtttcctgatgagaaatggcttgaaggtggtgagttgaagagtcactcggggtattctggggccaggatggaagccctgactcgctccctcgtctgtgctgctggggtccacccgtagggccggctccaggtgtgacatagcacctgctcaggacacccctgctttgcctccatggccaggcttcattctccggctctctccctccagcagcagagtggctgcctaggggctgtgcgcagagacacagggggaccctttcccaccaggagcctttgttcacccccttggtctcatcaggccagcggaagttgagtcaccatgtacgctggccggcccctcctggagctggcgtgggttcggcaccaggcagcacagagggcccctgaggacatcaggctctgcccagtggggagaaagtgggcagagtgcggggtcagtgtccatgctgcccggcacttgcagcaggcacttctggcactggctaaatatttgggctgcggagggcagttcaaggggccagggcaagaacagagcccagcaagaagtgcaggcggccggctggtttttctctcccaccttccttaagcctgaggcagagcatggcccacaaggaaagtggagtctgtgtcatgggccaagtcttactcctcaaaacagtgtgatgactctgtatggagagctctgtgtgaatactgaagctccatagctgatagctgtcggtgtaagcctactgtcactgtctaaaaataaccatcactgtctaaaaataccgtcactgtctaaaaataccatcactgtatcgatagctgtctgtaaatactggaactctgtggagcacgctctgtaaatactggaactctattgctagctgtaaacggtgtaactcagtataactataccgtaactctaaaaataccataactatgtgtcgacagctgcctataaatgctataactgtattggtagctatgtataagcagcctactctgtatcaatagctgtctgttagaaagctgacatcacattgttgatctaaagcaagcttgtccaacctgcggcccgtgggccacatgcagcccgggacggctttgaatgctgcccaacaccaattcataaactttcttaaaatgttacgagattgtttttgtgatttttttttttcttttagctcgtcagctatcattagtgttagtgttattttatgtgtggcccaagacaattcttccagcatggcccgtttcttcccaatggggtttgcgtcctattagagaccctgcacggcccttcacgtgagtttcgtgtggagtcacggtgctgccccttttactctgatcagccctgcgaccccgtcctggagctccatgtgggctccttgcagacacctccaccccctcaacaacccagggactggtgccctgggaccccatcctctctgcacagaaggtcctgactgccttctgactcgtaggaaaccttccagcagcctgctagactcggcttaaatcactgaacttcactggaagggcctggaaataacttcatctcctccttacaaggctcagaggcctcagagctcactcaggtagcacagccaggtgagcctcagagcaaggtcaggacacaggcggtctagccgccctggagccttaggccccgggatggtgtctgaagttgtggaaagggggtgtcccagtgcggcaggggctaatgcatctccccacgctcacatgactgcagctccgagcccaggacactgaccacacccagaaccccggcgaggcaggcaggacggacgtatggccgtgcagttgtgaagcaggccttgaacaaactgccctgtgccgccctcaggtggatgactcatggacttcgccctgcaggggtgccctggttgtcgccaggcctgcagtcggcagctgctcagctttgctgcagttttcctgctcgatgtgtgctgctggtgaggccaccaggcctgttcttgtcaagagagaccttccgggaacaacagatgttacaggagagactggggatgcatggacagcttttcagagatgagtgtttgtcacgttcctgccaagtacctgtttgccatttgtatgccttc

SEQ ID NO: 37505 - DNA, 2300 bp, Homo sapien
cgagtgaagtcggcacagctgctcccagtgctgctgctgcatgccgaggaccacgccacgcagcacctggaggtcgtcctccggaccctgttccaggcctgcaccgacgaggaggcagccgtggtccaaagtgtaagtggccgtgttccagtcgtggtcgcggagctgtaactcgagcttaagatcccgcctctgtggtgtgcggggcccgaggctgtactgtagccaagacagcgttcccctcacccctgggccgcaggccctccccacacccagcccctgggaacaactgatctcctttctgtgcccgtaggtaacagcgtgttgagggtgaacccttcatgctcattttcaagcacactcgggggtgcagtgccaggtgcatgttgtgtagacgtgttgtgtagacgtgccgtgcaccagacagacagggcccgggctgctgacacaggaccgagatgcccagcgttcagcattgacatctgggctgtcctgagggcccttccaggcctcgcaggggctgtgggagcacccagacgggggatgatggcacagcttcgggtgtcctgcgagtggtgtccctggtgcagtcctctttctcactccctgtccacactcggctgctggttatcgcctcgtcaccactgggtacgcacgagggagtcccatgctcaggcctctcctcctcactaggccgggccacgccctgcgctgacagtcaccaccatgaggacttcacacccacctcacaaggatgcttcctagtgctcaggagaacaactaaagctttgacttgagatttcagttgaaaatatcctcatcttgaaccttaaattccattgcaaggtagcctggccagcagcttttacttctagtggtccaggtcactgttactagcccggcgtagtggcgtgcacctgtggttccagctcccgggaggctgaggtgggaggatcgcttgagcccgggagtttgaggcctcagtgagctatgattgcgccactactctccagcctgggcgacggaatgagacactgtctcagataaaacaaaaaaatctaaatcattgtgactgatttaaagtaaatgttccaggttccatgttatttacatgtcatgtttctgcttttcaaaaactaccgtgaatttaaaattgtctgtagttctctgtggaacctacaggagagcaagagacacgggggtgaggctgagaggacgagagacgtgtgtgggatccgctgtggaatcccacggtgcagaggggctggtgtgtgtgtgatccactgtggaatcccacagtgcagaggggctggtgtgtgtgtgatccggtgtgaaatcccacggtgcagaggggctggtgtgtgtgtgatccgctgtggaatcccacggtgcagaggggctggtgtgtgtgtgatccgctgtggaatcccatggtgcagaggggctggtgtgtgtgtgatccgctgtggaatcccacggtgcagaggggctggtgtgtgtgtgatccgctgtggaatcccatggtgcagaggggctggtgtgtggtgtccactgtggaatcccatggtgcagaggggctggtgtgtgtgtgatccgctgtggaatcccacagtgcagaggggctggtgtgtgtgtgatccgctgtggaatcccacggtgcagaggggctggtgtgtggtgtccactgtggaatcccacggtgcagaggggctggtgagtgtgtgatccactgtgggcttccacggtacagaggggctggtgtgtattgatcagcttagtgatgggaaggttgggtcactggtgtccgatgaggggtgtgtggtgaaccccacagctgggacacagcatcctttgggccagacttcactgcctgggaggcgtgtccggctcgctggcctcagggacgttctgagaccacacccggacccttgtacctttcctgagggctctgagcatgtgccaaggactcactctgcctaacacggggctctgtctggtgcacggctgtgtctgggaggccacggcgccgagagcaggagcccggctgagaccctcgggtttggctctgagttttctcatgtttctttctcgcagtgtaccagatccgcagagctcgtcgggacgtttgtcagccctgaggtgtttctgaagctgatcttatcgacgctgaagaagacgccctctgcctccggcctcctggtgctggcctccgccatgcggggttgcccccgagaagccctccagccgcacctggcagccatcgccacagagctggcacaggcccacatctgccaggcatc

SEQ ID NO: 37506 - DNA, 2300 bp, Homo sapien
tctttttcgttctgtgtgtgtgcgttgtatgtaggcagacactgaaaattgtctggtcaaatatagagaaatctataaatgtgaagtcttgtcacttcctcagagacggtgctgcgttcgtggcaggagggtggtgcttgctgcaaaggatgcctgattccctgtttgttcctgtgcttggaggtgtggtcagccaggaggggctgtgtcttctaaacgcacctgccttttgattttaaccgaaaagatgatcgctcctgaaatgtacatgacaggtcattctagaaactagccagatattgtcctcagaagtcagccagttagtacaggccttagagaaattgggctgtgggaaaaatcaggaatggaataaaaacaaatctgtggcttctgtgggagttggggccacgacagggccacacggctcctccagctccgagggagacggggccgcgcggctcctccagctccgagggagatggagccatgcagctctgtgtcttctgtgggtcagggcggggccggggtgcaaggacagaacgctgctgtagtacagtgggagtgttttgtttagtcttccatgatttacgtcagtggggaatgaggcttagagttttagagctgattaggaaatttagaaccaacccattgtctagccaaataattaccaaacttctttgaacttgcacccccattagtaaaaacagtttttaagcataggcctccaatatatgtacactgttgataaatcacgtgtttaaattacatggccacggtcctgactcactctgtactttatgaaacatacataaaatagacattagagggacgttataagaagtaaatacaggccaggcgtggtggttcttatctatgatcccagcactttgagaggccacggcaggaggatcacttaaggctaggagtttgagactgcagttagccacgattgcaccactgcactccagcctgggcgacagagcaagaccctgtctctaaaaaataagttaaaatttatttagaaagaagtaagcacacgcaaagccttaggaattcttgggtccagcacacgcctgctgtgttgcgggcttcagagcctggctgattcacagtggatgaggctggagccgggaggggaagccattcatccagcgcagccgtaggtgcagagctgagactccacctccccgtcaatcagtaaacatgttaagccatagaattttatttgtcttaaaacttggtgttatagaaaagctcaaaaatgcacagaagaggggcaggcagcagagcgactgccagcttcagcgctgaccagcccttggcatgcgtgttctgcctgcctggggccacttttctttttaactttggagggcggggagaacttgggcatgttgtaaagcagataatgcagtgcgccgtcatttccctcacaggtgccgtgtgcatcactaacgcagcttctccaccacatagctcaagtgcctgttcacatttcacaaaataagcacagattccttagctcccagtctgtgttcagttttcccatcaacaagcacgcccttttatggttgacatgccggcaccctacctccagcgcctggggggctctccctgcaagggctctcccatggctgctgcccctcgtgagccgtagactaggagccccgggcgggctctgtcggccctggcactggggccggagcgggagccctgtattagtccattctcatgtcgctaataaagatctaccacagactgggtaatttataaagaaaaagaggcttaatggactcaaagttccacatggctgtgcaggcctcaccatcatggtggaaggcaaaggaggagcaaagtcacgtcttacgtggcggcaggcgagagagtgtgcaggggaactgccctttatactaacatcagatcttgtgagacttaatatcaagagaacagcacgggaaagacccacccccatgattcagttccctcccacagggtccctcccaggatacgtggggattatgggagctacagttcaagatgggattcgggtggggacacgaccaaattgtaccaagctctgacggtgctgccggtctcttccaggacctctacctggagcgcctgctgctgtgtgtgcaggctctggtgtctgtgtgtcatgaggactgtggcgtggccagcctgcagctcttggacgtgctgctgacaatagtggccctcgcaggtgctaccggcctgagggacaaggtaaggctgacagtggtggctgctgcttgacctagcggagctcacagctggaaggc

SEQ ID NO: 37507 - DNA, 2300 bp, Homo sapien
ctgcagctcttggacgtgctgctgacaatagtggccctcgcaggtgctaccggcctgagggacaaggtaaggctgacagtggtggctgctgcttgacctagcggagctcacagctggaaggcatctctaagtgaggtgaactgtctcctatgcatcccctctgtgcttgagccccaggcctcaaacatgtctgaccagcaaagaccagggattgagaaccttgcgggtgagtccccgggcaacggccttcggggcagctctccagctgccagtgtattctggcatcagggagtggagacagctgtttaatgttagggtcttcagcaaagaagcaaacaagaaataagaggtaacctttaaacctgcgcacttgagtagggtttaatagtgcacatgtcgctgggcgtggcagctcacgcctgtaatcccagcactttgggaggccgaggtgggcggatcacctgaggtcaggagtttgagaccagcctgaccaacatggtgaaaccccgtctctactaaaaatacaaaaaattagccaggcgtgttggcatgtgcctgtagtcccagctactcaggaggctgaggcaggaaaattgcttgaaccagggaagcagaggttgcagtgagccaagatcgtgccactgcactccagcctgggctgagcaacagagcgagactccgtccaaaaaaaaaaaaaagtgcatgtgcatgtgtgactgagtcgagagaagataccgtgatttcccgctctcattgcagcacagcgttcagaagtacttctcgcccatgggctccctgtttatgcccaaaaatcatcttttttcttcagtggagtctcgctctgtcacccaggctggagtgcagtggcgcgatctcggctcactgcaacttctgcctcccaggttcaagtgattctcctgcctcagcctcctgagtagccgggattacaggcgcccaccaccatacccggctaatttttatatttttagtagagacaaggttttgccacgttggccaggttggtctcaagctcctgactgcaggtgatccacctgcctcagcctcccaaagggctgggatcataggcatgagccaccgcacctggccattatgcccaaaaatcttttaaccccaaccttctaatgggcttctagggcccctggaggccccagtatctgtctgcctctctggaagctgagacttagttcctcctcccattctgtctctgtggacagcccctctcggcagattctctctctgggagatttacggcctgaatgtactatggggaacctggtgtggaggaggctgctgccctccccttccttcttggggcctctaaaaacaagcttcccaaggggcgtgtgtctcagcagatgctgtcactgttagggcctgaggtaccagcaaaagcaaagtctttgcctgctggtcatgggggaggaagccaggtagccccagattcagactccaggcttggggcagtggccaccggggagcctcagcccttcctctgttcctaagcccccaaggagagcagccagctaaaagtaaaaggtggccaaggttatcatctctgtctgcccagttacttttacctggaggtctggtctgctgggcttaactctttaagccacttgcccgcccctctctgctcctcaccacctcagaggagccctgcctgcccaggcggacaccacgtccgtgtaagccccaggaccacctgtgctgtgtgcatcccagtgtgcacagtgcctgcttcatgattcgctgcagagacggcgttggtgtgaacgggatcagggtctcgccctgcacccgcggctctcgctctcctgcaccctgggcggggctccctgtggcagcctccctcccgattatcctggcaggcccggcctatgtggttcttacgcgtgagggggatagtgagtcccagcaggcaggcaggcttgagccctgagtgttggaattgtctcagtctctgacttgtaacctccaggcacaggagacgatggactcactggccatggtggagggtgtcagcagctgccaggacctctaccgcaagcacattggtcccctcctggagcgggtgaccgcgtcgcaccttgactggaccgcacactcgccggagctcctgcagttcagtgtcatcgtcgcacagtcaggtgagccgtcccgacagctggcgtgccgtgcctggccccactcaggctacacacctgctcccccaggtgctcagcaggtaccagcgccgaccagctgagctgtggttcactgaagcgtgttgttaaaagtac

SEQ ID NO: 37508 - DNA, 2300 bp, Homo sapien
ttttgagacggtctcacgctgtcacccaggctggagtgcagtggtacgatcacagctcactgtagcctcaaacttctgggatcaagtgatttttctgccttagcctcctgagtagatgggattgtaggcatacgccacctggctacttctgtatgtttttctagaaatggggtcatatatgctgccaggctagtcttgaactcctgggctcaagcgatcctcctgcctcagcctcctgagtagctgggaccacaggcacccaccaccacgcctggctaatttttgtattttttgtagacatggggtctctttatgttgcccaggctgacctcaaactcctaggctcgaacagtcttcccacctcaccctcccaaagtgctgggattaacaggcataagccaccatgcctggtttaaaactgcatttcccaatgatgattatgttctctgagccccatctgagcgcacacatgtgtggtgctctcgggagtcgggggcacagcctcaaatataatacaatatttccaacatcgtgtccttggaatacagatgatttttattttcttctttatttttttctatgtttttctaagctttctctaatgagcatgcactactgtaataaacagaagacaaaaggattaaaacaattttttaataggagaaatttttaaatttctcatttacaaaagttctatgagaagataccttttaaattttaattattttaaacatacagaaagggataatttctaaactttgagaggatgggggatctacaaagacattgatttgactatatacatttgaaccaaaataaaaggaacatagacttaggaaaatatttgcaataaggatgacagtgtgagatctttgttacataaagctgacacaaaatgagaacaaaagcattaagagttgggcacggtggctcacgcctataatctcagcactctgagtccataaccgagcagcctgctctgatgatagaggctgaggcaaggaggctcacgtgagctcagaaattgaggcttcagggagctgtgattgtaccactgcactccagcccggacaacagagagagaccatgattccaaaaaacaaaaagcattaactcccaaacaaacaggcaaaatatccacattttataaaaaagaattaatacaactaataagcaaatagagtgggaactatccagcccttctagtgatgaggaaatatgaattaaagactgtagggtcccgctgggcgtggtggctcacgcctgtaatcccagcactttgggaggccgaggcgggcagatcccgatgtcaggagatcaagaccatcctggctaacatgatgaaaccccgtctctactaaaaatacaaaaaattagctgggtgcggtggcgggcgcttgtggtcccagctactcgggaggctgaggcaggacaatggcgtgaacccaggagacggggcttgcagtgagccgagactgtgccactgccctccagcctaggcgacagagtgagactcggtctcaaaaaaaaaaaaaaaaaagactgtagggtcccatttcttcatttatccaattaagtgaaataaacagctgctgcctagggtggctgagctgggagtgccaaggtgcttttggaaagccgtgggacggtgcgcatctggaattgccaatgtcttcactcctttcatccagcaatcacattcatgagaatctatccttccaattctaattatggaaaaagctatgcacccaaaaatatgcatcggggcataatttaatagaaattgtaagtgacccaaatacctcatacgaagttaaatacataatgatatttccatagaagaaatgctctggcaaccattaaaaacaattatcctaagcctttatagcaaaatgggaagacaggtgtggtgtgatatggagggaaagtgaagccagtgcagaagtgtccgtgctgcaagcaggaactcgcactgggaggggagacacgtgatcagggcggaagtgtccgtgctgcgaggaggagctggcactgggaggggagacacgtgatccgggcggaagtgtccgtgctgccagcaggagctcccgctgggagggcagacacgtggtccgggtggaagtgtccctgctgcgagcaggagctcacgctgggagggcagacacatggtcccgtggaagtgtccctgctgcaagcaggagcgctagtgctgggagggcggacacgtggctccgggcagaagtgtccgccagcaggagcgctcgtgcttggaaggtagacacgtggcccgggcggaagta

SEQ ID NO: 37509 - DNA, 2300 bp, Homo sapien
gaaatttttaaatttctcatttacaaaagttctatgagaagataccttttaaattttaattattttaaacatacagaaagggataatttctaaactttgagaggatgggggatctacaaagacattgatttgactatatacatttgaaccaaaataaaaggaacatagacttaggaaaatatttgcaataaggatgacagtgtgagatctttgttacataaagctgacacaaaatgagaacaaaagcattaagagttgggcacggtggctcacgcctataatctcagcactctgagtccataaccgagcagcctgctctgatgatagaggctgaggcaaggaggctcacgtgagctcagaaattgaggcttcagggagctgtgattgtaccactgcactccagcccggacaacagagagagaccatgattccaaaaaacaaaaagcattaactcccaaacaaacaggcaaaatatccacattttataaaaaagaattaatacaactaataagcaaatagagtgggaactatccagcccttctagtgatgaggaaatatgaattaaagactgtagggtcccgctgggcgtggtggctcacgcctgtaatcccagcactttgggaggccgaggcgggcagatcccgatgtcaggagatcaagaccatcctggctaacatgatgaaaccccgtctctactaaaaatacaaaaaattagctgggtgcggtggcgggcgcttgtggtcccagctactcgggaggctgaggcaggacaatggcgtgaacccaggagacggggcttgcagtgagccgagactgtgccactgccctccagcctaggcgacagagtgagactcggtctcaaaaaaaaaaaaaaaaaagactgtagggtcccatttcttcatttatccaattaagtgaaataaacagctgctgcctagggtggctgagctgggagtgccaaggtgcttttggaaagccgtgggacggtgcgcatctggaattgccaatgtcttcactcctttcatccagcaatcacattcatgagaatctatccttccaattctaattatggaaaaagctatgcacccaaaaatatgcatcggggcataatttaatagaaattgtaagtgacccaaatacctcatacgaagttaaatacataatgatatttccatagaagaaatgctctggcaaccattaaaaacaattatcctaagcctttatagcaaaatgggaagacaggtgtggtgtgatatggagggaaagtgaagccagtgcagaagtgtccgtgctgcaagcaggaactcgcactgggaggggagacacgtgatcagggcggaagtgtccgtgctgcgaggaggagctggcactgggaggggagacacgtgatccgggcggaagtgtccgtgctgccagcaggagctcccgctgggagggcagacacgtggtccgggtggaagtgtccctgctgcgagcaggagctcacgctgggagggcagacacatggtcccgtggaagtgtccctgctgcaagcaggagcgctagtgctgggagggcggacacgtggctccgggcagaagtgtccgccagcaggagcgctcgtgcttggaaggtagacacgtggcccgggcggaagtatccttgcagcgagcaggagctggcgctgggagggcagacacgtggtccgggcggaagtgtccgtgcagccagcgggagctcgcgctgggagcggagacaggtgatctgggcggaagtgtccatgctgcgagtgctcgcggctgggagcgcagacacgtggtccaggcggaagtgtccatgctgcagcaggagctcgcactgggaggggagacacgtgatcagggcggaagtgtccgtgctgcgaggaggagctagcgctgggaggggagacacgtggtctgggcggaagtgtccgtgctgcgagcaggagctctcgctgggagggcagacacgtgatcctggcggaagtgtccgtgctgcgagccgcagctcacactgggagggaagacacgtggtccgggcggaagtgtctgtgctgcgagtaggcgctccggctgggagggcagacacgtggtccgggcggaagtgtccgtgcagcgagcaggagctcgcgctgggagggcagacaagtggtccagtggaagtgtccgtgctgcaagcaggagcgctagtgctgggagggcggacacgtggcccaggcggaagtgtccacgcctacctcgagcaggagcgctcatgctgggaaggcagatgggtggcccgggcagaagtgtctgtgctgc

SEQ ID NO: 37510 - DNA, 2300 bp, Homo sapien
tggagggccaggtgagcacacagctgcgaggaggtggaggaccaggtgagcacacagctacagctacagggaggctctgcgcctgcaggacaggttattacaggggccgcagcagggcctgggccgcctccactctgttggctggggttcaggggtcccaggtcgccaggagcaccttgcatgtggctcgggatgcacggagtctcccgtgaggtgtgggtttcctaggaccccagggcaggtgtcccatgggagtatgaactaaatgcctttgtggacgtttagacgtgaaatgtctgctctagactcacacacctgtctcgctccctccttccagaactcttaaaacgcctagatgacgtgtccaacgatgtgaggatggcagccgcctccaccttggtcacctggctgcagtgtgtcaagggtgccaacgcaaaatcctactatcagagcagtgtccagtacctgtaccgagagttgctggttcaccttgacgatccagagagggccatccaggatgcaattttaggtgagactccgacggcttggccttcgttccgatgcctgctttcggcgcctgccacgggcatctgtagctgagccgtgtgaccggccacagggccctggggcacaggaggggcctcagctccggcctggcacactcttgagttcttggcaaaccctgagagcggctgtctttgtggtgatagctgctgacatttcctctaacagaaatcaaaactgagagtattctagaatacttgttagttgtttaaaataacaatagtaagcccagtatatattgacacagatggcttgtgtttttgaaaaatactttccaaaacaaaatcatctgcaagaacgatttttgcaaatgtcttaaatgtgtagcttgatggaagacactggactttcacatcttccatacagtcagtcatgatgtgtatggctctggctgaaatacgtggaaaataatctggcctcgcctgtggcttcaagtgtagttggacaaaagaagagtattttagtagccttttcagataggcgtgggacttcttcaataccacgccaacagcgacacaggccgtcccttgaaggtcactcacagcacagggcctgaggccacacaccacagagccttccacgctcagtgcattaaaatccgctggtccatctcacacttggaatgtaacgatttgcttttttttttcttttttttttttttgttttgttttgttgttggtgaatataatgacgttgttcttttttttaataaaatttgtatttttaatttttgtgggtacacataggtgtatataaggcatgtgtgatactgtgatacaggcatgcagtgtgtgtaaatcacattggggaaatggggtccccgtcacttcaaacacttacactttctttgtgttacaaataattcagtgatacttttcgttatgtttaaatgtgtgataaattattgttgaccatagtcaccctgttgtgctatcaaatactaaatcttactcattctgtttttgtactcattaaccatccccatctcttcccccggccccattcctcttccgagcctctgggagccatccttctgctctatctccatgagttgaattatttttatttttagttcccacaaatgagaatgtgcggaatttgcccttctgtgcctgacttatttcacttaacatagcgacctccacttccctccatgttgatccaatgactggatctcatttcttttgtggccggataatattccactgcgtgcgctccacgttttccttctcccttcatctgtccgtggacaccccggttgcttccacaccttggctgtcggaacagtggggcattcggcgtgcgcgtgcagctctcccccatagctgaattcctctcttttgggtatttgcccagaagtgggattgccgggctgtatggggctctatttttagttttggagggacctccagactgttctcccagcggtgctcatttacattcccaccagcagcgtgagggttcccttgtctccacatccgcgccgggacttgtttccgcagccattttaactggggtcagaggatgtctcacttgtttctatgtgcatttctctgaggagcggtgctggtgggcaccttttcagacgcctgtttgtcatttccatgctgtcttttgagagctgtctgttcaggtcttttacccatttttaattggattattagattgtctgctattgagcctgagctcctcatatattccagtgattaatccttgtcaggcggcggttctaagat

SEQ ID NO: 37511 - DNA, 2300 bp, Homo sapien
ctggactttcacatcttccatacagtcagtcatgatgtgtatggctctggctgaaatacgtggaaaataatctggcctcgcctgtggcttcaagtgtagttggacaaaagaagagtattttagtagccttttcagataggcgtgggacttcttcaataccacgccaacagcgacacaggccgtcccttgaaggtcactcacagcacagggcctgaggccacacaccacagagccttccacgctcagtgcattaaaatccgctggtccatctcacacttggaatgtaacgatttgcttttttttttcttttttttttttttgttttgttttgttgttggtgaatataatgacgttgttcttttttttaataaaatttgtatttttaatttttgtgggtacacataggtgtatataaggcatgtgtgatactgtgatacaggcatgcagtgtgtgtaaatcacattggggaaatggggtccccgtcacttcaaacacttacactttctttgtgttacaaataattcagtgatacttttcgttatgtttaaatgtgtgataaattattgttgaccatagtcaccctgttgtgctatcaaatactaaatcttactcattctgtttttgtactcattaaccatccccatctcttcccccggccccattcctcttccgagcctctgggagccatccttctgctctatctccatgagttgaattatttttatttttagttcccacaaatgagaatgtgcggaatttgcccttctgtgcctgacttatttcacttaacatagcgacctccacttccctccatgttgatccaatgactggatctcatttcttttgtggccggataatattccactgcgtgcgctccacgttttccttctcccttcatctgtccgtggacaccccggttgcttccacaccttggctgtcggaacagtggggcattcggcgtgcgcgtgcagctctcccccatagctgaattcctctcttttgggtatttgcccagaagtgggattgccgggctgtatggggctctatttttagttttggagggacctccagactgttctcccagcggtgctcatttacattcccaccagcagcgtgagggttcccttgtctccacatccgcgccgggacttgtttccgcagccattttaactggggtcagaggatgtctcacttgtttctatgtgcatttctctgaggagcggtgctggtgggcaccttttcagacgcctgtttgtcatttccatgctgtcttttgagagctgtctgttcaggtcttttacccatttttaattggattattagattgtctgctattgagcctgagctcctcatatattccagtgattaatccttgtcaggcggcggttctaagatacagtctcccatcccgtacccgcgggctgtccctgcggctgtactctgctcattcttccctttgctgtgtggaagctttgggcctggatgtgctgactttgccttttgcctcctttggaaaatacttagaccttccccgcgcagctgcgtccggtttcccggcgtggctacatccggttatgcgatgtcggatcttcctggtgtggccgcctcccgtcgcgcagcgtcagaaactcggatcttcgtggcgtggccgcctcccgacacgcggcgtcagaaactcggatcttcctggcgtggccgcctcccgtcgcgcagcgtcagaaactcggatcttcgtggcgtggccgcctcccgacacgcggcgtcagaaactcggatcttcctggcgtggccgcctcccgtcgcgcggcgtcagaaactcggatcttcgcggcgtggccacctcccgacacgcggcatcagaaactcggatcttcctggcgtggccgcctcccgtcacgcggcgtcagaaactcggctcttcgcggcgtggccgcctcccgtcacgcggcgtcagaaactcgcatcttcccggcgtggccgcctcccgtcacgcggcgtcagaaactcgcatcttcccggcgtggccgcctcccgtcacgcggcgtcagaaactcgcatcttcctggtgtggccgcctcccgtcacgcggcgtcagaaactcggatcttcccggcgtggccgcgtcccgtcacgcggcgtcagaaactcgcatcttcctggtgtggccgcctcccgtcacgcggcgtcagaaactcggatcttcccggcgtggccgcgtcccgttacgcagcgtcagaaactcgatattcctggcgtggccgcctcccgtcacgcagcgtcagaaactcgatcttcctggc

SEQ ID NO: 37512 - DNA, 2300 bp, Homo sapien
tgaggtgtgagctcaccgagaaaaaagcactgtgctcccccgggagctttgcaaaacgggccgctgctgccctccgttctgcagcagagatggtggccttgaagacagcgagcctgcctacggggtcgctgcgtccggtctcactccagccaggctgccggcctggcccctgcctccgtttcccttgctttgaaatgtcagtggctgcactacctgctccgtcctgctctgcagtgctgggaagatgggaaaagccttaggaactgaagcccagcctgttgtccaatgtcctcttctgaaatgaggacagttggccaggccaaagaaaacagacccaagctgtgtttcgggagacacagaagccccccagactctcctacctgcttgttcttgttcctcccttaacccactccacggaccggggccttacggggaggccgtactggccccagggtgggcagggtggaggccagcctttttgggggcacgatcctagtatttgaatgtccatcttctctagtgacagacccaggcggtgggttctggcacggccatctgccaaaatctttcccccaaacagatgtgtctgtttaaaaaggagatctaatgcaggcttttagcagcaatgtaaggtccatcagagttaatgcttggtttaaaaaaaaaaaaagtagtcagatgtggtagagggtgcggggggacgctgaggcagaggatcgtttcagaccaagagctcaagaccagcctgggaagccgggcgcggtggctcacgcctgtaatcccagcactttgggaggccgaggcgggcggatcacgaggtcaggagatcgagaccatcctggctaacacggtgaaaccccgtctctactaaaaatacaaaaaattagccaggcgaggtggcaggcgcctgtagtcccagctacttgggaggctgaggcaggagaatggcgtgaacccccggggggcagagcttgcactgagccgagatagcgccactgcactccagcctgggcgacagagagactgtctcaaaaaaaaaaaaaaaaaaaaaaaaaaaaagaccagcctgggcaatatagtgagactccatctgtacaaaaagatttaaaattagccagacatggtggtgtctgcctgtagtctcagcgactcaggaggctgacgtgggagaatggcttgaacatgggacggcgaggctgcagtgcgctatgatcataccactgcgtgatcactccagcctggatgacagagcgagaccctgtctctaaacaacaacaacaaaaagcaaaacaaaaaggaaaaaaacaggagttccagaccagcctggccaacatggtgaaaccccgtctctactaaaaatacaaaaattatccggatgtggtggtgggcacctgtaatcccagctactcaggaggctgaggcacaagaattgcttgaacccgggaggtggaggttgcagtgagccgagatcgtgccattgtactccagcctggataacaagagcgaaattgtctcaaaaataagtaaataaataaaggccttattggccgggtgcggtggctcatgcctgttatcccagcactttggggggctaaggtgggaggatcacttgaggtcaggagttcaagaccagcctggacaacatagtgagacccccatgtttacaaaaatataccaaaaaaaggccgggtgcggtggctcacacctgtaatcccagcactttgggagcccgaggcaggcgaatcacgagatcaggagttcaagaccagtctggccaacatggtgtaaccctgtctctactaaaaatacaaaaaattagctgggggtggtggcaggtacctgtaatcccagctactggggagactgaggcaggagaatcgcttgaacccggcaggcagaagttgcaatgagccgagatcgcgcaaatgcactccagcccaggcgatggtgagagactccgtttcaaaaaaaaaaaaaaaaaaaagccaggcgcgcctgtagtcccagctactcgggagtctgaggtgggaggatcacctgggccggggaggttgaggttacagtgagctatgactgcgccactgcactccagcctggacaacgggagggagaccttgtctcaaaaaaaaaacaaaagagcaaaaaaggtgaacatgattgtatgtaaattacacttcgttttaaaagtgcaaagaacaaatcagtatttgcaagacgcggtgcagtccccagcacggagaagagaacctgcgaattccacgcgggaagagccggcgtttccatcagcaggggccctgcag

SEQ ID NO: 37513 - DNA, 2300 bp, Homo sapien
tgggcaatatagtgagactccatctgtacaaaaagatttaaaattagccagacatggtggtgtctgcctgtagtctcagcgactcaggaggctgacgtgggagaatggcttgaacatgggacggcgaggctgcagtgcgctatgatcataccactgcgtgatcactccagcctggatgacagagcgagaccctgtctctaaacaacaacaacaaaaagcaaaacaaaaaggaaaaaaacaggagttccagaccagcctggccaacatggtgaaaccccgtctctactaaaaatacaaaaattatccggatgtggtggtgggcacctgtaatcccagctactcaggaggctgaggcacaagaattgcttgaacccgggaggtggaggttgcagtgagccgagatcgtgccattgtactccagcctggataacaagagcgaaattgtctcaaaaataagtaaataaataaaggccttattggccgggtgcggtggctcatgcctgttatcccagcactttggggggctaaggtgggaggatcacttgaggtcaggagttcaagaccagcctggacaacatagtgagacccccatgtttacaaaaatataccaaaaaaaggccgggtgcggtggctcacacctgtaatcccagcactttgggagcccgaggcaggcgaatcacgagatcaggagttcaagaccagtctggccaacatggtgtaaccctgtctctactaaaaatacaaaaaattagctgggggtggtggcaggtacctgtaatcccagctactggggagactgaggcaggagaatcgcttgaacccggcaggcagaagttgcaatgagccgagatcgcgcaaatgcactccagcccaggcgatggtgagagactccgtttcaaaaaaaaaaaaaaaaaaaagccaggcgcgcctgtagtcccagctactcgggagtctgaggtgggaggatcacctgggccggggaggttgaggttacagtgagctatgactgcgccactgcactccagcctggacaacgggagggagaccttgtctcaaaaaaaaaacaaaagagcaaaaaaggtgaacatgattgtatgtaaattacacttcgttttaaaagtgcaaagaacaaatcagtatttgcaagacgcggtgcagtccccagcacggagaagagaacctgcgaattccacgcgggaagagccggcgtttccatcagcaggggccctgcaggagacctcgcgtgcagaccccacacattccccagaagggcgcctggggaggaggggccgcgggaggagcccggcctgcgagcgcctgcgcacgcccggagcggcggggaattggggtgggggcggcggccagcaatgggagacgtgcggaaggccaaggaggcactggccgaggtgagccccgtcggaagtgggggctgcctcccggagccgcagctgcccctcccccaagacgcggacgccctcctggagattcagaccctctcatggagatgcagacccctcccccggatccaaacctctccccaagatgcggacgccctcccccagatgcacacacctttccgaagatgcagacccttcccccagatgcagacccctccccaacgtagaccgcgtatctgaggggcagagccctccgcgatgcagacccctcccccaggtgcagacccctcccccaggtgcagacccctcccccaggtgcagatccctcccccagatgcgggcccctcccccagatgcaaaccccccccagcaggtgcagacccctcccctaaatgcggagccctccctcagatgcaggcctttcccccgaatgcagtccccctcctccaggtgcagcccccataccgggacgtggcctcgcccgtcccaccccgtgacgcatccaggcccctccccctccctccctctccccctccccttcccccgcctggagtcctcctcgcccctccgcccgcggcccgtagccgcctcgtcattggccagaacgcttcgggtggcgcgctcgggactggtgaaggcctgcgttgctcccgccctcggcccggggcgcggcccgcgattggctggcgtgggcagagcgtcttctcgggcctgggcggcgcagacgaggcctgaggcggcggcgcgaggcaggtgagctcccggcgggccgggccaagggcaccccggggcgggcgccgggctgcggggacgcgaggcgggggcccgggggccggggggacgcggggtcgcggcctgggcgccctcagcgcgggctgcgccagggcctcctgggccaacggc

SEQ ID NO: 37514 - DNA, 2300 bp, Homo sapien
ttttgtatttgctagaaaagatctataaacttgctgtttttttttcttcttagaacaacaaaacagcgcagaagcacaaacaaatcagcttttagtatcaaccacgtgtcaaggcaggtcacgtcctctggcgtcagccacggcggcactgtcagcctgcaggatgctgtgactcgacggcctcctgtattggacgagtcttggattcgtgaacagaccacagtggaccacttctggggtgagtccctgcgagacacagattgtcccgcctacagttggggtgtttctcagattatgctggggagaggggaggcggtggccaggttgtcggtttgcatggattatgctagggagagggaggctgtggccacattgtgggtttgctgcgtgactggctggtaggagcatcagttaggttccaggcttgtcctcagacttgatcaggacgctccttggaagctgcttccatgtgcgccttgtcgggtggtcattgggttatgctaacgtgtagtgactagttccaatggggagatgaagcagcaggtagtaatcttataactctgtttttataaatgcattacttttgtaggatgtttgaacaaagacaatccaaaaacttcagtgtgtttccaagaaagctctaagcagtgaagcagccagggttagagagttcttagagaatgctgcagggtgaggcactggcgctcagacttggctgacgtggagtctgggcagtgggagccccagcctggctggcgagagcatggggtcccaaggctgtgcatggagagggaagcatggtaaggggcgcccagccgctcatctgcattcggtttatgttctggttggcccttttgagacaattagaagatccagattagttccagagatcacatgtgctaattttgggaagccttggtattggtgtttgttctgttttgctcagctagtgagagtggttaccaggcaacagagaggcatctgctgctgctgaggcttgtgccttgctgagcgggctgtgagaagatagatgggctttcctctccttccctcatgttctgctttcctccttaggccaggtgctgtgtgtgctgccgtctgtctgtattttcttcaaggataagctttcaccttcagtcagaagatggtatctgcatatatctggaggcattttaggaaataaactgtgaccagtgccataatgctgatttattaaccattgtaacctttacattttttaatgggttttgttcttatttgataagctgagctcaacagcaaaaatgtgtgtgtgtgtgtgtttttttttttaggtcttgatgatgatggtgatcttaaaggtaattattttagtccttttatcttcatatacttttcaaaatagaagttttagttaaatatctgcagactgtgataaacaggttccatctactgtttgaaaactttaggtggaaataaagctgccattcagggaaacggggatgtgggagccgccgccgccaccgcgcacaacggcttctcctgcagcaactgcagcatgctgtccgagcgcaaggacgtgctcacggcgcaccccgcggcccccgggcccgtgtcgagagtttattctagggacaggaatcaaaaatgtaagtctcagtcctttaaaactcagaaaaaggtgtgttttccaaatttaatatttcctttctgtaagtctcagtgtctgcactatttgtcttggagacttaaaattatcccttgaaagcataagaagtacaccccaaaccagctttgtccttcctgtcctcttctagtttacattttatgtggttagtaattttgtacctaaaagtatttgaaattctataaatttggacttgacgtgagcaaaagaaaatttctacgtaagcgaaactaataaaactacagtcactttcagatgcacacctttatttttataaaacggcacagatgttcacacatactgaaggagtggctttgggacgctgctctggtctgtcctgtgaagagtggttatgccagtgttcgtgtcgggaaaacatttcccgtggtcgctagccctgtgcttatggtgatggaggggccttcagagaacctgtaggtctgggaaggacacacgtgactctggtttgttctgggacagcagcagtcactgcaggaaaccccctgatgtggacatgggcttccctcagaggcgactgggcaagagtgtgggtgtcaccgcggggggcctcctcctgggcctgcaggagagacagaaccacaggcccctttgcggcttccaggcgggactggga

SEQ ID NO: 37515 - DNA, 2300 bp, Homo sapien
gcagcaccctctccgggatcccctgggggttactccgcagtccagtctccggggtcccctgggggttaccccacagcgccgtgcgccagcggagttggcggccttcccctgggggttaccccgcagtccagtctccggggtcccctgggggttaccccgcagcgccgtgcgccagcggagttggcagccttcccctgggggttaccccgcagtccagtctccggggtcccctgggggttaccccgcagcgccgtgcgccagcggagttggcggccttcccctgggggttaccccgcagtccagtctccggggtcccctgggggttaccccgcagcgccgtgcgccagcggagttggcggccttcccctgggggttaccccgcagtccagtctccggggtcccctgggggttaccccgcagcgccgtgcgccagcggagttggcggccttcccctgggggttaccccgcagcgccgtctccgggatcccctgggggttactccacagtccagtctccgggatcccctgggggttaccccgcagcgccctctctgggatctcctgggggttactccgcagtccagtctccgggatcccctgggggttactctgcagtccagtctccgggatcccctgggggttaccccgcagcgccctctctgggatctcctgggggttactccgcagtaccctctccgggatcccctgggggttactccgcagtccagtctccaggatcccctgggggttactctgcagcaccctctccgggatcccctgggggttactctgcagtccagtcttcggggtaccctgggggttgctccgcagcaccctctccagggtcccctgtccactgccagctgggctcttccccaagtgattatctttggtgtccattctaaaagtgcctgaaatgaataatttggctacctgacttatcaggaagtagatattggctttatgggaagaaataacgcatgttcatggttttttaataggcggtgcgtctttctacgtgaataggattttgtggctggccagatacactgcatcatctttttcatcatttttagttcaactttttcaagtggttttaatgaagctcagttatgaatcagaaaattacaaattgaaaactcatgaatcaaaagattgtgaatccgaaagctataagtcaaaaagccatgaatcaaaaggtatttaaatattttttccctcctttttccaccaatcacactttcgcagtggagaaagtgctgtgactttcctcgccaggcgcctccctcgctgcctcctcctgtggtcttggtgctggctctctcctggcttccccctctggatcttgcatccctgggagcttgtggaacttttcgtttgttctgtgtgtggtttggttccctcagagctgatcagtgttgaaacatctttaaagttatttcttaaacaaaaagttaatgtgctcaacttttgatttttattacctttttaaagcaaaaactttacctgagtggtatttagaacctgttttttcagaactttttttctttttgagacggagtttcactcttgttgcccaggctggagtgcagtggtgtgatctcggctcaccgcaacctccgcctcctgggttcaagcgattctcctgcctcagcctcccaagtagctgggactacaggcgcacgccaccacgcccggctaattttttgcatttttactaaagtagacatggggtttcatcatgttagccaagatggtctccaactcctgacctcgtgatcgcccgcctcagcctcccaagtgctgggattacaggcttgagcaactgcgcccaacccagaactattttaagcaggccaatctttgtattgtttgggccacacacacgattcagccagagggtgggggccctttcacgtctcttctcgtggcccgggccctgtcagcggcattcacctgtgtggtaggagccatcggctgtgggaactctgtggaagtggctagccttgcacatcctctgatcatgttgacttcatcagggtgcgagaagcacttgagcttggcgtcggtgagttccctaagcctcttttgcgtgtgttgcagctcatgccagttactatgggagaatgaatgtgagagaggttctcagagaggatggccacctcagtgtaaatggggaagcgctgtgtaagtatggcttcgttttcctgtgggcgtcggtcgtggagttggtcccacacgctgtcatgttgggtactagcagtagagaatgaacggcccgtgtgacatggtggtcctcac

SEQ ID NO: 37516 - DNA, 2300 bp, Homo sapien
ctgtttaattttttatttatttatttatttttgaaaccgagtcttgctgtggcacgcaggctagactgcagtggcgcgatctcagctcactgcaggccacctccacctgccgggttcaagcgattctcccaccttagcctcccgagtagctgggactacaggcatgtgccactatgcccggctaatttttgtatttttagtagaggtggggtttcaccacaatggtcaggctggtctcaaactcctgactccaagtgatccatctgcttcagcttcccaaagtcctgggattacaggcctgagccacccaccatgcctggcctaagttgtttaatttcaactccctttaaaaactttttttttttttactatatgtgaactttttaaatattccaaaataactaattcagtgctccgtagacttccccgttccagcaccactgtgcgtcagcacccaccatgcgtcttcccagtctccttggtatgcgtccttggtgtgcgtgcagcccagggccagcactgacttggggctgggttgttgctgtgtacctttcattagatagacccacgctgtacctgctgcttgctctgtttcgtgtcgaaacatatcatagacattgcttcaagtccatcatccttaggcagaggagaaaatctagacatttagagctgcttaagaatgaaaacacaatcatttgattggcagaagtcatcaaagtcagacagtagattggtaaaggcatttgcaatacgtgtggtaagattatctctgatgtgcagagagcccctataatgggtaggaagagaagcagtggtgacagagaaagcatgcgataggccgggcgccgcggctcacgcctgtgattccagcactctggaggccgaggtgggcggatcacctgaggtcagaagttcaagaccagcctggccaacatggtgaaaccgcgtctctactaaaaatacaaaattagccgggtgtggtggtgggtgcctgtaatctcagctacttggtaggctgaggcaggacaattgcttgaacccaggaggtggaggttgcagcgagccaagatcgcgccactgcactccagcctgggtgacagagcaagactccgtctcaaaaaaaaaaaaaaaagaaaaagaaaaagcatgtcaccgtgctatcagggagctgagtcctactgatgggacttgcagattacagcaggctctcatctttagtctgcaggcccacgaggacgatggctgctatcagcgctggctgaggcagtgggcttttccctggccaggaggactgtcatcaactacggcctctgggggaaaatcttaggatattaaccagtgacaaatacatgcactttttgaaatgagcaaccatgcccttgggaatcatcctacagaaataaaggcaccagtacagaggccacacaggcaggagggtcagcgctgggaagtgtgtgtggggaggagtgagggtagaaagcagctacgtgccattgttagggggtgtgggctagagaagggtgtgtccacacgtggaatgtgggagggcagctgtgatgaacggtcgtgtcctaggaggctttgccctctccttcacggtctgttgttacgaagcaagaagagaaaggtatacacatatgtgtttgtgtgcttagaaataacatggggtgtatttagcttacataaagctataatttaggttcatttatatgactgttttctcatcagaccaagtttgttgatggcagggcctctccgatgcacctgtgcgcctcgctgcggggtgcccggtgggtgcttgcgggatggacacgcacctccagagggtgtggacatgccccactatgtccttcagctcctaggatgtgggtcgcacacatcccacgagctcacctatttctgttctttttaacatggtcctgcattattggaggggttattaaatttaatatgaaggaaaacactgtcacaatgacattctagattttgagaggatatataattcttctgaggtatctaagataatggacccgaacagtggaagtgatttagttaaaataggacatttgtgtccgtctgctgttttactaggtggacgtgcaagtcagagaaatggtgaaactcctgttttccgaagatcagcaaggcggttctctggaacagctgctgcagaggttctcatcacagtttgtgagcaaaggcgacttgcagacgatgctgcgagacctgcagctgcagatcctgcggaacgtcacccaccacgtttccgtgaccaagcagctcccaacctcagaagccgt

SEQ ID NO: 37517 - DNA, 2300 bp, Homo sapien
tgtggtacttctcgcagtccccgcgcgtggtcatccaggtgagtggccgccggtggccggagctgctcctcttcagcatggactcggttagtgttcacgggtcgtaggtccacagctccatggaacttcgtaagatgaacacgtctgtggaactggtaccacaagaagtggcagcgttcccacaccgaggagtccccggtgtccccgtgtagcctccacgctacacatctgttggcttgggtttagcgtcacacagatgggaccgtgtggcacatgctggtcctgtcagccttcctccctccctcttttgggtgttccagccatggtgttgtgagtggcagctgttcctgctcgggccgtgggtcttccgtcacgagagtggcagctgtgctttctcaggtgttgagagacaataggtggggaggccctagctgtctggcctcggcatgggccttcacccccccatccctccggcctttgccccccgtctccccgggccttctcccccactgtctccccaccatctccccgtaccttcgcccccactgtctccccaccatctccccgggccttcgcccccactgtctccccaccatctccccgggccttcgcccccactgtctccccaccatctccccgggccttcgcccccactgtctccccaccatctccgtgggccttcgccccccccccgccccccgtcccaccgggccttcacccccaccgtctccctgggccttcgcccacccctccccgcccccttctccctgggccttcagtccccgtctcctggaccttctgctgtggtcctcgttgtgcactgcttttctgtggcttcatttaatactttatactattggctgtacaagtttaaagcactaaaggatggagaatttaaatagatttattttgcctcaatactcaaatcctgcctcatattcatgacatgttttgaagaaaaatccaataattacttgtatgtggaacaacgccaagacggctttcactaggaaaacacaagtccagcctgaaagaattcatgaagtgcctgtgacctgacgttgaggatcacatgggactgtcgtcatcatgatctcgtccccaggctgccccggcggaactgtccggtcagcgtgactgtttggctttctgcagccatcagcaccgcacgggctcaccagcactttgctcctgagggcacagccggagcccctcctcactgcaggcagacgcagcctctgctgccacgaagccacacagccctgcgcttggcatgcggctgctttttctgtgccagctcacgagtgccaccggcacagtctgtgtcacctggcagggccaacaggttttctgcacagggttgccacagtgttcctgcatggcggtcctgctcctggccataacatccttctcacagggcttggtgatcctgaccctcccagaggagctcactggcctgcagtgttgtcagtgtgatgctggtggggatctggtggtgagagcacagcatggcttcagtgtcttagagactgagggagagggtggagctcagccctcccctggcacagttctctctcagaaggaagtgcacggtcactggaggggcagacttcatataaatcaccaatcactgtgctgggactggactgagaaactgtcggctcctgggaagtaaagagaatgtttacagaacatagggatagcagatataagggaccagctcccaccccaggaccaaggtggagcctcgccagagcgtctctccagaccgttgggcggagggtgtggcccagctcactgaacgtcagggaggttgctgtggtgccacacggtggaatgtaccagcatgctgggaaagcctgtgcacaacagggtgactcaccgggcgtttggctgcaacacccccaagaggggtaccagggaacctcagtgtccacccagcaccctgagctggcaagggctaggctttgggctggcaaagggagagcagttcaaggctcagctccgtcttcacagcgcggtagaagacggcttgggggctgaggggcagtaaatccacagctggcatagaggagaagccggcgggtacgtgcccatcgttcaccatctcttctaaacacgaatgaaatgcgtgtgtcgtcctcacacactgaaggcaggctgcgtgcacggtctcctcctccgttgcgcacagcaacgtggctgcctgggcgcagcgtctgcaacttgtcagtcagtccctgtgtgtgcctggggacgctgtgctgcgaacagtgctctccggtcacatctgccctgca

SEQ ID NO: 37518 - DNA, 2300 bp, Homo sapien
gttgtgttgggttaagacagttttcagtgtaccgtaaatgttgtgttttcagaaaaagacaaaacgatggtgctgactggttttctgtatattgcacaacagtcctcaaatacactgatgtatgaaactattcatacatcaagcagcatttttttcactctccttagaattggaactatgcagttaaggcagataaaatgtacagatgtttcatatattacaggttacatatataaatcaaaatttcctatataaaactgatttgggatttggggtggaaatattttgaatattaatttatttttaaagatgcaagataggactttgtgcaatgtatttttgtaaatgcttttcaaaatatctgtctttggtagtgcttctgctgctgccaccaaattgataagatgctattaagaggtttaaataaagagttttaatttttaaaagggcatgggatataaacagtctatttcttttctcagtttgtctgtttctgcccctgggatgtgggagggactgggtttgctggttcttgttggcaagctctgtagcacagcctttgaatggtaacctgtcctccaaggccttgaggcctcaagtgtgccaggcacctctttctgtagggcaccatttccacttggaaaacggactgaattacaagttgcttgatgggcagaacattaggaaaactgatgcctttcctcaggacacagttttcatcgctgcttctgtagctgaaggcaggtgctggcaccaggtcacagacgatagcacacacaccacactattttgcacctggcttttccccagttaccaagtgtgtcccgtaagaacctttttttttttaacagctgtttttgtccattgtatgcacggctggatcatgttgattcaagcagggcccagcttaaaggcctttgtttcttcttttttattataaacaatgctaacctgtgagagtgggctgaccctgtaaatccaacggaggagtcttcggaccgaacggcgaaccgccttcaaaccccaattcttacagccaagccgttcccaaccctgcacggctagggctgggcctcaggccccgtttctaactctgactggggtttggaccccgtttccgcagcctgacagggctggaagctctaggccgacccagttcccccttccagcaggacccgatcctggaggagtgagccgtccacccaggcacagccgcaggtccccagccacggccagggaaggaccgcaggtggcctttcaaagaggaggaacgcccctcagcgatcctaagaggttgtttctgtttgtttggagacacagtctggctctgttacccaggctggagggcagtggtgggatcccggctcactgcaacctccaccttctgggttcaagcagttctcctgcctcagcctcccgagtagctggaattagaggcgcctgccaccacgcccagctcattttagtatttttagtagagacggggtttcgccatgttggccaggctggtctcgaacccctgacatcaggtgatccgcccacctcggccttccaaagtgctgggtttacaagcgtgagccgcggcgcccggccctataaaagtatttttaatttataagcattttacacattgaactgtatagctcaatggctgctgttacaccgcgcgcgtggggagggtcccaccccgggacgcttcctgctcggggtcagccgccgccgcagcctgtttacgcgcagcgccccgccaggcagtttcgtgccacccgccattgtggcgcgagccagtcccggccccgggtcacgtgccgctcccgggcccgccctgggccacgtgttgcctgcggacccgcctctgggccacgtgttgcctgcggacccgcctctgggtcacgtgttgcctgcggacccgcctctgggtcacgtgttgcctgcgggcccgcccctgggtcacgtgttgcctgcggacccgcccctgggtcacgtgttgcctgcggacccgcccctgggtcacgtgttgcctgcggacccgccccaggtcacgtgcagctagccggcgcgcccgcccccgactgcgcgcgactcctcgcgggccaccgtagaagggcgtcgggcggccgtcgggacggaagccgggaggcgctgccgaccgcgcctgcgacagcgtcagccctgcgcggagcgccggcccgatggcggcggcggcggcgatggccgagcaggagagcgcccggaacggcggccgcaaccgcggcggcgtccagcgtgtggagggcaagctgcgcgccagcgtcgagaag

SEQ ID NO: 37519 - DNA, 2300 bp, Homo sapien
tttctgtctaaccgcttgaattcattcaccacggaggctgggagactcctcctggagcgtccgcagttccttttatcgctgagtggttttccctgtgtgtctccagcacaattgtttatcccttcagctgtcgggtaaatttaccaaaagatactgtttgttgacttatttttaaatattcttatgtttattttagcctcgggcaggtgtgcaggctttgttgatttatttttaaatatgctaatgtttattttagcctcaggtctgtgtgcaggcttggtatataggtaaactagtgactagggtttgtcctacagatcatttcagcaccgggtaccaagcatgggtacctgacagttttgttaaaatggttttctgagcctctccctcttccctcaggccggccccagtgtgtgttgttggcccctttctgtccctgtgttctcatcattcagcttccacttgtaagtggggaagtgtagtgcccgggattctgtccccgcattagtttgcgaaggataatggcctccagctccatccaagttcctgcaaagggcatgatcttgttcctttttatggctgcatagtattccgcggtgtatatggaccacatcctctttatccgtctgccgctgacaggccccagcttgattccatgtcggtgctgttgtgagtggtgctgcagtgggcatttgagtgcgtgtgtcttcatggtagaaccatttagagtcctctggacataacccagtagtggggttgctgggtcgaacggtagttctgtttttagttcttttaagaattgccagactgctttccaggatggttcaactaatttacactcccaccagcaggtacaagcgttcccaagagatgccattttaactcacagccacagcagttgaaggtgaaggagagggaaggaattgggaacccagcaggttggtgtccttggatatgtgccccgcagaagtcgggcagcagttcctggttcgtgtggttacgctagagagaaactgacctggttcatctggttacgctagagagcagctgaccttgccccatggatggcgcgagttatgggcggccgaccttgccccggggatggcgcgggttgtgggcggccgaccttgctccagggatggcgcgggttgtgggcggccgaccttgccccggggatggcgcgggttgtgggcggccgaccttgccccggggatggcgcgggttgtgggcggccgaccttgccccggggatggcgcgggttgtggtcatcacctgctttctccagacttctccctgctgggacggggagtcatctcccaggccaactggattattggggcacttcggagccaccatccaggtcttgaggagcctcagccttggctgtagtatttgtacattggcatttagaaacttggtgtggctgagaccacagcccaggaggctgtgacctgcagcagctgtccccctgtctgcccacacggtcgtgggtctggctcttcctgccacttggctcctcctgcagtgtgtttgcgtgattttttttattgcggcctctgaccttcttttgtctcttcagtcatctaaagagatttttaaaaggaaaacggtctagtgtgtgcggtgcacccctagcccagggcctaagaggagcgtcttgtgaaggagctgtacctgccggctcaggtcccttctcggagtgactcctggcagagcagagcaggcctcagccctccttacaggcgcgtccagccagccctgcgtccgggcgtgagtgcgctttagctcgcggcagtcggcggaggggtccttgtgaaatctcctctggccccctgtcccgaggcacctgtgtgtgtcttgagtatttcctcttcatccttcacgtgtccctgacagctgaacgcgcaagccagcttccgtctgccaagagagaagggcgggattcgccccatgagctcggtctttcttcatttgacaccgacagtctcggccactagttctaatgcttgcgtttctgtgttctgctttttaatgtttttgtaagagaagagcaaaatcagctagattgtttgcccagacactttgctctgtggatacagatgttttggccggcagagagcaccagcgctcactggctctcagcgcctgtcagcaggcagaagccatttccctatctggaaggcacgtctgggtgtccacatggcacggccaatagtgcgcagcatgcagagccgggccgggagaaggcccggccatgcccagctgccccccactctccccggcctcgggcttgagagggt

SEQ ID NO: 37520 - DNA, 2300 bp, Homo sapien
gaccacatcctctttatccgtctgccgctgacaggccccagcttgattccatgtcggtgctgttgtgagtggtgctgcagtgggcatttgagtgcgtgtgtcttcatggtagaaccatttagagtcctctggacataacccagtagtggggttgctgggtcgaacggtagttctgtttttagttcttttaagaattgccagactgctttccaggatggttcaactaatttacactcccaccagcaggtacaagcgttcccaagagatgccattttaactcacagccacagcagttgaaggtgaaggagagggaaggaattgggaacccagcaggttggtgtccttggatatgtgccccgcagaagtcgggcagcagttcctggttcgtgtggttacgctagagagaaactgacctggttcatctggttacgctagagagcagctgaccttgccccatggatggcgcgagttatgggcggccgaccttgccccggggatggcgcgggttgtgggcggccgaccttgctccagggatggcgcgggttgtgggcggccgaccttgccccggggatggcgcgggttgtgggcggccgaccttgccccggggatggcgcgggttgtgggcggccgaccttgccccggggatggcgcgggttgtggtcatcacctgctttctccagacttctccctgctgggacggggagtcatctcccaggccaactggattattggggcacttcggagccaccatccaggtcttgaggagcctcagccttggctgtagtatttgtacattggcatttagaaacttggtgtggctgagaccacagcccaggaggctgtgacctgcagcagctgtccccctgtctgcccacacggtcgtgggtctggctcttcctgccacttggctcctcctgcagtgtgtttgcgtgattttttttattgcggcctctgaccttcttttgtctcttcagtcatctaaagagatttttaaaaggaaaacggtctagtgtgtgcggtgcacccctagcccagggcctaagaggagcgtcttgtgaaggagctgtacctgccggctcaggtcccttctcggagtgactcctggcagagcagagcaggcctcagccctccttacaggcgcgtccagccagccctgcgtccgggcgtgagtgcgctttagctcgcggcagtcggcggaggggtccttgtgaaatctcctctggccccctgtcccgaggcacctgtgtgtgtcttgagtatttcctcttcatccttcacgtgtccctgacagctgaacgcgcaagccagcttccgtctgccaagagagaagggcgggattcgccccatgagctcggtctttcttcatttgacaccgacagtctcggccactagttctaatgcttgcgtttctgtgttctgctttttaatgtttttgtaagagaagagcaaaatcagctagattgtttgcccagacactttgctctgtggatacagatgttttggccggcagagagcaccagcgctcactggctctcagcgcctgtcagcaggcagaagccatttccctatctggaaggcacgtctgggtgtccacatggcacggccaatagtgcgcagcatgcagagccgggccgggagaaggcccggccatgcccagctgccccccactctccccggcctcgggcttgagagggtacctgtcctggcttagtcacctggaaaccaaaatccttcgcagcttccagaattctccagtacaggaggagaagccgtccacgttcagagccgccttagacggtttgcctgtcaccggcattcctggacctggaaacgggtgcccccagccaggccggggaccactgtgtgcccagaattctcctcccgtcctttttccccttgcccggctcccagctgcccagggaagaagggagccggctgcaaggcgcagtccaaaccaggccgggggccgtgaccatcggcagtgccccccagagcaggctcctcgtgcaggaatatgggtcactgccttccagggagtcctttttttcttctggtttctaagtcgccacctcttgctttacctcagatagaagcatccagaacgctgtagtatcggcaaagcagaagctggtgtggtgcttgctcagggtcggtgcatgcggttctgcccgtggccccactggcggcatcgtgaggccaggcgtgtctgggagcttgtttttccagagtgccctgtgccagacggctcccggcctcctctgagtcagtcatgtccctgcaggactggaactaggacggcc

SEQ ID NO: 37521 - DNA, 2300 bp, Homo sapien
agtcatctaaagagatttttaaaaggaaaacggtctagtgtgtgcggtgcacccctagcccagggcctaagaggagcgtcttgtgaaggagctgtacctgccggctcaggtcccttctcggagtgactcctggcagagcagagcaggcctcagccctccttacaggcgcgtccagccagccctgcgtccgggcgtgagtgcgctttagctcgcggcagtcggcggaggggtccttgtgaaatctcctctggccccctgtcccgaggcacctgtgtgtgtcttgagtatttcctcttcatccttcacgtgtccctgacagctgaacgcgcaagccagcttccgtctgccaagagagaagggcgggattcgccccatgagctcggtctttcttcatttgacaccgacagtctcggccactagttctaatgcttgcgtttctgtgttctgctttttaatgtttttgtaagagaagagcaaaatcagctagattgtttgcccagacactttgctctgtggatacagatgttttggccggcagagagcaccagcgctcactggctctcagcgcctgtcagcaggcagaagccatttccctatctggaaggcacgtctgggtgtccacatggcacggccaatagtgcgcagcatgcagagccgggccgggagaaggcccggccatgcccagctgccccccactctccccggcctcgggcttgagagggtacctgtcctggcttagtcacctggaaaccaaaatccttcgcagcttccagaattctccagtacaggaggagaagccgtccacgttcagagccgccttagacggtttgcctgtcaccggcattcctggacctggaaacgggtgcccccagccaggccggggaccactgtgtgcccagaattctcctcccgtcctttttccccttgcccggctcccagctgcccagggaagaagggagccggctgcaaggcgcagtccaaaccaggccgggggccgtgaccatcggcagtgccccccagagcaggctcctcgtgcaggaatatgggtcactgccttccagggagtcctttttttcttctggtttctaagtcgccacctcttgctttacctcagatagaagcatccagaacgctgtagtatcggcaaagcagaagctggtgtggtgcttgctcagggtcggtgcatgcggttctgcccgtggccccactggcggcatcgtgaggccaggcgtgtctgggagcttgtttttccagagtgccctgtgccagacggctcccggcctcctctgagtcagtcatgtccctgcaggactggaactaggacggccggtcacagagtcagtggtcctgtcgaggctcctgctgtggtgttggggtgggtctccctccagaaccttcactgtgcggggagcacagcaaaaccggaggcctgccaacggcctgcaggctgacgggggtgcgggggcactttctctcttgggtgcgggcttttccctcctggtgccctgcctctgtgcagcacgaagcggtctcctgtggggggagggcctgtgtgccaggctaatgagatgcccggatgtggcggggctgtctgtgtttggggtccctggctgtggtgccttctgaagaggagcccttttctgtggttaactgagcatccaaccctttgcgttctcggctggccttcccgtcctggcaacaccaaggtcattctggtcctcagtggcgttgctgtggctctttatcacctccactgcaattggtttttgtttgtttgttttggggggatggcgcctcgctctgtcatccgtctaggcagtggtgcaatcatggcttactgcggccttgactacccggactcaagcagtcctcccacctcagcctcccgagtagctgggaccacaggtgcacaccaccatgcccagctaatttctgtgttttttgtagagacagggtctcactatgttgctcaggccagtctcaaactcatgagctcaagcgatcctcccacctcagcctcccaaagggctgagattacaggtgtgagcccccgaatccggtgtgcactgctgtttacttagtatttttctttaactagatttatttttaaacaaggctttgtccaaggacatttggctcgcaggcacagagctgattaactcgttatgtatcttttgataataaggcagcgatcattaagaaaaacgtgtagccaatgaaataacatgttctgggccccaccactggactgggaggtgcagcgcatccaagcagaggctgcctcctgccctccacgcctg

SEQ ID NO: 37522 - DNA, 2300 bp, Homo sapien
ataaggagggatgtacgtgtctcatctccccacccaccacgggatcaggttgaggccgtccagggagtgcatgggagggctgcgctcggcgcatctgcagagatcccctgaagaggggccctggctgcctcccactggggtaggtgcgggcccaggtccccgacaccgtgacggtgctgtgggactttgatggacctcacccggggagcccaggcctgctccacggcaaggtggccacgcactgcctctgcagtcctgagcacaggctccatacgggacctgaggcctgggctccatgacacttgggctatgtgcttccctggtgcttccctcctggggatgaaatcacacccataggtaaaggtttgggagtggagggagacagcaggagacaaagcaaggggacgaggactctggcagccacaaaggcagcgggagggccctggaggctcctgttgggcagcgcagtcaggaaagggcccactaggtgggagaggcaggcgcctggtgagtgctgagatctgcaccacgagaagggctgggctcccaaggcatgcatggggcctgggagtggagggagtgtgagcgggtgttaggacggggtctggggcgagcgggtgttaggacgggcctgggagcggagggagtgcgagcgggtgttaggacggggtctgggagtggagggagcgcgagcgggtgttaggacggggcctgggagtggagggagcgagagcgggtgttaggacggggtctgggagtggagggagcgcgagcgggtgttaggacggggtctgggagtggagggagcgcgagcgggtgttaggacggggtctgggagtggagggagcgagagcgggtgtcaggacggggtctgggagtggagggagcgcgagcgggtgtcaggacggggtctgggagtggagggagcgcgagcgggtgttaggacggggtctgggagtggagggagcgcgagcgggtgttaggacggggtctgggagtggagggagcgcgagcgggtgttaggacgggtctgggagtggagggagcgcgagcgggtgttaggacgggtctgggagtggagggagcgcgagcgggtgttaggacgggtctgggagtggagggagcgcgagcgggtgttaggacggggtctgggagtggagggagcgcgagcgggtgttaggacggggtctgggagtggagggagcgtgagcgggtgtcaggacggggtctgggagtggagggagcgcgagcgggtgtcaggacggggtctgggagtggagggagtgcgagcgggtgtcaggacggggtctgggagtggagggagtgtgagcgggtgttaggacgggcctgggagtggagggagtgtgagcgggtgttaggacgggcttgggagtggtgtgtgttcatgagatgttgagggttggttgttgggtcagtgtggtgagaacatcaggctggtttctgctgttgatctacatccgaggtgcactggcctgggccctgattatattgcgccctgtaagttgcttctggtaggtgagaagggtcacatggtaacactaattggttatcacaacgaacattagtgcagttggattaagcagctccaagagcttggagaatcaagatgttgcatagctgagtgacttttccccgtggatctgttgatttggtgctgcgtgtgaggcctgggctggctctgagtccctatcaggacctctgcctgtgggctctggctgggctctcctccagggcgggcaggtgggctagaattaacatggagtgtctttccccctttccttttctgtgttatattcgtgaaatgtatttacatttttctgtctttcctttgcagaacaaaactattgtgagtcgaggtatcattttctgcactcagcggacggggagggctgtgccaacatgctggtggagtattccacgtcccgcggcttccgcagcgaggtggacatgttcgtggcccaggccgtgctacagtaggtgtctgtggctcttcgggtctcggcttccattgctgccttggctgggcagccttagaacaggtccccttgtcccctgtccgagccgagctgcaggataaactgagttcactctgggcagagcccacagtgcacttgtcagcctgacccatgatttttcataagtttaaccaatgttaagaagtattttagaaactccccctttcccgacgggcactggagtgccctacacacgcccctcgcctctcgcccactgccgggaggccctgtggtctctgctgtactcaggcctgcctcggccag

SEQ ID NO: 37523 - DNA, 2300 bp, Homo sapien
ccatccaagacagcccagggccccctccccgagggcaccagctgtcccctccccaacgccaggcgttttatggcttgcatctcagcagagaaaatagcccctggtctctggtgtcgggatggggctgtctgagctggggaggggatgctggggagcagggggctttggtggtcagggctgatgggcggtgtctgcaatctgagcctctgtctggcctgttggctgctgcagggggctgtttagccccgcctggagcccacagccccctcgcgtccctgtggcgtaggtcagcagcccctgccctcagatgaccggggctcccaggccacatggccagcaggatgggatgctgtccccaagcaagtgctctctgaagtcactgaggggtcacggacaggcccacggatgctcagcagacggccccacgaccccgggaagggcccacggacactgggcagacggccccgcgacccctggaggggccacggatgctcggcagacggctcctcggcagacggccccgcgacctccggagaggcggcgcccactggggatgcttggcagacggccccgtgatcccaggagagtctgcacccactgaggacctgctcgaccctggccacgcagctgctgccaacggcgggacctgcacgcgacccaaggcctggcagacggagcccaggacacggatgctgcaagccacatgctgttggggcgggacagccagggccatagaagaagctgcatctgagtccgcaggacacagagttccagagcaggagaaaggacgggcaacgataggaaccacggacagggagcagaagtgggagcggggcctgggggggatgggaacgcccctctgagtggccacacgtgggtcactgaccgcagctcagtgacgtgaagccacacgtgtttgttctcccacagctctggcagagctccaggacgatcccacgggcccgagactcggagtgggcagagctggttctgggctcaggacgggtcctctggcctctccctggtgctcctgggctctggggccccctctggcctcagtttccacggccacgtccccttccctcctgtcctcatatctctgcctccctcccctgtgatcgtctgccacagcagcgtcctaaccacccgtgcacggtgtgttttgccatagaaggtggcgtgtccaggtgcttaggctcccagggggatgcccgggctacttttctgtggctgtgtgtggtgtgcgtgaggccacaggcggagatgagggcttgagctggactcccctcagatgagctttcctgaaaaaagaggggatggcaccacctggacccagcagctgcggacggctgagggaggagggaggaggccagcctggtcctcccgggcagcacgaggttggacccagccctgcctctgcccatggtggctctggccatgtccactcaggatggggagggtccctgggggccagtaaaggacagctggagtcccgctcatccaggccgtcctcaggctggcttgggccagggttgcagccaacagcgctggtccactgtcatatcccctcaccaaccatccaccatcaccatctgacccatgtccccccatgtcccctgtcccgtcccccgtgtcccctgtcccccatgtcccctgtccatgtcccctatgtactctgtcccccatgtcccgtccccgatgtcccgtcccccatgtccatgtcccccgtgtcccctgtccatgtcccctttcccgccccctttctcctttccctttctcctttctcctttctcctttccctttctccctttctcccttctcctttctcctttctcctttccctttctcctttccctttctccctttctcccttctcctttctcctttccctttctcctttctcctttctccctttctcctttccctttctcctttctcctttctcctttctcctttccctttctcctttctcctttctcctttctcctttccctttctccctttctcctttccctttctcctttctcctttctcctttctcctttctctttctccctttctcctttccctttctcctttctcctttccctttctcctttctcctttctcctttctcctttccctttctcctttctccctttctcctttctccctttctcctttctccctttctcctttctccctttctcctttccctttctcctttctcctttctcctttctcctttctcctttccctttctcctttctcctttctcctttccctttctcctttctccctttctcctttctccctttctc

SEQ ID NO: 37524 - DNA, 2300 bp, Homo sapien
gtgttgctcttttttttttttttttgagatggagtctcgctctgtcagccacgctggagtgctgtggcacgatctctgctcactgcaacctctgcctcccgggttcaagcgattctcctgcctcagcctcccgagtagctgggattacgggcgtgcaccaccacgcccggctaatttttgtattttcagtagagacggggtctcaccgtgttgcccaggctggtcttgaactcctgacctcgtgatctgcccacctctgcctcctgaagtgctgggatgacaggcgtgagcccccgcgcccggccggcattcctctttatggccgaggaaccctccatggtgtggctcgatcacatttagtttatctgtggttccgttcacggagctggggcttgttcccgttctcagctgtcacgaagaatgtgctgtgaacactcatgtgcatgtctctgcgtcttcgcgtctcttacggtgcagaggaatcgctggactctatggtaactctgtgtttaccgttttgaggaactgccagactgttagtcaccagagccggaggttcccaccagcagcgtgcgggggctctgatcactccacattctctccagctcactcccctgtgccactttgaccttgccatcctagtggggagaggtggtagctcattgaggttttcatctgcgttcccctgacagctaacagtgttgagtgcctttgcgtggccgagtggccatttgtgcatcttctttggagaaatgtccgatcaaatccttccccatttttaggccgaggtgggacgatggcttgagcccaggagtttgagaccagcccgggcaacagagtggaaccccacctccattaaaacaaattaaaagtatacatatgcatgtaaaagtaattttaaaaacccttacccatttttatttattttttatttttaccttcctttttttgcagagatagggtcttgctctttttcccaagctggagtgcagtggtgtaaccatagctcatagccttgacctcttgggctcaagggatcctcccgcctcggcctcccaaagtgctgggattacaggtgtgagccgctgtgtccagtggagacatggtcttgttctgccgcccaggctggagttcagtggtgcgaccatagcccactgcgacctcaaactcccaggttgaggccatcttcccacctcggcctccctagtagctgggactacaggtgtgcgccatcacacctggctaatttttttttttttttttttgagagacagggtctcactatgttgcccaggctggtcttgaactcctgggctcaaggggtcctcccacctcagcttcccaaagtgctgggactacagatgtgagcccctgtccccggctggcccttgttaattttttcaactttagaaccatttctaggtaaaaaaatataataaattctgttgctgttttttggcaattattataaaaaacatgtagactcccataaggagacatttttctacctccctgtgtctcgggtcgaggctctcgtcctcgggagcacacgccagttttcccttggagacctgggacatttctcatccagccactcaggtgatttgtcctgttgctgttggtgacaggatctctccttgtatttgagttttctatggaaaagccattggttttcgaattttaaattggtgccagcctcttgttgcttgtgatttctccagctgctcttctgggccctccctgtttactgccatgtgatcctcggagcagggtgatgtcaggggacttcagtctggctgggcctggctgcggcctcaggcgagtggtgttcaggagcttgaaggtgcaaacagcagctgccttgggggcttacagcatagcaagcagaacctctcccatgccctcggggctggcgtggggtgtggcggcccctcctgctgctcaaggctcaccatacctggctggcggcagggtcattgccagcgtccaccctcagggcctttgcgcctgccaggagcacagtgtgcgtgacagcctcctggagcacgagcctcctggaacgacagcctcctgcagcacctcccctccttcacggcgccgtttccttctccctcagcctgtttcgtaaacatgttctgggtccctgcagtgtgtccctgcagagtcccctcagagactctgtcctagccacatctgggtctctcgctcaccagcccatctccaggcccccgtgtctggcgcctgttggctctttgctaaatgtgagctggggagctgggtgaacgaggaagccctcgctc

SEQ ID NO: 37525 - DNA, 2300 bp, Homo sapien
tttgggaggcctaggcaggcggatcacgaggtcaggagatcgagagcatcctggctaacacggtgaaaccccgtctctactaaaaatacaaaaaaattagccgggcgtggtggcatgcacctgtgtcccagctgctggggaggctgaggcaggagaatggtgtgaacccgggaggcggagcttgcagtgagccgagatcgcaccactgcactccagcctgggtgacagagcaagactctgtctcaaaaaaaaaaaaaagaaaaaagaaaatacacgtcaagccaggcgtggtggctcaggcctgtaatcccagcactttcagaggctaaggcaggcagatcacgtgaagtcaggtgttcgagaccagcctgggcaacatggtgaaaccctgtctctaccaaaaaataaaaatatacctgggcatggtggcacccatttgtggtcccagctactcaggaggctgaggcaggagaatcacctgaccccaggaagcagaggttgcagtgagctaagatcgtgccactgcactccagcctgggcgatagaccaaaaccctgtctcaaaaaaaaaaaaaaaaaaaggaaaaaaagaaaagaaaagaaaagaaaatagaaaatacaagtcaggctatttctcctaatacctagtgctgagctgctgctattaatgttcgtctgtctttattaggcgacattctccaagctcatgctgtgtggtggattccgagcctggcacagggacccagagatgaaaatgccacctgtccccaccccaaagcctcccgtctgagggaggagaaagacccatgtgaacggttacagggaaagagcacgtgatgccacagggcacagatcccagagacacagaccaaaacgggctgccgcgttctgcttcaggtagacagagcttaagcagctccatgattccacgtcagctggagcagggggacaggtgcctttggtggcactctggtcagtgcagcctcagtggaggccattccacatcccataccattgccccagcgatgccactttgagagcaaatccacacaaaactcttgcaaagatgaggttgtgtagaccatgattctgatgcattcaaaacgctctaaatgcccctatgccagtgactgggtgaacaagtcatggttcagttgaactttttttgagtttgtttgtttggttttttttttttttttttttttttgaaacggagtttcactcttgttgcccaggctggagtgcaatggcgcaatctcggctcgctgcaacctctgcctgccaggttcatgcgattctcctgcctcagcctcccaagtagctgggattgcaggcatgcgccaccacgcctggctaatttctttgtatttagtagagacggggtttcaccatgttgcccaggctggtctcaaactcctgagctcaagtgatccacccgccagggtctcccaaagtgctgggattacagccgttagccaaaaccctgtctcgataaatgaataaataaatgaaaggctacaggcctcagacgttcgttctggaaggtgctgaggaatttgttaacagtggttgcctggaaggcagtggggagaggctttcctttttcagtctggtatgttccagtttgttttcagccgggtgtactgcattaaccctgcaagaagaaaatggaaagaatttgaaaagatgctggggtgtgcagaggaagggcacgcgagtctgggaagaggtgacatcaaaaccaggttttttgttacctgtcagcccccatgtgaagtcccggcggggcccctcagcctgcctgagtgggaggggtgcccagagggtcccatctgtgggtggtgggcggctgggtgggtctcagggggaggctccgtctgggccctgtgtggcctcagtgccctgggacgctggcgtttgtcacctgctggccgtccctcccaggcagggatggtgtgagcgccctggtcctggtccgtagcacaggacacgcacacctgccttccacgagcacccccatgcccatggtcttggggggctcggcaggtgccctctgcgccccccacagtaggtgtgcaggctccgtcccaccgcgcgcggcggcacgagggtcccacccaggccggccaggttttggggcggcctcgcgcccaggcaggtgggacgctgcgcgcggatggggggcgggcggcgggcgatttcccagcgggtccccggggcgcgcgggctgggggcgccggagcggccgagggaggaggccacacgctcgcctgcaccgctgggggccgcccgcgggccttg

SEQ ID NO: 37526 - DNA, 2300 bp, Homo sapien
ctcaccagggcccagcaagggggagagctggaagcctcatggggaggggacgcctgggccaggcttgaagaagggcaggccccggggtgggggctgttgggccgccttgaccaagcccttgtctgcaaacaacccctgggaagttgcaggaactggctcctaagcaacagtgggttcaggtgtcaccagggtccagagcggggggccaggcagcgaactcggtgttgctggggacccactgtgcttaccacgaaggcctggccagtgattgtgaaatgggtgggatggatgagtgagtggaggctggagcttgggccgcccatggtgctctaaacgggccagtgttcgacttcctcatggccagggcatgtgggtacaggttcagggctgggagagactccgcgggtggacgctggggtcttcactgagccctttcccacgactgctgttgccatgacaacatcgacacgcaaaggccgggccttaccgcttacagtacactttcattctgccctaggttgagctgtaactaccctccacccccattcgtatggtgaagccactaggaccttaggatgtgacctttgctttggaaataggtgccaggtgcggcggctcacgcctgtcatcccagccctttgggaggctgaagtgggcggatcacttaaggtcaggagttcgagaccagcctgggcaacatggtgaaaccccgtctctacgaaaagtacaaaaaattagccgggtgtggtggcgcatgcctgtaatcccagctactctggaggctgaggcaggagaatctcttgaactcgggaagtggaggttgcggtgagccgagatcgtaccactgcacgcccgtctaggttacaaagtgagactctgtgttgaaaaaaaatatattagcttagctgggtgtgttggtggcgcctgtaatcccagctactcgggaggctgaggcaggagaattgctttaacctgggaggtggaggttgcaatgagccaggatcgagccactgtactccagcctgggcaacaagagagagactccgttttaaaaaacaaaacaaagaaatagggttgctgctgatataattagttaagatgaagttattgggacggcccctaacccaacatgactgctatccttataaaaagaggaaatttaggttgggcatggtggctcatgcctataatcccggcatttagggaggctgaggcaggaggattgcctgagcccaggagttaaggaccagcctgggcaacatagggagactccatctctacgaaaaatagaaaaattagcctggtgtggtggtgtgtgcctgtggtcgcagctactcaggaggctggggtgagaggatcgctgagcccaggaggtcgaggctgcagtgagtcgtgatcatgccactgcactctagtctgggcaacagagcaataccctgtctcaaataaataaataaaaatagtaaatttggacatgcgcaggacaccatgggaacgtaggggccgagaccaggtggtgcttctgcaagccaaggaacctcacaggctggcggcccccagaagctgggaggctgggactgtccccagggcccccactctgcccactgcttggactccagaccccaggactgagagcacattcctgttgttgaagctgctcggtggtgtcacctggctccagcagccgcaggcagcgagtccacaggctctcctgtccctcctgtgccgccttcctccccggatgggccccgtgatgaggtctctgtgcgatggggaaaccgaggccccagcagacacctgggatgcagagacgccggcaccgctatgtgtcctcgggcaattcgctgaacctttctgggcctcggtttctcaccaattccaaaagctgattctgctaccgactgctgtgagggtcccaggggacgggaaagcccgggcagcgcccaccggggctcaggagcttgctgactccgagggggtggggccgggcctgggcaaggggtggggccgggcctgggcaaggggcggggacggggcctgctcgacgtgctcggcgctcccggggtgcctgctcggcgctccgccggccgccctgcgtacgctcgcaaggcgctcgcagactccggagtcgccaacatgtcgaccgccatgaatttcgggaccaagagcttccagccgcggcccccggacaagggcagcttcccgctggatcacttaggtgagcggcggaaggtcggcgggcaggggtctgcgatggggggtctgggtcgcggcccagcgcggagccctatggggtgccg

SEQ ID NO: 37527 - DNA, 2300 bp, Homo sapien
cagcctggccaacatggcaaaaccccatctctactaaaaatacaaaaattagctgagtgtggttgcatatgcctgtaatcccagctacccgggaggctgaggcaggaggatcacttgaacacgggcgatggaggttgcagtgagccaagatcatgccactgcactctagcctggatgacgagagtgagactccatctcaaaaaaaaaaaaaaagaaaagaaaagaaaaagaggccggcccggcattggctcatgctagtaatcccagcgcttttggaggcggccacagtaggatcgcttgagcccaggaggagttgaagaccagcctctagactccgtctctaaaagaaacttacaaaattcccagcactttgggaggccgaggcgggcggatcatgatgaggtcaagagatcgagactgtcctggccaacatggtgaaaccccgtctctactaaagatacaaaaagtagccaggtgtggtggcatgtgcctgtaatcccagctactcgggaggctgaggcaggagaatcgctccaacccgggaggcggaggttgcagtgagccgagatcacgccattgtagtccagcctggcaacagagtgagattccgtctcaaaaacaacaaaaacccaaaacttaaaaaattaggccaggtgcagtggcttacacctgcaatcccaacactttgggaggtcgaggcaggaggattgcttgaacccaggagtgtgagaccagcctgagcaacgtagcaggacctccatttctacataaataaataaataaagttagctaggctgggtggtgcatgcctgtagtcccagctatttgggaggctgaggtgggaggatggcttgagccccggaggtggaggctgcagtgagcctgtactcacagcacggtaatccagcctgggcaacagagcaagaccctgtctcaaaaacaaaacacacaaaaatcaaaagtattccctgaattaattaagtaagctttgctaggcaggtaggacccccagcctacccagtagtggccctggtatgaggcactccctccccgccgcagccgcccagccctggccctgaggctgtacagcaggatagaggtagtgagctccccaccacaggaggcgtgcaactgtgcctggggctttccctcccagctaatcaagggggaccaacccgggaggggtgagggcctcaggctgcctcggctctgcggttcgtacagggcatgggcaacgccccagagacaggctgtggggagggtcccgcctgctggcaccagctccagctgcctcatgtcagggcaggctgtgcaaagcaggcccggccgcttctgctgccagcagccctcccacccctcacagcggtttaggagacagatggacagggctcgtaaaccccgccacctgccacccggcagcccttccatgttcctgtcctagctcagagggttgcatcccctgcccgggcggcagccctcgaaaaggagcaggctgctacctggggcgagaacaccctcagggagatgcaggtggtggcctgtgaggactgtgggatttgagtcccctcatgggcctccctgaggtctcactcctgtcccttgccccgtggggagctgatcagagaagagctgggtgcacacggatggggtttgggagaggcctgcaaaccctgagctccacagggtcccactcagagcctgtgaaaggcagggggctcccctccaagccagggcctcggccccaaagccctgtgaatcccagttctgaggggtggccaaggccaaggggcctggactggcaggttcagcagaaccaggggcagaacagtccacgtgccacatccttctctctggccaggagacatggatgcctgaccccagagggcccccgtcctgccctcccctccccggccccaccagggcctcagccccacattccacgcaggcctgcagctttaagccatccgctgggggctgccctgcaaactgctcgttccacattctcggggtggtggggtgggtggggtgcgggcacgccctcccgcggaggcctataagggtgcgggggggacggggcccaggaggggagtggagcctcaccagccacgtcctcatggccctgctgctcttgctgttcctgggcctcctggggctctgggggctgctctgcgcctgcgcccaagacccctccccagctgcccggtggcccccggggcctcgcccgctgccgctcgtcgggaacctgcacttgctgcgtctgtcgcaacaggaccggtccctgatggaggtaagtcagggag

SEQ ID NO: 37528 - DNA, 2300 bp, Homo sapien
ctgaggacagagggtacggggacacggcacggggcagcctgactagcactgtcgctctgtcctcgctcaggcaggcagggtcagtgggacagggctgaccagtcaggcccgggccctgcctccggctgcccccaactgcgggctggggtgctgctggccgggctgtagccgaagacggatcagggtctctgggggccgagcctgtcaggccctcactctgtgcagactctggcctttcagaatgtgccaccccagcagacagccagcccccgaccttgccgcctggactcagggcttgagccccccaggaattttggctaaaaagaaaatcccacaacagccatgccaagcaccagatggcgagagggctctgtgggctccaggctgggcgctgccccctccaccctgcaccactggctttatggcatctaggcgtgccccctccacctgcccccattttccctctgtccccacccctacccagcacaggcccggcctgaggggacctaaggggggtcttgtgggtgagggctgcccgggtgacccccgccatccctgccagctctcagaacgctacgggccggtgttcaccgtgcacctggggcgccagaagacggtggtgctgacggggttcgaggcggtcaaagaggcgctggcgggccccgggcaggagctggccgaccggcctcccatcgccatcttccagctcatccagcgaggtggaggtcggtgtgtggccggcgctacggggcctactgggtgtgggggcacctggaccccaggaggggtgggggctccagcagcgggagaggctcccagggtggcctggggaagagcaggcaggagctgggcctccgggctggtgctgagaagggccaggtgtccacacagcaggtcaggtgctcagaaccagcaagcggggttcttttcatcccaagtcaagaggggccagggccagcccagggggacgggagtggggatgggggtgagggcccagccagtctcgctgccctgtcagcctgctcacttcctgcccacttgcctggcggggctggctggggtgggaacctgggctcaccacgcactgtatctgcctacaggcatcttcttctcatctggggcgcgctggagggctgcccgccagttcacggtgcgtgccctgcacagcctgggcgtgggccgggagccggtggctgacaagattctgcaggagctgaaatgcctctctgggcagctggatggctacagaggtgagcagggggccggggacgcccctccccgggcctggacgtgcctgaggcccgtctccctcgcaggccggcccttcccgctggccctactgggctgggctccctccaatatcaccttcgcgctcctcttcggccgccgatttgactaccgggaccccgtgtttgtgtccctgctgggtctcatcgatgaggtcatggtcctcttggggtcccctggcctgcaggtgaggagctgcctcccatccttggggtggggtggagcctggagtgatgggcgtgcagcaggaggacgggggccccagtgctgtcccctctcagcttctcggccctcccaccttgcaaaaggaatcagatgcaagggcctgaatcaggacccatccgacgttagctggtcatgtggcctcaaaccagcccctgtgctctccaggaaatgggggatccccatctcccccacgccctcatcagtaacagatgcatctgctcaagagtggaggtgggaggcaggcatggcttccccagaattgcggggggctccatgtctgccccccaagccctgacagtccaggcaccttcctgctgacgccctttacagtgccccaaaaccacaaaagttcacccctctgatgtttggaactcgtgtatttcatttagcttcaaaatgtaaagatcccctctttttggtcctcatggtatttgatgtgcgtttaccgaagcctgcatctcaggtgtgatacctgcatcacggctggacccagagaccacgggtcctagtcctcctggcttcccagaggcagggccgtgatgggagtgagtgagcagcggtgggttcacaagcgagagcagggggcacagcttccacccgtcctagccagggtgagaccaccctgcctgctggtggagccaggcaggcccagagcccacctggaagatggaggctgcacggcactgcgtggtccggggcagccccagggcagcagagcattccctggccttccctgctggtgccagctccttaccacagagacgccgcgtggaactcactactggcga

SEQ ID NO: 37529 - DNA, 2300 bp, Homo sapien
gggctagtggcccagcccgggggactgcaccccactgccaggccagcttctcccgctcctgctcttgtccttgtctcccaaagcagcccagagccaccagcacagaactacggggagaagaaacctggtccccgggctcaggtgtggaggcgggtggctgtgcgagttggtgcgttggtgaagacggcatatgagcaggattggcgcgtttatggaggtgggtggatgcgtgggtcgttgcgttcgggaagacaggtggatgcgcggagttggcgcgttcatggaggcaggtgactgtgtgggctggcgcattcatgctggggacacactggggagtcagcacacaaggccactggggctcagaaggcccagaattgagtccctcccatgaaaccggtgactgagcacacacttccttctctgaaagcggggtgcggacaccagtggcagagacactaaatcggaagcactgctgcatagccgctgcaggcagtgggcaggacatcccttcctggcctcctcgtgtccaccagctccaggaggcctccagtccacccttgcctgccccgctgccaccacagagcaggcctctgcatgggaacaggcctggagatggtgaaacagctaggaggaaaacagccagccccaggcctgactccggccttgcagatccttattcagcgggggactggggtgcccacaccatctccccaggcaggggtggcctccagagcagggccccgcgaccagagctcagtgtgtcctggaccctgacgccttgagagggagtctaagcctctcctcgccctggaaccggcccagcctccgggctcactgtgctctgggtggccagtgcggctccctcgcaccataaaattgatctgcaaggcaggcaccgtggtgcatgcttgtaatcccagtcagtgctttaggaggccaaggcaggagaatcacatgagtccaggagttccagcctcctatgccaggcaacatagtgagaccccatctctccaaaaattaaaaattaggctgggcatggtggcgcacctgtaatccccgtactttgggaggccgaggcaggaagatcacttgggcccaggagttcgtgaacagcctgggcaacgtagtgagaccctgtctctacaaaaaatttaaaaattagctggacacagtggtgcactcctgtggtcccagctactcggaaggccaaggtgggaaaatcacttgagcccaggaagttaaggctgcagtgagctacaatggtgccactgcactctggcctgggcgacagagcaagaccctatctccaaaaacaaacaagcaaaaaaactgatctgcagtcttagtcccagggcagggaactcacaagccagaagagatctagacgccctctgtgtggtgaggaaaaggctgcgtgactcatccacgtattcagccagccggtattgagcacctcccctttgctggacacgtggatgccatgggagggctaggcctctgcctgcagggcctgggcaggggagatgggggcagactgggggagatggggggacatggagtcagactggggagagatggggcagattggggagatggcagactgggaagatgggggtagactggaggagatgggggccatggagtcagattgggggagcgatagggacagatggcggcagactaggggagatggggacagactgggggagatgggtctatgggggcagattgggggagatgagaggataatggaggcagatgggggagatgagggaagtagggggacgataggggctgggtgggggcggtcagaggcaagtacgtgcagctggcaggggccctgcgcgggcgggggtgcgccctccccgcagttcgcgcaggtggaccggagacccgggcggccagagagcctcgtcggaggagcagtgggggctgcagcagggtccacccccgccttctcagcgccgaggccccgccccggctctcccacccccgcgccgaggtccagtccccgcaggcgcgctggcgtcacggtccagccggctggatctggttccagccgcgccgggccggccgggcatgcgcagtgtggaggcgctgaggctgctggaggcgcgggccgggcggtgcgcactgcgggcgcatccctgccccggcgccgtccgtgcccgcgggacctgacagccgggtcagaggtcagtgcgcggggccagggcccgcattcgggctgcagggaggggatgggaggggccctgccccagccccgccccgcggcgacaggtgggcgctcccgtgggagg

SEQ ID NO: 37530 - DNA, 2300 bp, Homo sapien
cgagtacttattgtggttcaggtggagggtggttccctctgacgatctccccaggacacacacgagctttctgccattctccctggcaggactggcctgcttggcacaggaagtctctgcagataaggcggtctgcagtgacctgaaagctcagtggctcagaggaagctaacctctagcattccccagccacagagcacccctgtgggtaggacccacagagcctggcattacagggaccagacagcacggtgcatactctgaccagggattctgaggtcttgggccatttataccatggagataacgaagcttactcttaggcgggctgctaggagggcccaaagtcccaaaccctgatctaaaaagccagaatacccctgggttcaaatcctggctccacggcctgcagtgtgacctgggctaagttgcttaagttttcacaattaaatttaaaatgcatggccgggcacagtggctcacacctgtaatcccagcactttgggaagcccaggcaggcggatcacttgaggtcaggagttcgagaccagccggaccaacatggtgaaaccccatctctactacaaaaaaaaaaaaaaaaattagctgggcatggtggcacgcacctgtaatcccagctactcaggaggctgaggctgcagtaagccaagatcgtgtcattgcactccagcctgggcaacatgacagaaactctgtctttaaaaaaaaaaaatattaaaatgcacatggtgacctatctcattgacgctaaggcgtactctcactttatcatctctaatgtgaggctgcgccttaaaatcagcagtatgtcggaatgcagtgggcagagggccttctttttagtaatccataaagtaatggcatagctaacactaatcaatcgtgtcttaggtttgatgaaatacggacgtatctacctcaaaacaatggttgaggctcagaacagaacctgacacagaatacgccctcaggtatcggtgttggctgcttgtgactgactttggcaagtaagatcagtacccggcacctctgggcacacagggcccgggctgcatccactgtgccagggacctggtgccgggctgggcagcaagtcagtatcacatcagcaggcgtgggccgtggtgagcctctccctgccctcccgctggaatagaaagctgatcccgacgtcccactccgacccacggtcaggaagccgtcctgtccaggaaggtggctgaggtacatccctgaacacagtaggccacagcatcatgcagcggagggccagtggccgctattcttcctgctggtgttccactcggcccgcagctcacagcaagtctatgcggaactgtgcaacccacatgctttgattttcagaaatgttcttagatcctgaaccagaatgtgctgcaggggggactgtttcacctcaaaaattacagcaaagtaaatgtccttgtttcaacttttccaatgtttaacttgtaacaatagctacaaaagtaatcaggcagcaatgtgtttctttaaacggctttcctgtgagtgttccgtttacaaagaaaatcctaaaaccaggaagtaattggtgactttggaaacagcaagcaaacttcggtgaagaaagaggggcaggtgtacctggaaggactaacttgcagccactcatttcctttggagggcggtggggcctgcaccctgcagattagggtatattctgactcagcaaaataggcaccagcgcctgtaaaaagaaaccgcgctgggcactaagagaattctcaaaaactcccagagccctgggtgtgtgtcctcccacagggaatctcgcacgagttcgtcaaatggctggtctcaggttacacaaccagcactgcctccaccgccaccgccccccaacctcactggtccgagcggttccccgcggtctagccgcgagggcggggccggggggcggaggccagggcgggaccaaggctgggggcggggccaggcatggctgccgctcgccggccgggggcggggccgacggtcacgtgtgtacacagggcccgggcggcgtgcgcgccgtgagccccgccgcctccgccagcccgagctgcccgcccggcggcgactgcgccggccgccgcccagcaagccggtgagtggggcccgggagcctgggtcgggtcggtggggcacaccccagtctccgcctggggagggagccagccccaagctgctgtggctcccacggcgggcgctgcgcttactgggacccgggtcctctggccgctgcccactgcggg

SEQ ID NO: 37531 - DNA, 2300 bp, Homo sapien
cactcggacgcaggtgtggcgacggcgggggaggggcgtccacagtagagcccagaaccttgcgcaggacaggaccccggctaatgtgcccggaacagctcagtgacagggagctgggttggctgtgagggtcgggcacgcgtcacgagtctcctgtgaccaggagaggtgggaacactggctcacatgactcgccaggccctggcacgctgtggttctgtgggtgccccctgcagctcccagccttcaaaatgtacacctcgctgggcatggtggctcacgtctgtaatcccagcactttgggaggccgaggtgggcggatcacctgaggtcgggagttcgagatcagcctggccaacatggagaaaccttgtctctactgaaaatacaaaattagctgggtgtggtggcagtcgcctgtaatcccagctattcgggaggctgaggcaggagaatcgcttgaacccgggaggcggaggttgcagtgagctgagatcgtgccactgcactccagcctgggcaacagagcgagactccatctcaaaaaaacaaaaacaaaaccaaaaaaccatacacttcatgctcacttctctgggagccatggctaacagcctgcaggcaggagactctcaaaccagctcctggagggcactcccagggaccctgttcctaccacgagccagagaggaggcgggtcaaggagacttgtccacccaggcgtggccgaggaaggggtttcctcacgctctgctgacctgccttccttccatgcctctcagcccagctcctgacaaaggcgggaacctgagctcctcggctttaggaacgtcccccagagcccacggagcagcccgccccagctgccttccctcccaagatctccaggtaatgcctggtaaaaggagggctccagggagaatgttggggccaacacgcaaagcgcgtcaccttccaaccggcggagagtgaaggaaaacaggtacggctcggcttgtaaccttcactggaaacagaaaccatcctcatcattgatacctggtgaactgcacagagagcaacctgcagctttggaagtttataaatccttcagtatttgtcagctgccagtaaacaaaaatgcacacaggagaactttccacctgaaccccacctggaggccggcgttcccaggtcccggctggggtgacagcacgcactcgagagccggttcagggcgagtgggacgcacgtgagcgcagggaggaaatgccagcagatcccactccacgtgaccgcctcccaagaatcgagccattcttagccctgcagacgctggctgcctccctctgacttggcctcacggcggggcaggcattagcagtccaggcagcttctctctgactccctgcaaggaggggtgcggcgggcaagaggctggccccacgcggttccacctgcaggagagccctcgcaggaggctccgtgtgtggggccggctcagcttttctctggccatgcccatgtcccttctgtgcacggagacaccagatgcacgtgctcccctctctgcttccgacctgaacctgccctcggcctccgctgtgcctctgaggactcctgtgtcctgtgggctgagtgagcatggccaggccttcgctcgacagtagacccttctgttgatttcctcacggaaaaaagggttcgtaaccaacatctcaagcacactgaacaccaggggcggctgcatggacctggacacgtgtctgcctgacctgcccccaggctctcggtgggatgccccgcagcgatgcagacaggggcctgcgggcagaggccacggcctccatgagccaggctatcagaaaggtgggacaagaggccagctgtgctcagtttgcagtgcggtcccgtccaagcacggcccctcgtttctggaacccggctgtaaacagcaggagggaggggcggtggcgcctgccaagggaggcagaggccctgcggggaacttaccagaggaaaacaagtgcttgcatcctggggccctcacacgcacgcgcaggcggccaggcgcgctgctgataagagcctgcgggtttgcagagaagcgcagcagcgcgcaggtcctcaccagagctctggtggccacctctgtcccgccatgctgctcaccgacagtggccagggcccacagcaccaagaggcttgggccacaaagtaaaggtgagagcctgtggtgcccgcaggtgggagaggggacgtggggggctctgtgcagtacaggcaggagaggggacgtgggggactctgtgcagcacaggtgg

SEQ ID NO: 37532 - DNA, 2300 bp, Homo sapien
gtgaggaagtggaacccgggctggagccggcaacgctgaaaaccagggttgtttggacggcgacatgcaactccctgagggctctgctcctgcagaatcagggggacccatgctgctgcctaccatggagggcatgggagaggactggggatgggacagggagcaggaaggggttgctcagtcagtcagtgctggcagagggaggggcgctgggaaggcactgcaggccctgtgtctggggcctctcagcacaaggactgggctttgcacgcgaggactgaagggtcaaaggcgagggccaaggtttcctacgtggcattcactcgggagggctcctgaagctggagacacactgccttactttgtgcgtgtttttctctatgcattatccagtatttggctatgtgtgcatttagctcaataagcaatgatcagatgaaattccccttgaagttctttccttttattctatcctggggatgaacagaaaaatattttcacttcttaaaaattcataacgacatcagatccaacaaggaaatcagtgcctgaaaagatgactattgacccaggacgcctctggtgtacaggccgagaccatgtgctcagagtcagccggcccctcccagatctgctcctggccagctgtgaggccgcggtgacaccacctccctgcagtcagtttctgcaaccatgagacggggagaaggacagccctgcctcacaggctctgaaggagggtgacctaagatcaagcacgcagagcaccgcacagcgcccagcatgcatgtgtacaatgtcacattctacactgaaggaggctgagacaggaggatctcttgagcccaggagttcaagaccagccttggcaatacagtgagaccttatctctacaaaaaaattaaaaaaaaaaaaaaaattagcggctcgcatctgtagtcccagctactcaggggccggggtgggaggatggcttgagcctgggaggtggaggctgcagtgagctgagatcaggccactgcacactggcctgggcaacagagcaaaatcctgtctcaaaaaaaaaaaaagatttaaaaatcggcaaaaggtctctatgccttacaaatagtccacgagattcctgccatgccgtcacacatcaagtattaagtaggtcttggagacggaagttcctgcagtccgggccctgtctcttacatcagtagctgtacagtacaagttacttacccgcccagtgcccacaggagaaggctgcgctccaagacccagatgccccgatccgctgactctatgctgcaagcaggaaatctaggagtatcggccactcgcccgcccagggcaggctccccaggaaacccagggcacgtgagtggagagcttgggagctgagctcttcctcagccgctgggatgggcagagagaccagaagccatgggtttgcactagcagggtgcagctatttttaagtgacatgtctcagctatttcaaggtttgaatttttattttacttatttttttctgtactttctcatgactcacatctttcaaaattgtgtctcaggcatttttaatgctgaaatcatctcaacttcacagctggtcaaaaaatgtctaagagcaaatcagctctttatcatccaaatacaaaaaggtacatattagagttgtcaactttctactgctggaagaaaactccacgttagtatttttccattaaaaaattaacacagcattctgtttaggaaatgtgtgtatatttcctaaaatacacatctgaaagactttaaattgctattgcacagatgccttgagccccagcaggtcccgaggggccgagtgcccctggaggcccagcaccccactcttgcacctgcaccagctctcctggcggggagcaggtcccgaggggccgagtgcacctggaggcccagcaccccagtcctctgcctgcaccagctctcctgggggggagggggaaggggggagcccacgcaggtctctgaaccacgcctcaggctgcagcagccgcattactcatactcagcggacaaaggatcactcagcattcaatctcaccacttcaaaacattacagagggaaaacgacacctagaagtaggagtgagattcgctgaagttcccttctgaggaagacccacccctccgcctggagagccggggctggcggtgcctgaggaccccttcggcctggacagcccacgcgggcttggggggcctcgctctgccctcatggggcggccatcggttcccgaagcggcgagtgaaaattcaaatgg

SEQ ID NO: 37533 - DNA, 2300 bp, Homo sapien
agacccagatgccccgatccgctgactctatgctgcaagcaggaaatctaggagtatcggccactcgcccgcccagggcaggctccccaggaaacccagggcacgtgagtggagagcttgggagctgagctcttcctcagccgctgggatgggcagagagaccagaagccatgggtttgcactagcagggtgcagctatttttaagtgacatgtctcagctatttcaaggtttgaatttttattttacttatttttttctgtactttctcatgactcacatctttcaaaattgtgtctcaggcatttttaatgctgaaatcatctcaacttcacagctggtcaaaaaatgtctaagagcaaatcagctctttatcatccaaatacaaaaaggtacatattagagttgtcaactttctactgctggaagaaaactccacgttagtatttttccattaaaaaattaacacagcattctgtttaggaaatgtgtgtatatttcctaaaatacacatctgaaagactttaaattgctattgcacagatgccttgagccccagcaggtcccgaggggccgagtgcccctggaggcccagcaccccactcttgcacctgcaccagctctcctggcggggagcaggtcccgaggggccgagtgcacctggaggcccagcaccccagtcctctgcctgcaccagctctcctgggggggagggggaaggggggagcccacgcaggtctctgaaccacgcctcaggctgcagcagccgcattactcatactcagcggacaaaggatcactcagcattcaatctcaccacttcaaaacattacagagggaaaacgacacctagaagtaggagtgagattcgctgaagttcccttctgaggaagacccacccctccgcctggagagccggggctggcggtgcctgaggaccccttcggcctggacagcccacgcgggcttggggggcctcgctctgccctcatggggcggccatcggttcccgaagcggcgagtgaaaattcaaatggccagtagggggcgcactcggaagtggccgccccgcatgaggcagttcagcggccccgagagtccggggagggaggtttattctccgcctgcacgagactgtgaaatccgcaaccatgagcaggagaggcggccctggtggggaagaggccaccaacatctggacggcaggtaagttccgacgcttctgcagcgagcgcgggaggagggacctgaggcaccgctaacactcagagaaaactaccggctgagggtccctggtctgaatgcttgggaccggaagagtttcggagttcagatttttgcagattttggaatatctgcaggtacagaatgagaaagctaaatacgaaattcatttgtgtttcatacacaccttatacacactgcctgaaggcaactttataaaaacacttttaacaatttcatgcataaaacaaactttgaactgcctggactgcagcccgccacacgaggtcaggtgtggaattttccacttgtgtcacgacgctccaacagtgtcggactgtggggcactctggatttcagatttccagatgcttaaccagtactcagattcctaagttacttgtcagaaatgcctatttcttgggattacacttctctctgcaaatgtctgtgaaattcctgttaaattctttatggatcatgcacatgctactaagttaattatgaaatttagtgtttaacgcaggtcagttgcaaaaacaagaatattgcttgcttcaacccaggaggacaggttattgcctaaaagatacacaacacctagtatgatgccttcaaacttaaagaaaggtttgtatctgtgggtgaagaaaagcagttaaaccagaaacttccacaaaaacaagtctagtagaactgagctgattgccaaagtgtgggagaaaaagggccagcaaaaaaatggttaacactagccttctgaggaggccgcccagagcctggccagagaggagccagagaggagcggggcggagggggcctataaagccctgtgccaaggggcagactcactggctcagagggaggacgcacccgccagccagccgggaaccttccctcgcgggctcccagggcgggtctcttcctctctctagccctgctcaggcattcggcaggtccagcagaggtacacctcctgcagcgggttccaagtgcacctccagcctgatgggcctgaccaaggaggcttccaggagcacagaaggggctgcaacccaggtaggactcagcctcggc

SEQ ID NO: 37534 - DNA, 2300 bp, Homo sapien
cctgcctcagcctcccgagtagctgggactacaggcgcacaccactatgcccagctactttttttgtctttttttagtagagacagggtttcgccatgttacccaggctggtctcgaactcctgaacttgagcaatcctcccacctcatcttcctgaagtgctgggattataggccagccttttttttttttttttttttaagtaagtattttcaagcaataggtcaacaaatctctagtctggttttgcagcacttcaaaacaataacccctggcccggcgcggtggatcacacctgtaatcccagcaccgtgggaggccaaggcgggcagatcactacaggtcagaagttcgatacaagcctgggcaacatggtaaaaccccatctctactaaaaatataaaacattagccaggcgtggtggtgcacacctataatcccagatactcaggaggctgaggcaggagaaccactctaacccgggaggcggcagttgcagtgagccgagattgtgccactgcactccaacctgggtgaccaaaaaaaaaaaacattcaaaacaataactcctaatgatttcaaaaggtaaaatgaaaattcccaaaggaaaaacaactcaaacccattttgaagtgttagtttactccagggcaccagcaccatctgggccaggtaattctctgctgggcttgggcacctgtcctaggcactgtagggagctgagcggcagccctggccccaccagcacccccctgtgactgcccccgcatccccagagactgccagtgtctgcaggctgagacccccgtggcccgctgcatagagaacttccaggagcacagtgacacggggcaggtgacgggaccctccccactggcggcagagccggggtgacacggggcaggtgacaggacctccccactcgcagcagggccagggtgacacggggtgggtgatgggaccctccccactggcggcagagccggggtgacacagggcaggtgatgggaccctacccactggcggcagagccggggtgacacggggcgggtgacgggacctctccactggcggcagagccagggtgacacggggtgggtgacgggaccctccccactggcggcagagcccgggcaccgccgtgggcggacagcccacttctccctctctgcagaggataagctcgggagggactctctccctggagtttcttcctaggttacaaacagcattgcaaaaacatattaggttttacaataatttgttaaaacatgaaataaaaacgtacatattatttcccaaaacaatgacccctttcactctatattacgaaaataagtttatttttggtacctagaacacagaactagcatgaggaaaccgctgaacttctgttttatcgtaagagaagattctgctctgatgtccagctttctggacccactctctctctctcagaaacactggctttcccttcctatcttacttctccatcagctgctgaaatgcattttcccctctcctcacaaatgccgttgtcctggggcggccgtgcccataccttcattgcttcctgggcctgctctgtggctataaagggaaaaacacccctgcctgtgggagtgactcacgtccagcctccagctgcagctgagcagccgtgggacctgcaggaaagaaggccatgtacttcccacaggcgactcttccacctcagctcaaccacagccacctcccgagctcataaagctgaggttctggccctccccagtgctcctgacacacccagactctacagacacccggccaggggagccaggccttgtcccaaagctggggccactcgatgagacttcatcctctcctgttgcttctccaggtacccagagagtgagcagctccacgcgggactgtgcacggtggccgacacccgcagggacgcccgccggacgagcacgcggagggccctcgcctccacggatgcaccatgccggtgtgaggagcatctgttcttcccactctctgcagttaacaaacccaacccaaaccaccacaggtgctcctcctggggagtttcctgtctgacaaatgccaggctcacttcaaggagaatcacgcttctttctaaagatggattcaccatttaaaacagagctctgggagcctttcggcaaatcttgaaagctgcacggtgcagagacatggatgtgacttcccaagcccggggcgtgggcctggagatgtacccaggcaccgcgcagcctgcggcccccaacaccacctcccccgagctcaacctg

SEQ ID NO: 37535 - DNA, 2300 bp, Homo sapien
tgcagcctccatcttccaggctcaagcaatccttccacctcagcctcctaagtagctgggactatatgcgtgcaccaccacacccagctaattttctatttttatttttgtagacatgaggtcttactgtttgcccaggctggtcttgaactcctggtgtccatccatcctcctgactcagcctcccaaagagctgggattacaggcctgagtcactgcacctggccatgattcactttttttttttttttttttttgagctggagtcttgctctgtcgcccaggctggagtgcagtggcgcggtctcagctcattgcaacctctgcctcccgggttcaataggttctgatgcctcagcctcctgagtagctgggattataggtacatgccaccatgcctggctaatttttgtatttttagtagagatggagttttgccacgttggccaggctggtgttgaactcctgacttcaagtgatccatccacctcagcctcccaaagtgctgggattacaggtgtgagccaccgcacccggccgacttctaatgaacagaatatggcaaaagcctagggaagtcacttctgagattagggtgcaaggagactgtgatgtgcgtcttgtgtgtgcctcctcttgtgtgtgcttgcaccgtctaaggcaagccagctgcagtgttgtgagcttccttgtggtaaggcccatgtaccaaggaactgagggtggcctttgggcagcagccagcaaggctgaggcccttctctaatgaccttggaggactgagtccttacaatatccgtgtgtgtgagcttgggagtggatcattccagataagctttccgatgaaaccacaaccctggggggacaccttgaccacaacttggtgaacccttgaggcaaaggcacagagcttagccacgcccactttcctgaccgcggataccatgaaaaaataaatgttcttttaggctgctaaatgttgggttaatttgttatgcagaaaaaggaaccaaatacaatcttctaccagtaaggaagagtgcaccttctttgcttgtcacctttggattcctgaggcaacgtacatcatacttgatacggctgccaagcacttaacttactgggtgacttgaaagcatgcttttttttcttttttttttttagacggggtctggctctgttgcccaggctggagtgcagtgccttgatcatagctcactgcagcctccatctcccaggctccagcgatcctcccacctcagcgtccagagtatcaggaactacaggcacgtgccaccatacccggctaatttttatttttttaatttattttttattttttaaaacagagtctcattctgtcgcccaggctggagtgcagtggcacgatctcggctcactgcaacctccacctcccgggcttaaacgattttcctgcctcagcctcccgagtagctgggattacaggcacctgccaccacgcctggctaatttttgtatttttagcagagacggggttacggggtttcgtcatgttggccaggcgggtctcgaactcctgagctcaagcgatccgcccgcctgggcctcccaaaatgctgggatcacaggcgtgagtcaccgctcccggacacaagcattattataacactacccaccctgtgtattttttagcacctatcctgattttttaaattcagcacgaagtttaagtcctagccctgttgatcccaatagccgtagctcatccatttcgactccgagccgagctccataccctggaccctcggcggaggccccaccccgggacgccagcccggccggggcagcttgcaccccagacccccaagccctgcggggcccaaacctagtcatctgcacttgttctgggcagggcgggttgccttggcaaccagctcctctccaagcaactctaggcctctagagatggcgtcagtagcccgcgcccggtcctggaaccgccccccgtgctgccgccgcttgccattagccggcggagagacggacgcagacctcgtccaatgggaggctccgcactcctgaaggcgggactaacgcttacctggggcgcgggtccctgccggaaggcggcgtccgcgacgcagctgttcacgcttaggtgggcgacgtgggcgcaggtgggcgcaggtaggcgcgtggggcggcggcggggtggccggcgggtcagggcgccaggagacccagagccccggggcgggctcccgcggggctccgccccctccacgtgggtgcgcggaggcccggcgcggcgcgaccgg

SEQ ID NO: 37536 - DNA, 2300 bp, Homo sapien
aaaaaatctctctaacagcattcaactaatatctcggcctaaatactctcctctttcctttattcaccttgtataataaactgtgattataagtttttaatatcatttcagcaaaatgaagtaaatcaacatttatctgcaaaaacttcatatgcatccacgcagaaaagtcagactagtttctctgtcaccgggttccccagaacacaatgatcctctcaacacatctgcaatattgaaggccaggcaccatggctcacgcctataagcccagtacttcgggaggccaaggtagaaaggtcacttgaggccaggagttcgagaccagcctgggcaacgtagtgagaccctatctctataaaaaaatatatatttttaaattagctgggcatggtggtgcacacctgtagtcctagctactcgggaggctgaggtaggagcttcactcacgcctgggagttcaaggctacagtgaaccatgaatgcaccactgcactccagcctaggtgacagagcaagaccctgtctccaaagaaatacagacatttacaatactgagcggatgtcaaagatcctcattcttaagctcagcatttggaaaactacagcaatttcagccgctgacctattttaggaactcatctctgagctgatcattcaagtgcagtcttaggcttactgcaaagaatacatctggaaggttaatgaagagtacattaaaaaatatccccgatcccttttaactttgttaacctggagaaactgagttaggattgatgggctggttatatccgtccttcctgtgacgctggacctaatttctcaccaggaataccggacgctgtcaaccctcactctgacttaaaaggccttttggggacatcttgtgaaaatgttttgatactgcagcccgtacaccagaaagggaagtagcagccaggctcccaggctcctgtccaagatgccaggcaccaggggtgacggcacggccctgggccctgcacagataaaacagtgatgccagccaaagcccaactcaggcaaaggagagcccccgaggcagggggcgaggacacttcccgagacgcgcttcccctgctgtaggcaggtggggtgacgcgagatgccaggcgcgggactgtgagcctgtccaacccagccagagaaaacgttcagcatctgcaaacatctgctcccgcggccgcaccagcccaggtccaaatctgcttttgaaaaggcagagcctcggccgggcgcagtcgctcacacctgtatcccagcactttgggaggctgaggcgggtggaccacctgaggtcagcagttcgagaccaacctgaccaacatggcaaaaccccgtctctactaaaaaatacaaaaattagccgggcgcgatcgcgggcgcctgtgatcccagctacttgggagggggaggctgagacatgagaatagcttgaactcaggaggcggaggttgcagtgagctgagatcgtgccactgcactccagcctgggcaacagagtgagactccatctcagaaaaaaaaaaggcagggccagtgacctccacggttgactctgacactccagccggcagggccacggccgactcgcccgctctcagtggcactctggggacaccttcatttccatcaggtaggctttgggttccatcaactttttttttttgagaagggtctcgctctgtcatccagactggagtgcagtggcacagtcatggttcactgcagccttgagggcctgggctcaagcgatcctcccacctctgtctcccgagttggtgggactccaggcacgcaccaccacacctggctaatttttgtattttttgtagagacagggttttgccacgtggcccaggctggtcttgaacttctgggttcaagtgatccacccgccttggcccccccaaagttttggtcttacaggcctgagccaccacacctggcctcactcttaagtttttttttttttttttttttttttttttttttttaattaatttattttttttttattgatcattcttgggtgtttctcgcagagggggatttggcagggtcataggacaatagtggagggaaggtcagcagataaacaagtgaacaaaggtctctggttttcctaggcagaggaccctgcggccttggccttccgcagtgtttgtgtccctgggtacttaagattagggagtggtgatgactcttaacgagcatgctgccttcaagcatctgtttaacaaagcacatcttgcaccgcccttaatccatttaaccctgag

SEQ ID NO: 37537 - DNA, 2300 bp, Homo sapien
accaggtgtccgccattcgtagtcaaccccattaagagacacggactccttcacaggccttttaattcctagtctatgaagcactccttgaactcgggtttctatttaaactcacactgagggggcgagagctaattcacacagctgccagtgatgattacgactttggtgaattttaagtcacaattttatccatggaatatacttgttcacataaacaaaactctgttactaggtgctaaatcacatcagttgactccattatccagagaagatttaactctgtccctcgcctctctcttcaactcccttaggcattgaatcttactgtgaacttattcctcgatgacatcaacctggagttgatcagggagaagcgcaagctgttaagtcactatggaaaacaggcagacagctggtgaaactaccgcactcgagagagaatcaaggggctcacgaggtcccctccatgatctagtacccaccagccctcccggggccttttcctggggctcacgaggtcccgtcatctagtactcaccagcccctcccggggccttttcctgaccttcccatcagctctctccccactcctggaggcctcctagactgtcgcctaagactggaacactctcgcccatggcaaacgtctagttatcccctcccgcctcagtttaaagccattcccaccctccccagttccctctatgttacacgcccgctacttaaggtgcccattagtcctttcccagccctccttcgcccacagcttccaactacagatccgctgctttactattagctcccggtgcccgacacacagcaggcgttccgaaattgttttgttcaaggaattcacaagagtttgatgtgaatccccaaatgattttgttctggacgcacagcacccgtcctaggaaaccaacaccctaccctggcgggccgggcccgcagcaagaaaacacacatctacgtggctgtcactcggctggcgggttaacgaccccgtgcgacccggtactacggccccgatggcaggcccggcccccagcagacagccggactcccagcagacaggccggacccccagcagccagaccccggcaggcccggtccccagcagacagccggacccccaacagccagaccccggcaggcccggtccccagcagacaggccggacccccaacagccagaccccggcaggcccggtccccagcagacaggccggacccccagcagccagaccccggcaggcccggtccccagcagacaggccggacccccagcagccagaccccggcaggcccggtccccagcagacagccggacccccaacagccagaccccggcaggcccggtccccagcagacaggccggacccccagcagccagaccccggcaggcccggtccccagcagacaggccggacccccagcagcctgacctccagcaagcagccggactttcagcagccgcactcctagcagacaggccgaacccccgagcaacctgacctcaaggcaggcccgacccccggcagaccctgtctgcgcaatcccggccccgtacctggctctcgtcggggacccaggcagctgaggtgagcagcagatggaagagacgtaaactcaggtgtcctcctccgtagtcggctccgggtagctaagcagaaagaacctcgacactggcaccgagacgccgtcggaggcacacccacacccacaccggaacgcaacatctcgctgcccgcggcctacggggatttatccgcagcccccggatctgagagccgtctgggccttggggtttccgggcgcgccccgacaacgtcacccgcagaccggccaatcccgccaggccgcggcccagtggcgccggcgcacaccgaagacgacaccagccatccggccaatcccgccccgccgcgccccgcaggcccgcccactcctcgcttctccacttcccttctcgaagtgtccggtcgcttctcgcaggcggcgcgcttgctgggtcacagtgaggcggctccgcgcaggcgcagccgggcgggcgaggagcggggaagctgactcagggctgcggccggggtcctgcggggtaggagcgcgaggccggcctgagggaggaggcctagcgacccatccggcgcctcccgccccgggcacccgcccgcggccgcgcatcctgcgggccccaggaggcctccatctcaaaacaacgtgtttttaggtaatttcaaacttagggaaaagcttcaagaataataccgaaaatgtcagtgtccccagcacctagat

SEQ ID NO: 37538 - DNA, 2300 bp, Homo sapien
agggatcacctgaggtcaggagttcaagaccagcctgggctacatagcaaaaccccgtatctacaaaaaatacaaaaattagccaggcatgatggcgcatgcctgtagctcccgctactcaggagcctgaggaagaaggatggcttgagcctgggaggtggaggctgcagtgagctgtgatcatcccagtgcccttcagcctgagccacagaggaagacactgtctaaagaaaaacaacaagctgggcgcagtggctcacgcctgtaatgccagtactttgggaggccgaggcaggcagatcacctgaggttgggagtttgagaccagcctgaccaatatggagaaacccccgtctctactaaaaatacaaaattagccgggcctggtggtgcatgcctgtaatcccagctacttgggagactgaggcaggagaatcgcttgaacccaggaggtggtggttccggtgagccgagatcacaccactgcactccagcctgggcaacaagagtgaaactccatctcaaaacaacaaacaaaaaacaaaacaagaaaaagcatgcctggttgtgtctgtccttacctgattgggcatggtctctattgattaggcgaccatctggtctggttggcacgacgctttttgggtttgaggaagggtctgctctgctgcccaggctctagtgcagggcgcattcacagctgacttatgcctccacctcccaagaggctgggactgcaggtgcatgccaccatgctgcgttcatttcttatttttgtagagacagggtttcgtcatgttcaccaggctggtcttgaactcctgtcaggcctctgagcccaagctaagccatcatatccccagtgacctgcatgtatacatccagatggcctgaagcaactgaagatccacaaaagaagtgaaaacagccttaactgatgacattccacccttgtaatttgtttctgccccatcctaactgatcaatgtactttgtaatctcctctacccttaagaaggttctttgtaattctccccacccttgagaatgtaccttatgagatccaccacctgcctgcaaaacattgctcctaactccaccgtctatcccaaaacctgtaagaactaatgataatcccatcgccctttgctgactctcttttccgactcagccgggctgcacccgggtgaaataaacagccttgttgctcacacaaagcctgtttggtggtctcttcacacagacatgtgagacactaacctcaggccatcctcccacctcggcctcccaaagtgccgggattacaggcctgagccaccgtgcaccgtccggctaatattttatttctgcagagatggggtctcgctatgttgcccaggctggtctccatgtcctgggcccacgccctcctcctgcccagctgggcggggtcttacccaggcggagccccttacgtgcagggcgttctgtgcagtgaccgcggccctgggcagagccaaccccacgcggccacataaccgtccagggggcggggggcagcgcggtgaaatggaaaaggatttaactgggggatctaggtgctggggacactgacattttcggtattattcttgaagcttttccctaagtttgaaattacctaaaaacacgttgttttgagatggaggcctcctggggcccgcaggatgcgcggccgcgggcgggtgcccggggcgggaggcgccggatgggtcgctaggcctcctccctcaggccggcctcgcgctcctaccccgcaggaccccggccgcagccctgagtcagcttccccgctcctcgcccgcccggctgcgcctgcgcggagccgcctcactgtgacccagcaagcgcgccgcctgcgagaagcgaccggacacttcgagaagggaagtggagaagcgaggagtgggcgggcctgcggggcgcggcggggcgggattggccggatggctggtgtcgtcttcggtgtgcgccggcgccactgggccgcggcctggcgggattggccggtctgcgggtgacgttgtcggggcgcgcccggaaaccccaaggcccagacggctctcagatccgggggctgcggataaatccccgtaggccgcgggcagcgagatgttgcgttccggtgtgggtgtgggtgtgcctccgacggcgtctcggtgccagtgtcgaggttctttctgcttagctacccggagccgactacggaggaggacacctgagtttacgtctcttccatctgctgctcacctcagctgcctgggtccccgacgagagccagg

SEQ ID NO: 37539 - DNA, 2300 bp, Homo sapien
cacccagcccaccccatccgcacgtcctgcaggtgcctgcagcccagccctgcagcgtcccgctcagctcggtctggcagttacatcctgtggctagcagtggcctggcttggccgtggtctgtggggcctcctgttctcccgtggtgttttgcgcttcctgcctgtcgctttgacaacgtcgcgctgttgctgtggcaccctgtgtcaccacataccggagatggtgccctatgccccgtcccccctgtggtgtcccggtgacggtgccctatgccccgtcccctccgctggtgtcccagtatgccctgtccccctggtggtgtccaggtgagagcgccctgtgctccgtcccccccggtggtggtctggtgacgatgccctatgacctgagggctctggtgcctcctaggctgggagctcttcctgggggctccctggaccacacagtcctgttttatggcctcacgtgttttcgggaacagggagcgagctttcttctaggcaactggctgtcacccaccaggggttagccccctgggtgatcatggccaggctgggcaggacgtgggcttagggcttgtgaggccaaccctgtgccagctgggaggcccagggcactgggatggccaggctacgcagtgagctgtcagctgtgccaggacagaccccaggctcctggcggccctgctttgatgcacggctctgtctcccaacctgggggcagccgagtccccccgcctcgccccactgcaggaaactggctgtccctgccacctgggtgtgtgtagaaaaaagctagaggttcccatggctttatcgagctgggctcagggaacaagctgggctgcaaagggtttttccagatccttctctttggctgagttctcattgttaaagccacgcgctggatcctgcaggacccaggagccaagaaagcctgcagacgggcagccgtggctcaggtgttccccttgcacaggtggacagaggatcagggtccacggggctcaccctgccacgtccccacccattcggcagaaggggaagttgaggcccagaggcagggagagcttcccccagggacacacagcacaggagagccagctgggagcccctcccctgactccctgcccggtgctcctgatgccccccggccggctggctgtgggggtgtctgagggtggagtggctatgggaagatggcagggggaggcacagccacccttgcagacaccccattcccagcactccttcctcacacccagaccccttgcctcccacccagacatgagcaccagcctccaggaaggccaggaggacgggccggcaggatggagagcgaatctgaagcccgtggacaggagaagcccagctgagaggttagggatgggtggggctggcccagggcctggtacaccataggtgcttaataaatgcagtgagtatgtaatcgaccgattgacacgcctatccagggatagacgcacctccctgtgagtagcagaggccaggtcacccctgcctgagggacatgggggccgctgtccctggtttgggggcagcgttgcgtgtctcacctgggcatggcagcacccgtgtgggttcacgcaccatgcctgcagctggggtggagtctccccatgtgtgggtcccgtggggcccggagctcacgcctggaatctgcttcgcaccacggcaggtagcgatggacacgtgtgtttgcaggagggtcccagcaggtgtagtcagtgggctgggaggtggcatttgctcagaaggccacctgctccctccggctggtctgcatatggcctgggagcccctccaggtgggccaggccctggggctggtggttcgggttccgacctcatgccttctgcccaggactctgaagcccaaggaaccacgggccctggcagagccgagggcgggggaggcccccaggaaggtctcaggcagctttgctgggagtgtccacatcaccctgacccccgtgaggcctgacaggaccccacgcccagccagcccaggacccagcctcccaggtactcctggacgggacccaggggcccccgggttgcctagctggccctcccccttgggtgggggccccgggactggacctgtagtgccacctcctggggtgtgcggagaggcgctccggtcagccagagaagctggtagtcctgggcaggcttgtgtgtacatgtgtgcatgtgtgtgatgcatgtgtgcatgtgttcatgtatgtgatgcctgtatccatgcgtgatgcatgtgtgcgcatgtgtacatctg

SEQ ID NO: 37540 - DNA, 2300 bp, Homo sapien
tctcttctaaggacatggttgttggactagggtccaccctaacccagcgtgagtgcatcttaacatgatcataactgccaagatggtttacagataaggtcacactctgagcttcccagtggacatgacttttaggggtcaccattcgaccaagtacagtcacttagcgagtaagaatgcttgtcgcagcctggctgacaacgccgtttcctgccccgtatcgtggggtgcaggcgtcccctgctcagaactgcctcctgcccccgcagtggtcagcagggggtgctcagagcctccggggtggtcacagacaggagaagagcgagttcgctctgctcctcctggcactggggggtgtccagggcatcctagggactgaggatgagtggcgggggtgctccagggagtgcttcctaggtggtggggcggggggcatgtgtggctggggaggaccccagctcctctggggaagctggcctggcacacctgagcccagtgtaaagggaaaggggggagggaaactggttgtcgaggggggtggggacatggaggcactggctcgggggtggggaggcacctggtgcccccacctcaggctctggcagcctcactcctggtgtgtgcctgagggaaggcaggaaggcacggaggccttgtgtctggccctgtgtctgtgtgtctggcggggccagagagactgtgtcacatgggactgaacctggcagcccaggccggcccagcctctgacaaagccccaggtgcctccagcctgggtgggtggtgtgtttagggggtggatattttaatctcagccaacactggatttcacaggggaggagaatcaaccacagcatatgctcatgccagaaacaggtgtctgtggcctgtgccttgccagggtggtcattgggagcgagctgcagggaggcagaggggcagcctggtgcaatggtgggggaggcggaggggtggcctggcgcaatggtgggggaggtggagggtggcctggggtgatggtgggagtccgtccggaggctgggcattgggagtgagctgcagggaggcagaggggcggcctcgggtgatggtgggagggcgcctggatccagctgtgcctgatgcctgcgcttttacttataggccctccccagccactgccgctgttcccagttctcagcccaaaactgaagcaccacaagcaagtcccttagccaagccgttacagtcctcgtctccccgggtgcttggcctcccttcgaggatggaaccgccagccccgctgagcacgagcagtacctctcaggcatccgcgttgcccccggcaggcaggaggaacttggcggaatcctcaggggtcggcagggtgggtgctggctccaggccgaagccagaggccccgatggcaaagggtaaaagcaccaccttaacgcagggtgagtaaggggctgggaggcaggaggccccgggggcccgcagctctgggactctcccctggccgcactctgcagtgtgtgcggtttcatcatcagccccgcccgccttcctctccgtctcatctctgtcctccgtgacacctgctcgcagcctcctggggtcctggtgcgctctctgtgtggtggctgcaaatgtcctcagggctatgctgtttgccggcacccagcccaccccatccgcacgtcctgcaggtgcctgcagcccagccctgcagcgtcccgctcagctcggtctggcagttacatcctgtggctagcagtggcctggcttggccgtggtctgtggggcctcctgttctcccgtggtgttttgcgcttcctgcctgtcgctttgacaacgtcgcgctgttgctgtggcaccctgtgtcaccacataccggagatggtgccctatgccccgtcccccctgtggtgtcccggtgacggtgccctatgccccgtcccctccgctggtgtcccagtatgccctgtccccctggtggtgtccaggtgagagcgccctgtgctccgtcccccccggtggtggtctggtgacgatgccctatgacctgagggctctggtgcctcctaggctgggagctcttcctgggggctccctggaccacacagtcctgttttatggcctcacgtgttttcgggaacagggagcgagctttcttctaggcaactggctgtcacccaccaggggttagccccctgggtgatcatggccaggctgggcaggacgtgggcttagggcttgtgaggccaaccctgtgccagctgggaggcccagggcactgggatggccaggctacgcagtgagct

SEQ ID NO: 37541 - DNA, 2300 bp, Homo sapien
gtgtggccttggggactgcacttcccccagcctgtttccttctctggggaatggggaggaggagccagggtggcagtgcctgtggtcagggtggtggaagccgggtccttatggaaaagctgctgtccgcatgtgctcggggcgtcatgggtgcggtggcgctgccgctccggggccccctgtgctgcactcccttggaacccaagggtcctacgcccatttcatggacgcggggacaggtcgcgagcgggacccacgctggcgggtctgagtggacgcggggacaggccgcgagcgggacccacgctggcgggtctgagtggacgcggggacaggtcgcgagcgggacccacgctggcgggtctgagtggacgcggggacaggtcgcgagcgggacccacgctggcgggtctgagtggacgcggggacaggtcgcgagcgggacccacgctggcgggtctgagtggacgcggggacaggtcgcgagcgggacccacgctggcgggtctgagtggacgcggggacaggtcgcgagcgggacccacgctggctgggctgagcatcaccttgtctgactgagtccagccaggccctgaccttccatgcctgggcccggcgcctgcctgtgcctggaccctgagcagatgacgtggacgggtagaggggggcgctgcatcagtttccaaagaccccctcactgggcggcttacacagtagaaatccaccccctcacagctctgcaggccagaagtctgaccttgaggcgggggaagggccgcgtccccttgcagggcactaggggtggacctgtccttgtctcttccagctcccagcggctctgagcgttcttggcttgtggtcgcctccctccagtctctgcctccgtttccatgtggccttctctctgtctgtcttctcctcttctgtctcttctaaggacatggttgttggactagggtccaccctaacccagcgtgagtgcatcttaacatgatcataactgccaagatggtttacagataaggtcacactctgagcttcccagtggacatgacttttaggggtcaccattcgaccaagtacagtcacttagcgagtaagaatgcttgtcgcagcctggctgacaacgccgtttcctgccccgtatcgtggggtgcaggcgtcccctgctcagaactgcctcctgcccccgcagtggtcagcagggggtgctcagagcctccggggtggtcacagacaggagaagagcgagttcgctctgctcctcctggcactggggggtgtccagggcatcctagggactgaggatgagtggcgggggtgctccagggagtgcttcctaggtggtggggcggggggcatgtgtggctggggaggaccccagctcctctggggaagctggcctggcacacctgagcccagtgtaaagggaaaggggggagggaaactggttgtcgaggggggtggggacatggaggcactggctcgggggtggggaggcacctggtgcccccacctcaggctctggcagcctcactcctggtgtgtgcctgagggaaggcaggaaggcacggaggccttgtgtctggccctgtgtctgtgtgtctggcggggccagagagactgtgtcacatgggactgaacctggcagcccaggccggcccagcctctgacaaagccccaggtgcctccagcctgggtgggtggtgtgtttagggggtggatattttaatctcagccaacactggatttcacaggggaggagaatcaaccacagcatatgctcatgccagaaacaggtgtctgtggcctgtgccttgccagggtggtcattgggagcgagctgcagggaggcagaggggcagcctggtgcaatggtgggggaggcggaggggtggcctggcgcaatggtgggggaggtggagggtggcctggggtgatggtgggagtccgtccggaggctgggcattgggagtgagctgcagggaggcagaggggcggcctcgggtgatggtgggagggcgcctggatccagctgtgcctgatgcctgcgcttttacttataggccctccccagccactgccgctgttcccagttctcagcccaaaactgaagcaccacaagcaagtcccttagccaagccgttacagtcctcgtctccccgggtgcttggcctcccttcgaggatggaaccgccagccccgctgagcacgagcagtacctctcaggcatccgcgttgcccccggcaggcaggaggaacttggcggaatcctcaggggtcggcagggtgggtgctgg

SEQ ID NO: 37542 - DNA, 2300 bp, Homo sapien
ttattcgaaggacagcctgggaggctcccggcaggggaagggcttggtcaggccttctagaaagatccctcgggctgctggggagggtggactgtggtggctggaggggcaggaggcagccctgtgggcagaggcggggggacaggtcgtctggatgggagggtggcagccgtgggcagtggggagaaaggaccatttgtttgggggtgtcctggctcctggcttcggggaccctggagggacatggtgtgtgaggtgctggtgggcaaacgtcacaaatgctgcctcccagctcactggtgccagaggggggccgcgcaggatgggccacggggtgaccagtgagatggctttttaagtgtgcagtggtaaaagttcacgataaaagtgaaacccaggccacctcccacaccactccttttaagggagctgggccctaacgcctgtccacccctgtgtcccccatcccccactaattccccccgcccactgccccgctgcttctgcttcttgatctctcccttcttttccagctcttccggttctcctaaccgttgccctgggagtcaagaaaacccggtgccaggaccggctccggctgtgctggcacgatatcccctgacatccgcaggtcagggactgtggcggagcagcggttagggccagccacattcccaggccacaagggctccctgcctagcagctgcttgcatgcccctggtgacggggagctcaccacctacacacaggcctcactgacacttaggcagctggccatgaacactacggtgtctcaccagggaccagcctcagaaaagatctggaacagcaccattggctggggttggaagacctcagtttctcctcctcccaaggggcacagagaagctgccctgactccctgccaggggctactgcgggaaaacaccttccttcctgcaggccctgcccagacaagccctggccccacagccaggagggtaggcccccctcacatggctggtgtcagtgattccgccctcgtccagcccccgtggccacagacaaggttccccaaggataacggggccaggggccagtctgggataatttagggccccagcagagggactttccttatttcttctgtcacagctcaaagtggaaaattggaactaccctgcaagtcagcctgaggaatctcctgccccaggaacagatcctgcccacaggcccccagaagaaaagcacaggccagctgtgcaactccggctccacggcccccttcctggcctcagtttctcctctggcaatgcccaggcctcacctctgccttgcctggaacccccgctggcatgtagcggcctggaaagagaaaccagatgcggacgtcctttgaaaccctgaaacacaaggcgcctcctgctccccgggaggccgggctgccgagggctgaggccctagacagggcagggtgttcgagcctcagtgtccccgtttgtcaacggcctttcctgcctcttctccatggcggtggggtgagatggtggtgggaggtggggcggcgaaaaagaaaattccaggtctccgcaggggtccagaatggcaggacccccaagcagaccgcgccccttcaccggttgggggtctcggccctcagcggcggggcggggcctggggaggggccaggcggcgtggggcggggcctgtcgggcgggacctgacagcgtgggggcgggacttaccaggaggcgggacgtgcctagggcgcgagcccgtactggggccgggcggcgtggggcggggcctctcgggaggcaaaacctggaggctgggggcggggcctgtccggagtcggggcctgcctggagcgggagcctgtgccggggccaggaggcgtgggaacggggcctatcaggaggcaggacccggcggctgggggcggggcctgtcgggaggtggggcctgcctgggcgggagcctatgccggggctgggaggtgtgaggacggggcctatccggaggcaggacttggcggctgggggcggggcctacaaggaggcggggccggcgggggcggggccgggctcggcttctcttagggacccggcactcgtcgccctcagtccggctcagctggggctgggcgccgtgggtctggcggttccgtagcggtcccagcgtctgtcccgccggccgggcggtcgcggcacagccgcgggaaggtgtcggagggcggttccgccgcgcggcgggcgcgccgcccacatggcggccatcagggcgctgcaacagtggtgccggcagcagtgcgagggcta

SEQ ID NO: 37543 - DNA, 2300 bp, Homo sapien
gggtccttgaggctctcactggccagagggcgacatgggacaccagagagcacacagacagttcaggtcgtttcattcaaaaccagcccaggccatgcccggggggatccgccgctccgcggcagggctgtggcccagaaggtgaatgagggcttgctggacggcccctgatgccagcggccggcccggagccaccccagggctcggagtattgctcctgggcctgcctggcctcagggctcggcgccctcacctcctcggacagaccagcaacgcccacgcttcctgggctttgcctcgaggatccccggggacgggacgggccggggcttggaggggggtcggctgccacaggctcacatcacggcctccatatgcaggatcctcagggcctcggagatctgcgcgctggggtccatctggccgtacatgcccaccaggaaggcccggtggagcagcacagccgcgtgctctgtgggggaaacggggccctgcacgtcacgctggccacaacatcctggccgcagtgaccagacctcgggactcccaagagccagccctcgggggacgcacctccggcctccccgagggctgccagggccctgggcggggggccagtcctcaccttggcacaggagagcgtactcaggcaggttccggagggccgtctgcaccacctcaaagtcctggctgcccaggcagtacatgaacgtgggcaggaaagcggctgcaatgctgaaagacccacacacttcagtgggaacctccaccctgtgcccacgccagacccccacccgacagggcgagctgagccgcctggaagcctggtctggccaccaggcgggtcaagcggtgacctgggttagcagggcccagcggtggcggcgggacagaggccggcggtggcctcacctggggctgttctgcatggagcgcagggccaggctgaaggcgaggttgcggcaacactcctcggccgagctcatcagccgctgcaggttggtctgaccgggggaaaggtgggaggtgtgtgaccaaggggtccagcccccatcaaggccccttcacctcttggtctcgtgatggttggcggcaacggcagggaccctaggcccctatccagaaggcaggacgcacgtgccactggccggtcccagcccggggctgaaggcaggcctgctctggcggcggcttgactgtgaacacctgggctggggcccccacccgaagcccagcctcagaggactccctggggctcagcgcgggcacgccatgttggggtggtggccctgctggggttccccaagggagtggctcctcccagctctccctcagccccatccagctcaccgagaagaagctcaggatctcgggtctccgccgggacatctcgtctatgtcactcagaacctccagcagatctgacacagagagagggccagaccagaactgaagggcccaggcagacctctgcccaccccaccccagccacccagagggggcaaggccccgagcaccacaggacagaaagcactggaaagcatgagcccagtgacgccccaggcagtcacctgcccccaagctccacaaatacccggccctgcccctactagtggcctccaaggagaggggttgacccctcacggcagccccatatccagggtgctcttagcaccaagtgtccccacggcccgactccatccgggccgctcagccttggctgtcctctgacagcggccaccggtactgcccacccgctggtcttgcccacccgcctgacctcttcctgctgtacccccaccaccttagggggctcccctgctttttgctgtgcctgaagcagagcagccacctccagctcccctgggcccctgagtttctaaggccctctctgggggtgctccccactgtgaggaacagcccacccacccacagcccagcgtgggccaggctcacgccaaagtcagtgcccaaatggctactggctgctgcccgcagccccatgggacccagggcgctgacctggcgtgggtgaagcagggcctgactcaccctccaccgtttggccccgggaaagccgtttcatgtagggggccatctcggccgcggtcagaggggtgaacagggagacgctgaccaggggcaaggagccggctgagctctcctctggaagacagtggcagtgctgcaggagggcgggagcggcaggacgtgccacactgaggcaccaggacctgccctcccgagagcacggcggccactgcccaggctcccaaggtgcctgcacacagcagcgctcc

SEQ ID NO: 37544 - DNA, 2300 bp, Homo sapien
cgaggtactggggaggggtggggccagcacagagacccagcctggggaggggtggggccaacacagagacccagcctggggagggggacggggcctgcacagccacacagggcagtgcacacttgctgatgccacctgagaggggcccccacagaaactctcagcctgtctttgggcagcatttgcctctggccagcatgcacgttcctgttcagagtcttgagatccctgtggacctgagcgagacctggggtccttggggaacacagagcccaggtctgagctcttcctcctgggtgacagtccccgggcaggactcgccatggcttgtacagttcccaccgctggaagcaggtcagaaagtgtccagccactgacagttctcctgtctctgcagacagcacagaggcacccaaaccaaagagcagcccagagcagcccataggccagggccggattcgggtggggacccagctccgggtgctgggccctgaggacgacctggctggcatgttcctccaggtagcgttgctgctgcatgtgggtctccacctgcagcccctcttcctgcgtgcagccttcgctgccgcctcgcacgcacagcggcctttacttgcgtgaccgcctgacccaggcacgctgcacacgcacagcggcctttacacgcgtgaccgcctgaccctggcacgctgctttcacgtaacacccccatgctctcagatggaggctaggccaacattggggaagggggtcgccctgcatcctccctgccatccttgcacacccctctgcgcggggcacccggtttgatgtgtacagaagctgaggttgcaggtctcgcctgaggtctggctgttggagccggggatcctgcaggcctcaccacctcctgatggagagcctggtggtccctgggcaggctctggacacctttgttctctggggcagctcctgggtgttggggtccctcactgcttcacatcacaggtctcaagggccctgggcccctcaggccacaaggtgggggctacgaatgaacagggacacgatgggacgcggttctggcacggagctgcaccgggcgcttagcctctccgctgcgctcctcctccttctcctccgcttcctcctgacactggccttccccgttccagattttcccgctcagcccggaccctcggtggcagagctccagtccccgccccgtggccctcgccctgcagcaggccctgggccaggagctggcccgcgtcgtccagggcagccccgaggtgccgggcatcacggtgcgtgtcctgcaggccctcgccaccctgctcagctccccacacggcggtgccctggtgatgtccatgcaccgtagccacttcctggcctgcccgctgctgcgccagctctgccagtaccaggtacttgggcgtgggcctcttgcgggggaggagggcagtgagggctctgcctcccgcaggacggcccgggtgtcctgtgactgctcctctgtgggtcttgggtctcagtttccaagtgagaaaggacagtgccccagggagtggcggcaggtcccctttttccagtgaacattcccccgggacgggaggtgggggcagtgcggcgtccgcctgtttgcaccacccaggctcggcgctcctgccttgctttccccatctgctggtacctaggactgtgttttacttggtgtctgtgtttactttttcctttgaaccgcgtgggagccctcaccagctggggggttttgaaagggtctctgtgaggtcgtctgggcccgtgcaggggaggcaccgtttcagacaggaggcgggatgaggttggcccaggctccaagtgccggtcgcggcaggtctcagcagcctcacgggccctgctctgggcctcgggtgccgggtccccgtgtgtcctctgccagggtagccacgtgccactttgtccccgcagcgctgtgtgccacaggacaccggcttctcctcgctcttcctgaaggtgctcctgcagatgctgcagtggctggacagccctggcgtggagggcgggcccctgcgggcacagctcaggatgcttgccagccaggcctcagccgggcgcaggctcagtgatggtgaggaccgcgccgggctggcagacggctggggggcactggacaggggctcactcagagtggccaagctgcctggcaccccgaggcctgggcagtggcttggggggtgggtacccgcgtgggcccaggggagcccttctaccgtggggcctccctggatgggatacaccgatggggtgagggctgg

SEQ ID NO: 37545 - DNA, 2300 bp, Homo sapien
ctgccccaggtcttgggtggggtcaccgagcccacgtggcccagggtctcaggtggggctgccgagtgtgcactgccccaggtcttgggtggggtcaccgagcccacgtggcccagggtctcaggtgggtggggtcactgcacacaggcagccccaggtctcgggtggggtcccgagtgcgcattgcccgggttttgggtggcgttacggagcgcgtgcaccctcagccctgcaggacctggagccgcagcagctgctgctgttcgtgcagtcgtttggcatccccgtgtccagcatgagcaaactcctccagttcctggaccaggcagtggcccacgacccccagactctggagcagaacatcatggacaagagtaagatgccagggacctgcggagtgggttcacacacgctgaccgagccccagcccggccaggcttttggggcctgggtgcgagcgggtgggtgatccgaggtcgggtgggtgtgggtggcactcgagggcaggcttagacctgtgggttggtgaggctggcacagtcaggagggagccgaggcctgggcctgccccaaccctggggccaggcaccccctagggccgtgttttgagcttggagggagctgttggggcctcagtgctgactgagctcacccagcttctgaagtccttgggaagtgctggtgacggtgggggcatctccaactctggtttctgtggagagggaaggacctgctccctggcccctggccgcgcccaggtgtgaccctgctacggtttgcagattacatggcccacctggtggaggtccagcatgagcgcggcgcctccggaggccagactttccactccttgctcacagcctccctgccgccccgccgaggtactggggaggggtggggccagcacagagacccagcctggggaggggtggggccaacacagagacccagcctggggagggggacggggcctgcacagccacacagggcagtgcacacttgctgatgccacctgagaggggcccccacagaaactctcagcctgtctttgggcagcatttgcctctggccagcatgcacgttcctgttcagagtcttgagatccctgtggacctgagcgagacctggggtccttggggaacacagagcccaggtctgagctcttcctcctgggtgacagtccccgggcaggactcgccatggcttgtacagttcccaccgctggaagcaggtcagaaagtgtccagccactgacagttctcctgtctctgcagacagcacagaggcacccaaaccaaagagcagcccagagcagcccataggccagggccggattcgggtggggacccagctccgggtgctgggccctgaggacgacctggctggcatgttcctccaggtagcgttgctgctgcatgtgggtctccacctgcagcccctcttcctgcgtgcagccttcgctgccgcctcgcacgcacagcggcctttacttgcgtgaccgcctgacccaggcacgctgcacacgcacagcggcctttacacgcgtgaccgcctgaccctggcacgctgctttcacgtaacacccccatgctctcagatggaggctaggccaacattggggaagggggtcgccctgcatcctccctgccatccttgcacacccctctgcgcggggcacccggtttgatgtgtacagaagctgaggttgcaggtctcgcctgaggtctggctgttggagccggggatcctgcaggcctcaccacctcctgatggagagcctggtggtccctgggcaggctctggacacctttgttctctggggcagctcctgggtgttggggtccctcactgcttcacatcacaggtctcaagggccctgggcccctcaggccacaaggtgggggctacgaatgaacagggacacgatgggacgcggttctggcacggagctgcaccgggcgcttagcctctccgctgcgctcctcctccttctcctccgcttcctcctgacactggccttccccgttccagattttcccgctcagcccggaccctcggtggcagagctccagtccccgccccgtggccctcgccctgcagcaggccctgggccaggagctggcccgcgtcgtccagggcagccccgaggtgccgggcatcacggtgcgtgtcctgcaggccctcgccaccctgctcagctccccacacggcggtgccctggtgatgtccatgcaccgtagccacttcctggcctgcccgctgctgcgccagctctgccagtaccaggtacttgggcgtgg

SEQ ID NO: 37546 - DNA, 2300 bp, Homo sapien
ggacctggtccagccaagcaaagccccgagggcaggggctggatggggacacgcacatgtccccttggccacgacaaaatggcagtgatgctgcttgccttcctgcagcatctgtgaggatcaaatgcgtgcacctacgcaaagcatccgcacatagcaagtgctcacctagcacaggagccccgtgctcctcccaagtctcagtttccttctcgggagaggaggtgcctctagccttggcaccagcggtgcttggggctgggccccggtgggtctgaaggctgctcacccgttgtccttcctgaagccgacgacagcgagttccaggcgctgctggacatctggtttccggaggagaagccactgcccaccgccttcctggtggacacatcggaggaggcgctgctgcttcctgactggctgaagctgcgcatgatccgttctgaggtgctccgcctggtggacgccggtacggtccaggctgggcttgggcaggggctgctgactcaggggtcccgggccccttgcctgctccttgtgggcctgggcagcctccggctgtggcagaggagaagactggccgggtagcctcaggggatcctgcagaccatatgtcctggccacagcaggctgtgctggaccctgggaggagacctagggcagcctgtgctggccccgtccgagagggtcttactgtcaggctcaggggtctagagtgagaaacaggtcctcgatggaaaaaagagaaagtggtctggggttggagaggaggaggagaagtggtggggcctctgggtgggtccctgaaggatttgggggttggagctgcagccggggaccccagcaaggactgagcaaggggcctgggcccacgtaggtcagtagggctggtgcctgctcacagtgaggagacactgggggcagcttggtgagtgagtggggctggctctggaaacccatgactgccaaggggtctaggctgttgtgtgcccccggaagccaccgatggcttcggggcaagagcgccctgagcactgagagaagatagtcacagcagcctgcgtgcagcttcggaagtgtactgcgccgtgccaccataggccctctggagcgcccacccacccctggggatggggcccacacagctgccatccagggtgcaaggtggtcccgacacgctgcccccttgtgcggccccaggtctcgggtggggtcaccgagcccacgtggcccagggtctcaggtggggctgccgagtgtgcactgccccaggtctcgggtggggctgccgagtgtgcactgccccaggtcttgggtggggtcaccgagcccacgtggcccagggtctcaggtggggctgccgagtgtgcactgccccaggtcttgggtggggtcaccgagcccacgtggcccagggtctcaggtgggtggggtcactgcacacaggcagccccaggtctcgggtggggtcccgagtgcgcattgcccgggttttgggtggcgttacggagcgcgtgcaccctcagccctgcaggacctggagccgcagcagctgctgctgttcgtgcagtcgtttggcatccccgtgtccagcatgagcaaactcctccagttcctggaccaggcagtggcccacgacccccagactctggagcagaacatcatggacaagagtaagatgccagggacctgcggagtgggttcacacacgctgaccgagccccagcccggccaggcttttggggcctgggtgcgagcgggtgggtgatccgaggtcgggtgggtgtgggtggcactcgagggcaggcttagacctgtgggttggtgaggctggcacagtcaggagggagccgaggcctgggcctgccccaaccctggggccaggcaccccctagggccgtgttttgagcttggagggagctgttggggcctcagtgctgactgagctcacccagcttctgaagtccttgggaagtgctggtgacggtgggggcatctccaactctggtttctgtggagagggaaggacctgctccctggcccctggccgcgcccaggtgtgaccctgctacggtttgcagattacatggcccacctggtggaggtccagcatgagcgcggcgcctccggaggccagactttccactccttgctcacagcctccctgccgccccgccgaggtactggggaggggtggggccagcacagagacccagcctggggaggggtggggccaacacagagacccagcctggggagggggacggggcctgcacagccacacagggcagtgcacactt

SEQ ID NO: 37547 - DNA, 2300 bp, Homo sapien
ggggatgagaggaggagctgggagaagcgggggtcacacgcctggtgcccaggggagcctggccagccccacaccctccggttccctaggcctggctgcgtgggaggagtacccgaccctgaagatgctcatggagatggtgatgaccaagtgagtgcgcacgtcccctcggcgggcccgggatggggagcagggcctggtctcgttccgctggggctgtgttccctgctgtctcctgggtcgtgctgcatcagcatcttagcatcttctgttgactcatggacctgagcttctggatctaagcctgctgcactttgttctcttctctttcccttgccgggagagggggtgtggattgaggcggcatcacggaggccagcagggaggtccgcaggcacccccagctcttctgggcagcgcttatgctgccgacaggagtggggactgggcaggctgggggtggtgcgatgctggaggacgtggcaagagaatccggccagagatgggttagacaggatggagccaggcccagtgggccaggtgggctttaacactggccagtgggccaggtgtgaccctgcgtgggatcagcagtgggtgagcctcaaggacagttcagtgcaggtgggacgagagtcggcacagcctgcctaggagacgcccagggctcaccaccagctgtgcctggcagcattggtgcccacacagtgtgggcgagggccgatgagctctggggccagcatcctatctcaccagtgagggcaccacaccaagggcagtggccaaggtgaaggggcgcccgaggctgtggcatcatagggacggggagtgtgtgtggccctggtattgtggggaccaggtgtgtgtgtgtggcgttgggatcgggtacgtttggggccgttgcactgtgaggactgggcatgtgtctgcccatggttttgtggggactgggtgtgtgtctgcctgtgtgttgtggggagtgggtgcgtgtgtgtcctgaggtgggaggcacagctgcttccccccacctctgaaggagcagactgactttggggccttggggacagagctcagattagagcggccatggggagctgggttttggaacacgccgaagccacgtgtgcctctgtaggcaagagagtccctgccctgcaggtctgtccctggatggggcgggcagagcctacatggctgtcaaactaggctatgctcccagcgtaggtggcgtggaaggggaggtggcctgggaggaggccaggttctgacaccgctggccttggctctggtgagggcaggcgtgctgcctgcggaggacgaggcagtggctggaccgcgcctctgggcagcgctgcggcttctcgtctcagctctgacagccccatggatgctaccgggcgccctgtgctcctgactgctgtgcagcagaggcagcagcagccgtaggggttttaccctccttgaccctgagcgtggcccactgggagtgagcccttcatggggggcagggtgacacgctcccccgtctggccctagcaactactcctacccaccgtgcaccctgacggatgaggagacccggacggagatgctgaaccgtgagctgcagaccgcccagcgggagaagcaggagatcctggccttcgaggggcacctggcggccgcgtccaccaagcagaccatcactgagagcagcagcctcctcctgtcgcagctcaccagcctggacccccagtacgcagcccacacagccccgccctgcgcctgccgtcgggacctgtgggtggttggtgtgggtgggacagaggctgaaggagcaggcggagccgaccgcactgcggcagaacctgaaaggcctgtggagccccgtccccgcgtccctggcttactgctgtggggccaggccttggggacatcccaggtcaggatgggttgcccgtctcgggctgtcggctgcccctcgaagcagggatgggaggaggaggggttctgggggtgatccgctcagggcgtgctgacgcaccgtgtcccctgtggccctcagggggcccccccggaggcctccccctcacatcctggatcaagtgaaaagcctcaaccagtccctccgcctcgggcacctcttgtgccgcagccgaaaccctgactttctcctccacatcatccagcggcaggtgagtgccgaggctccaggaggtagagatggtggtcttgggaggcccggaaccttccggaggccttggtggccagaagagggcaggacacacctggatgcggggcccatgagctggctgctgcgt

SEQ ID NO: 37548 - DNA, 2300 bp, Homo sapien
tgcaggctcagaccctgttcccatgagcgtcctttgtgtgctccagttctggcccagcatgggggcattgcaggcgtggtggccccagccacgggcgggagtggggaggggaggtggtgtttggggcagtccgggtgtttgattatgggttcacaggaaggctgggccgcagaagccctctaagccattgaccggagcgagtcactcggaacaggaggattccagtcacccacgcacgcgtcagggtcactccatgcctcccagggtgttattccagctgggaatcgtccagaagctgggggtgccctgagttaccccctcccaagtgccagcattgagttggacccccaggggtgccttagcccctcatggcccatggctcggatgggccactaagctgcgtgtctgtttcagacctggaagtgctccgctcattccagaaccagattgccgccatccagcgggatgccgtctggtggctccacactgtggtcccctccatcagcaagctcgcccctaaggactacgtgcactggtgcggctggggccctgtacagcccctgtcccacaccccactgagccgggacaagccggggccccgcacaacccctgccccaaaccccactgagccaggacaagccaggccccgcacagcccctgccccacaccccactaagccgggacaagccaggcccccacacgggagtctgtcccctctctgcggacagcagcagccgttaggctccaggcaggtcaccctgtgcattggagcctcccgtggagcctctgccttggttggggtggggctgccaggctggggctgcatttctctgcagcgattttgtaaagggctgtccagcccggcagccccgttcggccgctgtgcagcctggcagccccgtgagtggtccctgggttctttggtggtgctgtgaggaggtgctgagcttgggcaccaggcagcccggcctctgagcgctggggcccgtgggagcggggtcccttccctggaactaacggggctggtccctgagcacccacatcatgactgagggctcttctctgcctgcccagcctgcacaaggtgctgttcacagagcagccggagacctactacaagtgggacaactggccacccgagagtgaccgcaagtgagtgcgctgccgcctggggctcctgtgtgccgggctgggcggggctgcggggtgccgggccggctgcggcaggaagggccagtgggagttgggcggctgttcccatggtcacagcaccatcctgctcctcctccacaatcctgggtgccacccttctcccactcccatgctggcgtcccagcgccactgtagggattcagctgccgtctgcgtccacgtgactccaagccccagccgcagcctcccccggacccccgccttccagttgcttccagggcgtccacgggcacgccacccttcacgcagtctcagatgcaccgtctgcccctgcttctgtccagacagccgcacactgtccttccccagccggctggcctcacagctctgtcccccttcaagccccatgggtgaccccgtgggttcttggtctacactcccctccagccccgcctggggctcctgccagttcaccctgcccccacctcgtgccctgggcgctctgttcaccttcactgcggccttccggtcaggctttggaggtgtaggggttatctctgtctcctggcccccagctccttgagggcaagaaccatctagaggcctctgtggggtggcagagtctccgtgtggtggttgtaggaaccagtgactgtgtgtgtatccccaaaggccttggggtgggggtagcctccccttctccccttgtccaggcgagacttagagccagggctcctgtcctgcaaagggaggctcaggttggaggggataggctcgtgggaggcagcagcagccctctgccaccagcccgtgggctctgagggagaagctggcctgtcctcggcccctcaggtctggcaggtgtgggcagcccacaccgagtcatgcctcccccaccccgcagcttcttcctgcgtctgtgctccgaggtgcccattttggaggacacgctgatgcgcatcctggtcatcgggctgtcccgggagctcccgctcgggcctgcggacgccatggagcttgctgaccacctggtgaagcgggcggctgccgtgcaggcggatggtatggcttctgcaggggatggcgcctgtgctgggtctgctcccctcgtccctgcagaaaccccggctctggcacgcacctctggg

SEQ ID NO: 37549 - DNA, 2300 bp, Homo sapien
aggttctggcctgggcccgggtgagggcatttgccgaaggcacaggccccgcatgcaggggcggtgatgctggtcagaggatgaggagaggcaggtggcggggcagaggaagctctgtgcagggtgctcccattcaggtgacaggaggaggaagcattaccccatcggatctcccctccccttagagagttaccctgagggacagattgagaaactgtagagggatgaagccgcacagcccccgcctggcgtccggcagggatccgcgcctgaccggcctctcctcccatgggcaccacggacgtctccttccggactcgctgcccacacagcgcagggtgcagggccctggagcccttggggtcctgcggggacccagctggtgcccacaggagtggaaagagaccgtggcgggtcacacagcagttctcaggctgcagcctggggccatgagcctcactgaggccacagtcaaatggccacacccaacttcaggggcacagggagaccagctctgccttgcggtccctggatgaggagatgggacacaccgggcaggcggtgctcaggactccctcggtggcggggcagcgttcgagtcagtgccctgctgggaacagatctccaagatgtggttaagtggcaaaagccaggtgcagaaaagaggagccgtgcgctacctgcagggtgacaaggcagagggaggcacacgggtggctgcctgaacgcacacggaaaagccgggaacacaggcacaaatcagaacacaggctgactccaggggaggggaccagctgctcaggggtcaggggagaccttcgaccctttgactggatgattcccccaccttttatttttatttttttttagacagggtctcgctctgtcggccggctgcagcgtagtggcaccatcatagcttactgcagccttgacctcccaagctgaagagatcctcctacctcagcctcctcagtagctgggaccgtaggcatgcaccaccatgcctggctaatttattcttgatttttgtttgtagagatagggtctcactatgttgcccaggctggtctcagactcccactttggcctcccaaagggctgggattagaggttcatgccaccatgcccagctaatttttatttttttgtagagatgggggtcttgctatgttgctcaggctggtctcgaactcaaccgatcctcctgccttggtctcccaaagtgctgagattacaggcatgagcatcacacctggcaactgtatgatcttttgtgtcttttgagttttgttcccatcagtgtttccattaaaaaaaaaaaaaaaaaggcgtgggggcggggcgggcgcagtaattccagcactttgggaggccaaggcgggcggaccacctgaggtcaggagttcgagaccagcctggccaacatggtgaaaccccgtctctactaaaaacacaaaaaaattagccagacatggtggcgggcgcctgtaatcccagctactcgggagactgaggcaggagaatcgcttgaacctgggaggtggaggttgcaataagccgaggtcgcgccactgcattccagcctgggcgacagagcgagactccgtgccaaaaaaaaaaagaaaaaagaaaagggtgaactttgtggaacacgagttctatctcaataaagctattattattattattattattatttgagacagggtctctccccgggagccccccgggctgcgccccctcgccagtgcctgcgccccggccgcccccgctctccgggacgtgcagaacctgccacttgactcatccgcggatccctgacgccactcctccccgccgtgcgtcctggagtgcgtcccttcgcaacgccagcaccacctgtgaatggagaggccagcgcctgccccgcgccgccgacccacctggaccggaccacatgcgcgcggcgccggccagcccgcctcccgccgccatggggcgctgcaggcatcaggccggcgccgcgggcctctcgcgcctccttctgggcccgcttcccgccgcactgttttccttccggttgttccggaagtcgggtcctcgagggcggtgagatcggtttccgattccggggtggccgggtggcggcggcggcgctccggtcgcgatgggccagaggtaagtgagccgcggcctgggcgcttcctcattgccgggcgagcgcctggttctcccggctaccgctcccggcctctgggccgtcccttctggttctgccgcctccagcccggcgtccgcgtcgcctgctgccgcccgac

SEQ ID NO: 37550 - DNA, 2300 bp, Homo sapien
gaggtcaggggttcgagaccagcctggccaacatggtgaaaccgtctctacgaaaaatacaaaaatcagccggtgtggtggcgcacgcctgtaatcccagcactttgggaggccgaggcaggcagatcacaaggtcaagagattgagaccatcctggctaacatggtgaaacccgtctctactaaaaatacaaaaaaaaaaaaaattagccgggcgtggtggcaggcatctgtagtcccagctactcaggaggctgaggcagaagaattgtttaaatctgggaggcggagcttgcagtgatccgagatcgtgctactgcactccagcctggcaacagagtgagactccatctcaaaacagcaacaagaacaaaaacaaaatttaaccagacgtggtggtgggcacctgtgatcccagctactcgagggggctgaggcaggagaatcacttgaacctgggaggcggaggctgcagtgagccgagatggtgccactgcactccagcctggacgacagagtgagactccatctcagaaataaataaatacaaattaaaaaattaaagagataataaaagtgtgtgattagtaacaaaagcctgctatggaaagaatgcatttgggttagaggagcgacaccatgagtaacgtaaagagtcccgcggagatggccacagcttctctggaggctcccagcgcatcccaggaccccgagtgcagagtgtgggccaggacaagggaagcacctttcccatccccgggggatgtctttctgcaaacatcctggggacgtgggacattgtcgctactgctgctgttgagttatttcttggcacctgtttctgcggccaggttgcaggcatcactgtggctagctgccccagacggccgtgtgggccttagcaaggaggggcctcccaggtggccagtgcagaacccgcaagtgggggggagagatggcccgggaggctgcccccgcgctccacagcaagaggccactgggctgctgcctaaatccccagccacatggtggtaaggacgacacccagaagatgcacagacctccctgcactggctcctgagtcccacctgagccgagaaaacaggctcccgggtcccacctgagctgagaaaacaggcttcccagaaccccgggcagatgccatgggtgtcctggggggccctcggttgcccaggcctgaaactcctcttcctgcagcgctcagaggggggcgggacttggggacccagaagcgtggcaaggggctccagacggatcccctctccagcctgtcctccacctgtgacaggaagcagaggcagctccctcaggggcccgcccccacctgaggatccctcacaggactccttgggccagtggtgccctaaccccatcctgggcctgctgtgtcccctggcaaccaccagctggggctttagaagggggctggccccacccacagaggctgtgatcactagccgcttatccccatttttacattgctggtttgcttgttttgtttttttgagacagggtctcaccttgtcacccaggctagagtgcagtgatgaaatcatggcagcctccaccttccaggttcaagccatcctcctgcctcagcctcctgaatatctggggccgcaggcacataccaccacgcccgactaatttttgtaatttttttgtagagatgggggtctcactgtgttgtccaggctggtctggaactcctgggctcaagcgatcctcctgctttggcctcccaaagtgctgggattacaggcatgagccaccgttcccagctggccttaatgttttttatgtttatagagacagagaatgggggaagggaggtttcgctatgttgcccaggctggtcttgaactcccggcctccagagatcttcccgcagggcctcccaaagcgcggggattgcaggtgcgcgcggggccagcggccccccgggcgggagaggagggcgtggccggggggcgtggccgcggggcggggagggggcgtggcccggggggcagggcggtgtgacgcgcgcgccgcggatcccggaagcggtgtcagatgctggggagccgggcgggcgggtgcggtggcggcgggcggcgcgggggcacttgttgttcttcgcgaagtcggagcccgagcgccaggcggcggcggcggccgaggggagcgcgacagtgagcgccggcgcgaggacagcgcgtgcccgcgaggagccgccgcgcgcccgcgccctccgcgcgacgccaggtgaggggcggtggggcagcggggcccgggccg

SEQ ID NO: 37551 - DNA, 2300 bp, Homo sapien
gctcatacctgtaatcccagcactttgggagactgaggcaggaagatcacttgagtccaggagctcgagaccagcctaggcaacatggtgagaccctgtctctacaaaaaagtttaaaattctctgggtgtgggggtgcccacccgtagtcccagctgctcgggaggctgaggcaggaggatcgcttgagctcaggaggtctgcagtgagctgtgatttcaccactgcactccagcctgggtgacagagtgacaccttgtctctaaaatgaaaattaaaagggaaaacatgatcctccagaagctgaggtggctgcctggggatcacctgctcctgaaagcacagttctggacgactgaccctgggctgcctgccctgccggggggagcccagggctctgatcctcaccctctgcaaggtgccttcctgggcggagccgccctgccctgcgctttatggagcccaggccctcagtctggatcctggaaaggggcgcccggcgtcctggctccgtcactcatccccagctgcagccgcaggaattgcctctgtctgaggctgctggcagttccttttccttgagaggaagtgatgcccccgctgagccttgtttagttctgcgtcacgtcgaggtgtctggccttgggttgaaaaccctgcctcttccatccgaaaaccagttacctgagagctgttccaagttataggtggtgccggagaactttgctgcccggcgctgctcccgggacgtggggcgtgagcgctgcacccttacttacgtcggctgctggggccccacagcggaaactcagacccgcccacccaggcccccgctgtggcgctgaacactgcacttctctggtgaccaccgaaactcagaggagctcggggtgtcgggtgcttgtgcgtggcgatgctggtgttttgttagctgctgggcgtaagacacaatgcgaggacgtcgttcctcgggggctgctggaggggagcttggctgcagtgctgaccaggtgctaatgcagtagcccctgccttgggcccggggtagtgcacgggcgtctctgcgaccccaggcacgctttccccctggatgacaccctaaggctgcgtctctggccctggggtgggagcgctttctacatgtgctctggcggccctggaggccatgtgaggtcggacagttcacaaaaccccatttagggcagtcgtcatttttagatcagttgctttacaaactttttttgtgcatacaaaactcttctctgaatgtccttccaaaagcaagctgtcatctttcttgcctctgatgtttaaagcgacattaggttaaggctacttggatttattctgtgcatggtggggagagggaggcgccagcaccatcccatcccgtgctgggttcctgagagaagctttgctgcttggctgggccgtcccgctgcgtcgtctctccaggcgcgtggctggtccaggcttcctcggcagagcagagtcgtgacctgcccaaggaggtggggggcaggcttgcgagcacagcgtgggggccgcctgggagccctgcgtccgccaggtcctcattcttcagagggccccagtgcaggtgtgcctcgaagtactggggttggagcggggcacaggcgtgcttcagtagccctggcaaccttgacctcctggaagtagtcagccacccctcctggggcgcccccggctaccgtgtgcctccgcagtgtcacagggcatcgcggaggcatctttttagtggaaagatccccacgctgaactctgcccctggcatctggccgagccccacacgtcaccgtgggtctggccagacggtcctgtcccccggaccttccttttccgcccggctgtgctgccacggcgggcagtgggcccgggggcccaggagcgggtccttgctgggtgggaggcccgggtgtgtgggaatgcgcgcggctctgtaaacatctggtgactcaccgcatagctatgtcgtggccggcctgtgcactgacgtgctcgcagtggagctggaagcggtgcccgcggcccctccctctgacatggaaaagtttctcatggtgctcccagccgccggcatttgcaggtccccacggtggcggaggcagctgggccccagcctctccactgtcaccctcaccccaggacgtggtgcgaaggagcctggagcccacctggccgtccccgggaccggctggtgccatcctgtgccatctacgtcagcgccctgagatcagctggccttggcaggggcagcggactcggcagcctggcgcagg

SEQ ID NO: 37552 - DNA, 2300 bp, Homo sapien
cgctgcacccttacttacgtcggctgctggggccccacagcggaaactcagacccgcccacccaggcccccgctgtggcgctgaacactgcacttctctggtgaccaccgaaactcagaggagctcggggtgtcgggtgcttgtgcgtggcgatgctggtgttttgttagctgctgggcgtaagacacaatgcgaggacgtcgttcctcgggggctgctggaggggagcttggctgcagtgctgaccaggtgctaatgcagtagcccctgccttgggcccggggtagtgcacgggcgtctctgcgaccccaggcacgctttccccctggatgacaccctaaggctgcgtctctggccctggggtgggagcgctttctacatgtgctctggcggccctggaggccatgtgaggtcggacagttcacaaaaccccatttagggcagtcgtcatttttagatcagttgctttacaaactttttttgtgcatacaaaactcttctctgaatgtccttccaaaagcaagctgtcatctttcttgcctctgatgtttaaagcgacattaggttaaggctacttggatttattctgtgcatggtggggagagggaggcgccagcaccatcccatcccgtgctgggttcctgagagaagctttgctgcttggctgggccgtcccgctgcgtcgtctctccaggcgcgtggctggtccaggcttcctcggcagagcagagtcgtgacctgcccaaggaggtggggggcaggcttgcgagcacagcgtgggggccgcctgggagccctgcgtccgccaggtcctcattcttcagagggccccagtgcaggtgtgcctcgaagtactggggttggagcggggcacaggcgtgcttcagtagccctggcaaccttgacctcctggaagtagtcagccacccctcctggggcgcccccggctaccgtgtgcctccgcagtgtcacagggcatcgcggaggcatctttttagtggaaagatccccacgctgaactctgcccctggcatctggccgagccccacacgtcaccgtgggtctggccagacggtcctgtcccccggaccttccttttccgcccggctgtgctgccacggcgggcagtgggcccgggggcccaggagcgggtccttgctgggtgggaggcccgggtgtgtgggaatgcgcgcggctctgtaaacatctggtgactcaccgcatagctatgtcgtggccggcctgtgcactgacgtgctcgcagtggagctggaagcggtgcccgcggcccctccctctgacatggaaaagtttctcatggtgctcccagccgccggcatttgcaggtccccacggtggcggaggcagctgggccccagcctctccactgtcaccctcaccccaggacgtggtgcgaaggagcctggagcccacctggccgtccccgggaccggctggtgccatcctgtgccatctacgtcagcgccctgagatcagctggccttggcaggggcagcggactcggcagcctggcgcaggaccctgtctcacctgtgcggccctcttgttgtgggggtttgtgggttgcgggggtggggcccccatcggaggcagggctggagggtggagggatttgggcccgagggctccctggcccagggtgtggggagggtcctgggctggcagggaggacgggatgcggtcacccgcccccatgatgcccatgtccagtggaggtgctgaccaaggacaccccccaccgccgtgtgctgctctgatgttcctgtgggaacctgtgtctggtatttggggtatgggagtgggtgctgtgaacccctgtcccgcgagctgcccggcgccttctgcccgcccgtcccggccgccgggtgcaaatgggtttgttgactgcctgccggcctcgtgatgtctgtgcaacctgacctgaagtcaggatcgcgtttgggcttctcggtttccatgacaaccgtgggggctggctcggtcccaaggtcgccatggcaactatcggagggctcatgccggggatgctttggctgggtttttcatgaatgattagaatgtgtgacacaatgcagacgtgaggacggcgggggcggcggcggggacgactcccgccagacggtcaaatgctcggcagggcggcggctcccccacctccctggtctctggctgcggcccccggacctgccgcccctcaggaaccccacacccccttgggccgcagggtcctcgctcgggggcagcttaggtggaggtggtgatgtcacagccgcagcggc

SEQ ID NO: 37553 - DNA, 2300 bp, Homo sapien
aggtcccgccagcacgggggagtggggaggtcccgccagcaggtggagagaggtcgcacagaggccacaccaggtgtttcctgaatcctggcccccactgggccctgggccaggccagggcactgacagcccactttggcagaggaggatggccaccagacagggcacgggcccaggatctggggctggagtggcagggcgggcccgggagagctcctgagcacctgctgtgccgagacccccgactttggaggcgccctgcccccctgaacctcagtctcctggggtgggacgagactacacggacggggtcacagcacccgtcagaggagccgctgcggggtctggggcctcttcctcccctgcagaccccgtctggggctggggctgagcggccgtggcgtccgcagggctgctgctggccatcctggagcggtgcggggtcatcccggaggtggagaccagcggcgggaacaagctgggggctggcacgctggccgccggctaccagaacttcatcatctgcgtggagatgctgttcgcctccgtggccctgcgttatgccttcccctgccaggtgtacgcagagaagaaggagaattcaccaggtacaccctgccttccagctggggcacccggagcgcacagccctgccccgggcaccgtgtctgtgtccgtgccattctcgaggcccaggaatgccagctcgctgggcagggagacgggcaaagggcatccggctccggacaggcacctgggctgtgtggggtccaggcggtcccggaccccaatggtgatgggggatgggtgtcccctgccaggcacaccccctattagggcggagacagcctgtggcctgccggcttctcatcagtcactgtggagagaccagggtgcccacccgaggccagccaaaggcgtactccgctgcttggagcccctcggaagctctaggggacgtggtccttgtcaggggtctggccagggacgggcccggtgctgggtggagcaagctgggctggggtccaggggtctggggccaccctctgctggccgaggccagacctggacatgcaggagctacagccctgggcatcctgggaggggacttgtccggggagctggagtgcaggggggatggtggggctcatacactgccctcccccagcccccccggcacccatgcagagcatctccagcggcatcagggagacagtgagcccccaggacatcgtgcaggacgccatccacaacttctcccccgcctaccagcactacacgcagcaggccacgcacgaggcgcccaggcccggcacccaccccagcggcggctccggcgggagcaggaagagccggagcctggagaagcggatgctgatcccctcggaggacctgtaggggggcctgggctgccagtgctgtagggacccaggctgcccaggcctctggggaagaacagggtccccccacccaccaactcctgccaaaggtggggcctctcctgagagcccacctgtgaggccctcggagcccacttcccatcctccctccagccagggggtcagggcacctgatggccctggcaggcacccaggtgggcccgccaccgcaggagagggcacctgagccaatcggaagagcctggggaccccctgggatcacccagccatcagccccaggagccactgtggggcggagagtgagtgtggctgcggggccttggctgcacggaccccatgggagctgtgagtgggtcagactccctggttcaggagacagacagcggacggatcccaggctgggcagctggagggaggggcgccggggcgctgggcagccgggctctgacacagtcagcagctccgggcgccgcaggccggcggggtccacacaggctggccggggctgggcctccttggagcctgctacggccctcgtgggcacgtggagaagggcccacgtgtctccacacgccagccacaggggagccctggccaggcgcccagccaggggagcgtgtgcctgggatgggtcacagaaccagcgggcacctgtgaggctggccagcaccgtggggctgtgggaatcgctcttatttatatttaaacaccttggattttctaccgggtcttggcttctgttcccgcagggcatgagcctgaggagcaggacgcggtgggggtcacaggaggctgctgctcagagtctgcatgcgggaaaggggtcccacctgtctggggtgggcagcctcgtggtccagggcagtgcagggcagagcctgggctgtgcgatcacagcca

SEQ ID NO: 37554 - DNA, 2300 bp, Homo sapien
caggctgcagtccggtggcacaatcagtgctcactgcagcctccgcttcccggatttaagccatcctcccacctcagcctcccgagtagctgggactgcaggcgcccgccaccacgcctggctaatttttgtattttttagtagagatggagttcgccctgttgaccaggccggtctcgaactcctgagctcaggtaatccgcccaccttggcctcccaaagtgctaagattacaggcgtgggccaccgtgcctggcccctagggagggacaaattcttaggaatcaaagggtgcacatcctttggatgcccccacagcaaaagccaatgtgccttctgagagtctgcccagcccaggaccgggacgtgtcccctctccgtcccccgggttggacacttagctgggctctagaaacgcctgctgaatgaaggaatgagtgagcgttcccattcccaggctaagaacaaacaggaccctcactcatgcccaaggaacttattcagaaaaaaaaaaaaaaaaaacctattgtacaacatggtgactgttataaataacaatgtattctatgcttgaaaattgccaagagagtacattttacatgtcctccccgcaaagaaatgctaagtatgggagataatggagacgttaatgggtttgactcagccattccccacgaacacacatatcagacatcgcgctgcacactgtaaatgcatacaattttgatttgccaatttaaaaaataaattttaggccaggtgcagtggctcatgactatagtcccagcactttgggagacggaggcaggaggatcccttgagcctaggactttgagaccagcctgggcaacacagtgagaccctgtctgtacaaaaaatacaaaaattagccaggcaaggtggtgcacacctgtagtcccaatactcagcaggctgaggtaggcagatcactcgagcccgggagttcaaggctgcagtgagccatgattgtaccactgcactccagtctgggcgacagagcgagaccctgtctcaaaaaaaacctgggcaagagagcgagaccatgtttctcaaaaaaatatttttttttttttgagaaagggtctcgctctgtcgcccaggctggagtgcagtggcgcaatcttggttcaccgcaacctccacctcccaggctcaagcgattctcctgcctcagcctctctagtagctgggattacaggcgcgcgccaccatgcctggctaatttttgtgtatttagtagagactgtgtttcaccatgttggccaggctggtcttgaactcctgacctcaaatgatccacccacctcggcctcccaaagtgctgggattataggtgtgagccactgcacccggccataaaaagtcaattattcaaatgtgtattatttttagttgtaaccagaaatatgtatttaacatatacattcatacttatatgtacttctatagtaaatacgtataaaagtatgtatctaattacaataggcaaacaatttattttctctaattgtaataaggatgcccattgtagaaaactagaaaatgcaaacatagaaggtgcctggtggcctgcacccacccccacctccttcccggctcacctgggcttgtgcaggggtaccaggcggacccggctctcacccgaaccctcctgcgcccacccccacctccttcccggctcacctgggcttgtgcaggggtaccaggcggacctggctctcacccgaaccctcctgcgcccacccccacctccttcccggctcacctgggctggtgcaggggtaccgggtggacccggctctcacgcgaaccctcctgcgcccagggcgggcccggctctcacgcgaaccctcctgcgcccacccccacctccttcccggctcacctgggcttgtgcaggggtaccgggtggacctggctctcacccaaaccctcctgcacccacccccacctccttcccggctcacctgggctggtccaggggtaccaggcgggcccggctctcatgcgacccctcctgcgcccagatctatctgcacctgcgctcctacaccgtgccacaggagcaacgttacatcatccgcctgctcctcatcgtgcccatctacgccttcgactcctggctcagcctcctcctcctcggagaccaccagtactacgtctacttcgactctgtgcgggactgctacgaaggtgggcgccaggctgcgtcaggtcgggggagcggagggagagactccccggggcctgcgtgcacgcacactcttccatggccagtc

SEQ ID NO: 37555 - DNA, 2300 bp, Homo sapien
tgccccgagcatggacagggcacagctctaggctctggcagctcctgcagagggaggaccagcagcaaacacagacaggtggacagggagtcacacacacagtgaggagggtgatgggacagcggggatggtctctccagaggtgacgcctgaggctgcaggacagagtcacccgggagcagggtcggttggtccagaaggtccctgcctggggagcaggcaggctccaggagggcccagccagggtgtgcatgctgtggctctgggcccgggcccgggtgggcgctgatggggaggttaggcaaggcgggcctgagagctgggcacgacttcctgagcttgttccccacctgggagcctccctggagggacagtgtcagtggaggagttgggaaaagcaggcagggtgtcccagggaaggatgggcctcagcccgggcccctcacggacccctcaaggatgctggacgcgttgatgcgcctctcgttcccatctctaaaaggggaacaggccggacgtggtggctcaaacctgtaatcccagcactttgggaggctgaggcgggcagatcacctgaggtcaggagttcaagcccagcctggccaacgtggtgaaaccccgtctttactaaaaatacaaaaattagctaggtgtggtggtgggcgcctgtaatcccagctactcgggaggctgaggcaggagaatcacttgaacccaggaggcggaggttgcagtgagccgagatcgcgccattgtactccagcctggcgacagagcgaggctccgtctcaaaaaataaattaattaaaaataaaaggggaacagtggctccagtcattccagcctcaaccccttgagccctgttgctcagggctgtgggagggtaggagatatgaaggacaaggagtgtgtggatccgttgcgggcatggagcgggacttggtaatggtggccccagcggcatgagcccaagcgtaaccagaacaggacaagaggtgggctgagggcccacatccctctcccaggagccggggtgagtgagttttttctccacaggggcctctgcatgggggtgacagggaccctcagggccccgcaaccccttgccagaccccaaagggtccagggactgggctgtcactccccctctcctgccttgatccacaaaaaccagaaatatttccttttttttttttttttttttttggacacagagtctccctctgtccccaggctggagtgcagtggtgtgatctcagcttactgcaacctccgccttctgagttcaagcgattctcctgtctcagcctcttgagtatctggaattacaggtgcacgctgccacacctagctaatttttgcgtatttcgtagagacggcgtttcaccatgttggccaggctggtctcgaactcctgacctcaagtgatccacccaccttggcctcccaaagtgtggggatgacaggcgtgagccaccacgcccggcccagaaaacaaatgttttcaactcatctcttggggcgtggattttttttttaattcagatgaaattcacataacatcaatttacccaggtttaagtgaacgattcggtggcggtaagtatatccacagtgctgtgtgcctgccgcctctacctcatttcaggactcctgtcaccccccagagaaaccctgtaccattagctctccacccctcctcctgcagcccggccctccttggcctgccgcagacctctcccacgtgtccccaccaggtggcagctgcctggccgtctggcataggcaggtgagggcgccaggcggccagcaggttcctgggagccagctgccacccagcaaacaaccgggaggatagggtgtcagccgtgggaggggacaggaggggacgggcctgcagcctggggcccaggtgggccactggggacgtgaggcactggccgccccgccccagcctggcacagcccttcagatcctggccttgccgcacccacagtggggcctccagttggggccacgtggccatgagaatgaccagctaggcttccctggaggccaggcctccctggactgggccaggtgcttcctgccagcaaaggtagagctgggccctgtgaccgcagaccagagggagaggaggaggctggactgggctgcgagtgtgggagagggtggactcagggccccagcaggttagtgggagatggaacaggcacccagggctgccaagaaccccagcaaagccgggctcccaggtgggtggacaggtcccagagccagtgagggccggctcctcccat

SEQ ID NO: 37556 - DNA, 2300 bp, Homo sapien
agccgactgcctggggctctgcaggccgggtgggaggccggcaggagtacctgtggctgcagtgggaatgcagctggatggaagttggggaccgccttccagcacccctgcctggccaaagggagaccttagcccacagggtcaccgcctcagcaggacagcccccaccccgcaagccctgtgccccgagcatggacagggcacagctctaggctctggcagctcctgcagagggaggaccagcagcaaacacagacaggtggacagggagtcacacacacagtgaggagggtgatgggacagcggggatggtctctccagaggtgacgcctgaggctgcaggacagagtcacccgggagcagggtcggttggtccagaaggtccctgcctggggagcaggcaggctccaggagggcccagccagggtgtgcatgctgtggctctgggcccgggcccgggtgggcgctgatggggaggttaggcaaggcgggcctgagagctgggcacgacttcctgagcttgttccccacctgggagcctccctggagggacagtgtcagtggaggagttgggaaaagcaggcagggtgtcccagggaaggatgggcctcagcccgggcccctcacggacccctcaaggatgctggacgcgttgatgcgcctctcgttcccatctctaaaaggggaacaggccggacgtggtggctcaaacctgtaatcccagcactttgggaggctgaggcgggcagatcacctgaggtcaggagttcaagcccagcctggccaacgtggtgaaaccccgtctttactaaaaatacaaaaattagctaggtgtggtggtgggcgcctgtaatcccagctactcgggaggctgaggcaggagaatcacttgaacccaggaggcggaggttgcagtgagccgagatcgcgccattgtactccagcctggcgacagagcgaggctccgtctcaaaaaataaattaattaaaaataaaaggggaacagtggctccagtcattccagcctcaaccccttgagccctgttgctcagggctgtgggagggtaggagatatgaaggacaaggagtgtgtggatccgttgcgggcatggagcgggacttggtaatggtggccccagcggcatgagcccaagcgtaaccagaacaggacaagaggtgggctgagggcccacatccctctcccaggagccggggtgagtgagttttttctccacaggggcctctgcatgggggtgacagggaccctcagggccccgcaaccccttgccagaccccaaagggtccagggactgggctgtcactccccctctcctgccttgatccacaaaaaccagaaatatttccttttttttttttttttttttttggacacagagtctccctctgtccccaggctggagtgcagtggtgtgatctcagcttactgcaacctccgccttctgagttcaagcgattctcctgtctcagcctcttgagtatctggaattacaggtgcacgctgccacacctagctaatttttgcgtatttcgtagagacggcgtttcaccatgttggccaggctggtctcgaactcctgacctcaagtgatccacccaccttggcctcccaaagtgtggggatgacaggcgtgagccaccacgcccggcccagaaaacaaatgttttcaactcatctcttggggcgtggattttttttttaattcagatgaaattcacataacatcaatttacccaggtttaagtgaacgattcggtggcggtaagtatatccacagtgctgtgtgcctgccgcctctacctcatttcaggactcctgtcaccccccagagaaaccctgtaccattagctctccacccctcctcctgcagcccggccctccttggcctgccgcagacctctcccacgtgtccccaccaggtggcagctgcctggccgtctggcataggcaggtgagggcgccaggcggccagcaggttcctgggagccagctgccacccagcaaacaaccgggaggatagggtgtcagccgtgggaggggacaggaggggacgggcctgcagcctggggcccaggtgggccactggggacgtgaggcactggccgccccgccccagcctggcacagcccttcagatcctggccttgccgcacccacagtggggcctccagttggggccacgtggccatgagaatgaccagctaggcttccctggaggccaggcctccctggactgggccaggtgcttcctgccagcaaaggtagagctgggccctgtgacc

SEQ ID NO: 37557 - DNA, 2300 bp, Homo sapien
aagtccatgcaactgtgactcagagttctggcagcactcagaacactccagtcacgggcacactgctaaagaccatcactccattcattttcccagcgccttccgcagccccgcctcttctggctctctctcatctaaaagaacccaggaaagagaagcctgcagaagcgagtgctgtcgaatctcacgtgtgatctccacagagcacagcacagccagccgcctgctcacgtaatgtaccatggcaggggaggcggctcgaatgacaaaactgctgcttctgcttgtctgctggataaaatgcctgcgggctggacaaagcatccactgagggcaagcagggcgccttgagacccacaaatgcccggaaaatgctatcgctgtaggggtatttgtccgccagatgccccatgtccttactgacaaatcacagccactggagaggtttatgctcctccctgggggtcccttcctgaccactttattattattattattattattattattaaagacagagtcttgctctctcacccaggctggagcgcagtggcacaatcatggctcactgcagcctcaacctccagggctcaagccatcctcccacctcagcctcccaagtagctgggagcacaggcacacaccactaggcccagctaattttttgtttccttttcttttccttttttttttaagaccaagtctctatctgttacccaggctggagtgctgtggcacgatcttagctcactgcaacctccgcctctcgggttcaagcgattcttctgcctcagcctcctgagtagctgagattacaggcatgtgccaccacacccagctaatttttatatttttcgtagaaatggggtttccccatgttggccaggctggtctggaacttctgaccttaagtgatctgcccgcctcagcctcccaaagtgctgggattacaggtgtgagccactgcacccagcctctctctatatatatattttgtgtaggcacttgtttttttgtagtgacttgtgtgtgtgttgttgtgttgcccaggctggtttcaaactcctggcctcaagcgatctgcccgcctaggcctctgaaagtgctagggttacaggcgtgagccacagttcccggccaatccactttacctcatcctgccccagaaggacttttgtggtgagcacaggcttgctgacgtcactggccacgctgctgggctccagggagaccagggtgcccatcttcccaaactgggtcaccaccaccaggatgtgactgctgaaggccgtacacaccacctgggtggggaccccgcacaccacctccgtcttctgcttcgatatcaccaacggcgtgtcttccatggcggggctctgcagtggcagctttaatttaggttaaaaagaaaggggaaaaaaaggagtcaatcaaacagtacagccttggggctcccaaaaaagtagcacggggcattgaaacggaaacgcaaggaggcccattcaaaagaaggggccaggcgcggtggctcatgcctgtcatcccggcactttgggaggccgagacaggacgatcgttgaggccaggaattcgagaccagcctggccaacatagcgagacccccatctctaccaaaaaaaaaaaaaaaaaaaaccagcagggcgcgcctgtggtcccagttactcaggaggctgaggcgggaagatcgcttcagcccgggaggtcgaggctgcggtgagccgtgatcacaccattgcattacaacccgggcggtagagcgagaccctgtccgtaaaaaaataaaacagaagcaggagcggggccgcccatagagaccgcgcctggggctttctgggttaggggatcgacttgcacgttcacactgccaggccgggcagtggcttcccgcccctcggcctcgccgccgccccggccctgcagccgcggcccgggacccccacgacacgcggtgccgaggccggccgggctactggggacgcagccgcccggggaagcccgcgggtacccgcgctcaccaagccggcgccgcgcccggaagtggctctgcgtgcgccacgcgggcccgccccgtccgcgggttccgtccaccttccggaagtcagggccgcggcgcttctggtcccggagacttggggctcccgggcttctgagcggctcgggttccgcgctgccggcagggcttgggggcgccttagagccgaaccccgttttttcaggaaagggcgctgcgaccacccccgtcccgggcctcagcccctctgctgcagaccctcgggatc

SEQ ID NO: 37558 - DNA, 2300 bp, Homo sapien
aataccctctaggggtttctactggttacttggtgtacgccctatgtaaataaagaggatgaaataaagttacaaaatcatttactcagtgtacaccctatggagagggtatttcctgtcatagctgaagtgttccctgcctccagaccctgttttcctgcctcaattcctttacttttctaataaacttgctttcactttgtggactcgccctcaattctctcttggggtctggatcgggacccctttctggtaatatagacagaaaatacggccttgacatggttgtcaggaaacgacagtaaggcctccgagggtggggttctgaagggatgttaaacgccccaccccgaggaaggctctggaggctccaatcactttcagcctctgctaccaagatgtccgaccctaccaataaaacttccagcagcggggcgcggtggctcacgcctgtaatcccagcactttgggaggccgaggaaggcagatcacctgaggtcaggagttcaagaccagcctgaccgacatggtgaaaccccatctctactaaaaatttaaaaagttagccgggcctggtggcgcacgcctgtaatcccagctacacaggaggctgaggcaggagaattgcttgaaccagggaggcggaggctgcagtgagccgagatcgcgccactgcactccagcctgggtgacacagcaagactccgtctcaaacaaaacaaaacaaaaaaccttccagcttggagaaactgagagtgagcagtagggagtgagggggtccctgggaggaaccagaactcatcccgcttcagggtggggctggcccccttcttggccttggccggggcttcgtgtcacggagcgcccgagggacggtcggagcccaccccagcccgcccgccgcctgagcctggccgagctctctgcacctgcacacgtctgtaaaacgcggatgaaacgcttctacggaaccgggtggctgagatgaagtgagttatgggtataaagcgcttagagcgatgcctggcggacactcggtgccaaataagcgttcgctgtggcgacgatgacgcctccagcccaaagcccgtggtcgagcagggccgggctcccagcgctagggggttcctaggcgcggcgcttcgggggtcctggacacagacacgggggacagagctcctaccagcgacgatcccgagggtctgcagcagaggggctgaggcccgggacgggggtggtcgcagcgccctttcctgaaaaaacggggttcggctctaaggcgcccccaagccctgccggcagcgcggaacccgagccgctcagaagcccgggagccccaagtctccgggaccagaagcgccgcggccctgacttccggaaggtggacggaacccgcggacggggcgggcccgcgtggcgcacgcagagccacttccgggcgcggcgccggcttggtgagcgcgggtacccgcgggcttccccgggcggctgcgtccccagtagcccggccggcctcggcaccgcgtgtcgtgggggtcccgggccgcggctgcagggccggggcggcggcgaggccgaggggcgggaagccactgcccggcctggcagtgtgaacgtgcaagtcgatcccctaacccagaaagccccaggcgcggtctctatgggcggccccgctcctgcttctgttttatttttttacggacagggtctcgctctaccgcccgggttgtaatgcaatggtgtgatcacggctcaccgcagcctcgacctcccgggctgaagcgatcttcccgcctcagcctcctgagtaactgggaccacaggcgcgccctgctggttttttttttttttttttttggtagagatgggggtctcgctatgttggccaggctggtctcgaattcctggcctcaacgatcgtcctgtctcggcctcccaaagtgccgggatgacaggcatgagccaccgcgcctggccccttcttttgaatgggcctccttgcgtttccgtttcaatgccccgtgctacttttttgggagccccaaggctgtactgtttgattgactcctttttttcccctttctttttaacctaaattaaagctgccactgcagagccccgccatggaagacacgccgttggtgatatcgaagcagaagacggaggtggtgtgcggggtccccacccaggtggtgtgtacggccttcagcagtcacatcctggtggtggtgacccagtttgggaagatgggcaccctggtctccctggagcccagcagcgtggccagtgacgtcagcaag

SEQ ID NO: 37559 - DNA, 2300 bp, Homo sapien
atagcaatgccaggacgttaccctaaagggtttaaaaaggtaaggcacgaataatccaccccttgtttagcatatcatcaagaaataaccacaaaaatgggcaaccagcagcccatgctgctctgcctatggagtagccattctttattctgttactggtggagggtgtccaggttcttggcatcttgaacaaagaattggacaaaatgcacaaagccaccgggcgcggtggctcacacctataatcccagcactttgggaggccgaggcgggcagatcacctgaggtcaggagttcaagaccagcctggccaacatggcgaaacctcgtctctactaaaaacacaaaagttagccgggcatggtgacgcacgtctgtaatctcagctactcaggaggctgaggcaggagaattgcttgaacccgggaggcagaggttgcagtgaggatcacgccactgcactccagcatggacaacagagactctgtctcaaaaaaaaaaaaatgcacaaagcaaaaaaagaatgaagcaacaaaagcagaaattttttgaaaatgaaagtacattccatggtgtgggggcggccaaagcatagaggctcagggccccattacagaacttgtgaggtttaaataccctctaggggtttctactggttacttggtgtacgccctatgtaaataaagaggatgaaataaagttacaaaatcatttactcagtgtacaccctatggagagggtatttcctgtcatagctgaagtgttccctgcctccagaccctgttttcctgcctcaattcctttacttttctaataaacttgctttcactttgtggactcgccctcaattctctcttggggtctggatcgggacccctttctggtaatatagacagaaaatacggccttgacatggttgtcaggaaacgacagtaaggcctccgagggtggggttctgaagggatgttaaacgccccaccccgaggaaggctctggaggctccaatcactttcagcctctgctaccaagatgtccgaccctaccaataaaacttccagcagcggggcgcggtggctcacgcctgtaatcccagcactttgggaggccgaggaaggcagatcacctgaggtcaggagttcaagaccagcctgaccgacatggtgaaaccccatctctactaaaaatttaaaaagttagccgggcctggtggcgcacgcctgtaatcccagctacacaggaggctgaggcaggagaattgcttgaaccagggaggcggaggctgcagtgagccgagatcgcgccactgcactccagcctgggtgacacagcaagactccgtctcaaacaaaacaaaacaaaaaaccttccagcttggagaaactgagagtgagcagtagggagtgagggggtccctgggaggaaccagaactcatcccgcttcagggtggggctggcccccttcttggccttggccggggcttcgtgtcacggagcgcccgagggacggtcggagcccaccccagcccgcccgccgcctgagcctggccgagctctctgcacctgcacacgtctgtaaaacgcggatgaaacgcttctacggaaccgggtggctgagatgaagtgagttatgggtataaagcgcttagagcgatgcctggcggacactcggtgccaaataagcgttcgctgtggcgacgatgacgcctccagcccaaagcccgtggtcgagcagggccgggctcccagcgctagggggttcctaggcgcggcgcttcgggggtcctggacacagacacgggggacagagctcctaccagcgacgatcccgagggtctgcagcagaggggctgaggcccgggacgggggtggtcgcagcgccctttcctgaaaaaacggggttcggctctaaggcgcccccaagccctgccggcagcgcggaacccgagccgctcagaagcccgggagccccaagtctccgggaccagaagcgccgcggccctgacttccggaaggtggacggaacccgcggacggggcgggcccgcgtggcgcacgcagagccacttccgggcgcggcgccggcttggtgagcgcgggtacccgcgggcttccccgggcggctgcgtccccagtagcccggccggcctcggcaccgcgtgtcgtgggggtcccgggccgcggctgcagggccggggcggcggcgaggccgaggggcgggaagccactgcccggcctggcagtgtgaacgtgcaagtcgatcccctaacccagaaagccccaggcgcggtctctatgggcggc

SEQ ID NO: 37560 - DNA, 2300 bp, Homo sapien
agggagaccatctctggaaaaaaaaaaaaaaaagaaagaaagaaagacaccagggcatctgcatgccctctctctccctgtctctctttccctctctctctccatctctccctccctctttctctctccctctctctctctctctctccatctctttctctccctctcaccctctttctctctctctccctctgtctctttctttctccctctctctctcacatacacacgcacacacacacacacacactctctctctctctctgtcttgggaggacacggtgagaaggtagccatctgcaaaccaggacactggccctcctagaaccaaccccgctggcacccgatcccagacttccagtctcagggcggggagacaatgtgtgctgctgtctagactccagtgtcccgcttttgttatgagagccggggccgacaaaggcaggcaggagtcaggtctgccctgctcactgctgtgcccccacatctaaaccagcctggggctcggcatacagtaggtatttaataaatgcacactccaggaggaaacagactttgtctggtaaccctagggcctggcgggcccaacaagatttgctgagtaaatgtttgtgaataaatgaatgggagtcagtgaaaccaaaccagcacggtttttttttttttttttttttttttgacacggagtctcgctctgtcacccaggctgcagtgcagtggcgcgatctcggctcactgcaacctccacctcctgggttcaaacaattctccctgcctcagcctcccaagtaactgggattacaggtgtccaccacaacgcccggctaatttttgtattttttagtagagacggggtttctccatgttggccaggcttgtcttgaactcctggcctcaggtgatctgcccgcctcagcctcccaaagtgctggaattacaggtgtgagtggccgcgcacggctgcacagttttcaaagtggggttcatgggcttggcgggctgagtctgctcctgcctcccagcgagactcgcccaggcttgtgccaatggtcctgctcctgccctttagggagtgccctcgacgcggacacctgagccctgagctgcagccctggaggaggaggacgcagctggtgctgggaagggctgggaggccggccacgcacctggcacgctactacttcctggggttctcaggcaggagcagggtcctggtggccttcctggtggatggacagaaccctcacagccccagcgggctgcgcatgagctctggagccacagagcaggtcccaccatgtgcctgtcggccacgtctgctgcctggcacagccacgtgcatccggagccgtctgcagcgtaactcaaagtgagggggatgggcacatgtgcacgacgcccgacgcccctctgcagcactcaacagggagggcagggagctggaatttgtcccagctgggcacaggctgctgttggcagccagggtcagggagactctcagagtcccccacttctgtggaacagacagtttctttggttctggaattaaactattaatagcagtggagatcaagaaactcaagtgcagggcagctgacaggtggtctcgaatgcaccctggagggtgtgcagccagcagccctcagagtcagtctaagtttggcaaaggaccgctgtgcgggccaggcatggtgacagtgacgtcttggtgtcagggcctcctgtctcataccctcgctcctgcaagggcctctgcacctgggcaggtgggcgtctgggtgctgggggagctgactccttcaaggagatggtttcctgtctcagggaggtggggggtacccctgggatctgcttctaggggcataagctccggcctattgagtgactgatggaccagagctctatctttctagaaggcctgggagaagccaggaatcccctcccggagcctcaccccactcctccctccagccatcctcctccagctctttgtgacatcactgccgttgccatgggaaccctgccaactgagcggatgacttcacaggaggatgggaggcgctgggctgggccggcctgggtctcgcagcaaaggtctttgataaccagcaaaacggcaaagggaggcaggaaaaccacccgcagggaggccagtgtgggtttaaggtgatggcattccccagccctgcccggcaccggcctcccaagcctgggacctgggggctccctgcctccttccagatggaggtgggcatggtggagtgtgaggggcctgggtctgccggggctggctggggaac

SEQ ID NO: 37561 - DNA, 2300 bp, Homo sapien
atacacctgtagccccaggtatgtgggatcacgtgggcctaggagtttgaggctgtagtgagctatgatcacaccactgcactccagcctgggcaacagagtgaaaccctgtctcaaaaatttgttagaaagaccagcaacgataaattgataaacccctggcaaaactgacaaagattaaaaagggggaacgcctgtaatcccagcactttgggaggccgaggtgggcggatcacgaggtcaggagatcaagaccatcctggctaacacagtgaaaccccatctctactaaaaatacaaaaaattagccgggtgtggtggcgggtgcctgtagtcccagctccttgggaggctgaggcaggagaatggcatgaacccaggaggcggagcttgcagtgagccgagatcgtgccactgcactccagcctgagcaacacagcgagactccatctcaaaaaaaaaaaaaggggggggggagagtgaaatgaccaatatcagaaatgaaatggaaatattataatagatccagaagctattaaaataacaataaaaaatactacaacaaaacttgatgctcataacaaactggatggattcctcgaaaaccacatactaccaaaacgtgccaagataaaatagcctcggtagtcctataaccattaaataaatcaagtttgttctaattaaaatgctactcaaaatctccagtcccagatggtttcactagaaagttttaccgaacattaaatatgaattaataccaattttacacaatcctttttcagttaacaaaagacagagaaacacctttccactatgaaccctgtactgaaaccaacaaggatggtgcgcacacaaagaaaaataagtatcagtctctcatgagcttagctgcaaaaatactcaacaaggactaacaaatggaatccagcaacacacgaaaaagagtatcacaccctgaccaagtgggattcagtttaggtgtacaacgacggctagttcaaatttgaaaatcaatcaatgttatccaccctatcaacaggctaaaggaagacaatgatatgatcctattggcacaggcaaagcatttgaaaaaatttaatctccattcctgacaagaactcttgcaaagcaggaatcaagggaaagtcctccgacttggtaaaaagcaccacgaagaaccctcagctcacgctgcttcacggaagagtctggccgccttccctcattcggtcagcggagagctggctttccccactcatcctcaacccagcatgggagctcctcacgccagggcatgcaggtaagaaaaggaaagcagcagcatagggattggaaaagaacagaactgtccctactcggaaatcacatgacggcacacgtggaaaaccctaagcaatctgcagaaaactcctagaatgacgtgacggcccacgtggaaaatcctgagcaatctgcagaaaactcctggaacactaagtgagtccacgaaggttgcaggaaataagatgaacatacaaaaattaaccacatttctataaagcaattgcaaacaagtgaaaaacaaaattaaaaggcaatataatttacagaacatcttaaatactcgggtatacatctaacaaaaacttgtatagtgtctgtttgcagaaagttaggaaatactgatgaaaggaatcgaaaggaataaaaagaatgtttgtataaatagatacaatgtttatgaactggaagacttatagtaaatcaatttttccaaaattgatctttggttttaaggtaattgctgtccaaacctcagcatatatatatatattttttttttttttttggaaagagggtcttattctgtcacccaggctggagtgcagtggtgtggtcttggctcactgcagcctcaggcaatcttcctgcctcaacgtgccaagtagctgtaactacaggtgcgcaccaccactcatggctgtatttttttcatagagatggggtctccctgtgttgcccaggctggtctcccaactcctgggctcaagcgatccttttgccttggcttccccaagtgttgggattacaggcgtgagccaccatgcccggccagcattttttttttttttttttggtagagagacacaagattattctaaaatgtatatagaaagcaattccaaaaaagaagagtagaggaattgcccttcctgatgttgagaaccgtacagctacagcacagcgttatacggctcctacgtcagacagacatggctggggcagcgctggaggggagatgtggagaccagcagaac

SEQ ID NO: 37562 - DNA, 2300 bp, Homo sapien
taggtctcagtcttatttcacccagtccttattcaaaatggagtcactctggttcaaatgcctctgatacccgcacactgaaaatgagaacacattgctgagagaaactgttcatagattagaagtttccatattgttaagatgtcaattatccccaaaatgatctatagagtcagcgtaattccaattaaaatcctagcaggctgacaaagatgcaaaaggctattcagtaaaaaagaatgatcttgatgctggagtaactggacgttcatatgcaataaaaaatgaaaaagagtcaatccagaccttgcaccatataaaaaaaaactcaaaatggatcatgaacacaaatgtaaaatttagaactataaaacttctagaagaaaaaaaaatggaggcagtctttgtgaccttgggttaggtaaagatttcttagatacgacagcaaaagcacactccataaaataaaagacgggtaagttagacttaatcaaaattagaaatgtctgctcttcaaaagacattgttaagagaatgaaaagacatgtcatatataaggagagaacaccagcaatgtacatatttgatgaaggatttgcatctggagtatacaaagaactctcaaaactcattaaggaaacatagaaccccataaataattagcagaagatgtgaacaggcacttcagcgaagaccagcaagatggcacagggacagatgctcagtgtcattcgtcatgaggaaaatgcaaattaaaaccgcaatgagacgccgtcagtcacctcttagaaggactgaaattaaaaagactgatcatgtcaagtactggtgaccgtgtgcagaaactacaagtctcctatactgctgataggaatggaaaatggtgcaggcactttggaaaacagcttggcaacttcttgtaaagttaggcgtacactgaccacacaatcaagcagttccgatttagccaagagaaaagaaataaatgtccgtgcaaagcttgcatgtgaatgttcactgtacactttatttgcaacagccccaagctggaagccaccggaatgcccgtcaacatctggatggatgaagacattgtggtctatccgtatgactgtaaagggataaactgttgataccatagcaacacggataaatctcaaactaactacgcttagtagaagcagccagatgagaaaggctagatactgcgtgatgccacttacagaaactctggaaaacgtggatgaacccgtggtgacaggaaacacagaaggatcagtggctgcctggggtcgggttgcagtgggaggggcaaggcaggctgcacagggcctgggatctgggggcgaagggtcttgccttgatggcctcacgggtgcgtgtatacagatggtagctcatcaataacgcagactcagcaaacagggaagccctggcaggaggaggtggtggcatcgggggcaggtccagctgtcacaggccagcctggtgaaacacggcagcgtgctgcttctccagacaaaactgctccctcttgggtgtctagaggtgattcccgcgtagctctgcctggactgggaaacatattcctaaccccgtgcaggggctgcagtccctctacccgaaacccacgccaacacccacttcacattttgcatttgaatctcaggaggttcacggaccctctaacccagcggcacccgcagcccctgggatggaaaagcatcataaaagcagacagtggcgcgtgctggggaggacggggagaagctgggagaacaggcagctccttacaaagctcaaagttaaattaccatgtgaccctggcacttccgcttatgggtgtacacccaagagaaacaaaaatgcatttccacacacaagcttgtacacgaatgttcacagcagcactgtgtgtaatagccccaaacggaagcaattcaaatgttctatcaacggatgaacggataaacaaccatggtctatccacacactagaccgtatgattcatcagtaacaaatggagcgtcagcacgtggtccaatgtgagcgaaccgtgaaaaccttacgctcagcgaaagatgccagatgccagagaccactcgccgctgagcccatctccctgcaacactgcaggtagcggagtctagagacaacacagacagcggctgccgacggctgggactgggagaggatggctatggggcacgtttccttccagggtgataaaggcattcattccaagatagactgtgatgatggctgcacgctctgtagatgacatctcaatcaagctgctt

SEQ ID NO: 37563 - DNA, 2300 bp, Homo sapien
ctagatcccgcctagtttcctcccatgctgttttgctgcctgtgtgtttgaaatggctcctcttggtggggtgggtgcaggagtggtgctgtttgtataggacatagggccgtcctcccatcccgacactcggctgccctggagacgggcctcagcacagggctcccattacccctgcacttccagcacctgctgaaatgtgtggcgcgcgggctccgaggcatggaatggtgtgcctgactctgcgctgcccaggctgtggtcacagcagcaggctggaagtttggctgtcgcccccagccaccttggggcacggtcctgtctcacctggagcagaggtcctgggcccccaggggctcaggcgtggcctccttctggaggggccgggaatgtcccctccacttgctgagtgttggcccaggaggctcctctgtgggatgccagctgctcccaccatgagtggcagctccacccctgtattcacagctgtgctgagggcatccagggcctggaaatcatgtcagatggacagacaggtgtgcgggtggatggactaagggaagaaaggaaggatggcaggaacgaacgcgtggaggtcaagagcctggcccagaatcacggtggggacgtgagcgggtgggtggtgcccagtctgcccctcccgtgctgcctctaggggctctgccttctccaggcgttaggcagggaaagtcccctgaacttacagaaagacgactaggtgcctggaatgttgccatctgcacagagccctagcgcctgtcctcccacttccctcgccctcctgggaggtgggttctccacgccaccagttatggagcccaggcttgttctcagccctggtcagcggtgccatcgcaggtcgctccagccccagccgcaggtgcccagtgaatgctctccgtgacccagggcctcctgctgcaggtggaagccgggccacgggaacctgcgccgaccttggcctcacactgtggctccgggagagcaggacctggtggtgcatgcgtagcggctgaggaggacaagcctgggggctggtcccagcccggacacggtggctttgcacacaccaagccttcgcccccagcggggccagcagtgcagggcgctgcactgttgggggccagagggtgacaggattggtgtttaagaagaacttctcagttttatcttttctctgttttgatttggtttccttcatctctactggcttgggcttttggtccttaaatcctctaatatacagaattgtttcctggacctcaagccccccatcaggggggaaacctcatcccaggatgatgggccggtcgtggggcaccctggctgggggctgggggctggggctgtgctctggctctcgttcctgcccgtggaacgttgaacgttgccaggacatccaccccggggaacttgacgtcctcaggcactgctgggtccaacgccagcgctgggcgcaccaccgctgacccccgacccctcctgcaagtccccctatctgctaagtaggaggatgctggggccaggcgaggccttgctgggcagcctctaggatggtcactacctcctcccacctggaggtcccttcaggaggtccgcggtgttgaagcctggggaggaagaggaggctgaggcctgggagaggaagaggagggtgaggcctgcggggggaggaagaggagggtgaggcctgggggaggagggtctcactgctctgggtcagaggagggctgagtacacgctgtgcggcctggttcttgccaggggtcagctgactacagccccgccttctgtgcagcccctcaactaagaaccgttgtacatttttgaagggttgaagaaaatcaaaagaagaatattttgggacacacgcgggttatctgaaattcagattcgtgtttccgtgcccgcagctccgtcagcggggcccatgctggccttgtgtgccctgcggctttctgggtgcagttgcagcgctacgtggttaggacgggggcagggtgactgcacagccccgtgactggctgctctccgcaggaggcggccccaccctctgcccacatcctccctggctcctcgaggctccgtaggatggtgaagaggttgagatgctgtccagcccacagaggccccggaaagccagtgccgcccgtcagaggggtctcctgagtgcgtgtgggtggctggattctgcatactgggttatcttaaccccggctgtgaaaactggatgaagtagcaatcctttcaaccccaagagtctgtgattcagccagagt

SEQ ID NO: 37564 - DNA, 2300 bp, Homo sapien
gggcggcggggtcccggggtcccgggggtcccgggaatggcaagggaggggccgagggcccggaccgggtgtgctcgccagggtggggcacaacgacccagaccccgtgcctcaggaccccgcgcccgccccgtctcccatgggcgcgctctcctctctgtgctctcccctcctctccccactcccctgtccccactccccctttgggctgtgctggggacagcgggcccctcgcctgggtctccgcagccgtcccttgtgccagggcgggcggccgaggggcgcgtgctcgtggtcccagccccggggtcccgctgcctaccgtgtgggtccccgggctagggtgccggcgcgccgaggaaggggcctgagctggcgcctggtggagaagtcggggctgcaggggctcttggcatcctggtggctcgcgccggtccgctctcaggaagggggcgtgtgggcccggtttcccctcggggatggcaagggccaccctgatctcgtttgggcaatggaggaattgggctgtggagcctccttccaggcgggcctgcctctgcggggctggcagcctggggagctcaggcctctgcttgcaccaggccaaggttcttgttaaatggaaactcagaaactgtgcagctgcagaagttctacctttggcttttaaacgcgcttggctgttccctagttgtggctggtgggccggcctgccatgagcccatagtaagcgccggtgttgggggtgcaaagttctttactgcggtttgtcttcagccttccaaagccagacagacccaagttccaatctccgttctgtaactttttgaagcttcggtttcatcatctctagaatctgtgtaaaaagacctaattcaccaccctgttgagactgagcttacaaatatagtgctggtcaacctgcagccgtattcccatcatctagcggtggaagacttgagggatattggccccgttccccacaactttgcaagtagatttcactgtcatgagtttacagatgaggaaactgaagttcaagaagtctcggtgctcggaaatgtcagatacctttctttctgatacctagttgaaaatagtagtagtacttattaatgtcactagaaataaacaatgaaaatgagcacagctgtgatgatcatcatctttactgtcactgttgcatgcctcgtttctgattcccagaggccagattttttttttaattaattattattattttttgaaacggagtcttgctctggcacccaggctggaatgcagtggcgcgatctcagttcactgcaacctccatctcctgggttcaagaaaatctcctgtcccagcctccggagtagctgggattacaggtgcacgccaccacatctggctttagtagagatggggtttcaccatgttggccaggctggtctcgaactcctgacctgtggtgatctgcccatcttggcctcacaaagtgctgggattacaggcatgagcaacagtgcctggcttatgtttatttatttatttattcattcatttatttattttgagacactgtctcaccccgttacccaggctggagtgcagtggtgcggtctcaggtcactgcaacctctgcctcccagtttcaagcgattcttgtgccacagcctcctgagtagctgggattacaggcgcacaccaccacacccggctagtttttgtattttattagaggtggggttttgccatgttggccattctggtcttgaactccggacctgcctccgcctcccgaagtgctgggattagaggcgtgaaccaccctgcctgggcaagaggccagactttgctgtgagtgctcctggtaggtagtttcaggcatcaactgactggattcaggaattcctagaaacctgggaaagcatcatttttggttttgggtgtgcctgttgagggtgtttccagaggagatgagcttgggagtctgagtggaccaggtgctgaagatccatcctcagagtcaggggcagtatctaagagcctgggggcctggagaggacaaaaacagagaaaaggcgaatgtgtccatctgcctgcaggagctgggatacactcttcctctcctctcctcaacagcagcactccaagctcgccggcctttggtctccaggacttgtcccagcagcccctcgaactgagaattacaccatcggacccctggctctgaggccttcagacttggactgtgtcacactgccaggcttccagggctccaacttgcagacggcctgttgtgggacagtctctgtaat

SEQ ID NO: 37565 - DNA, 2300 bp, Homo sapien
gttcctgggagatttgagctgattttggagatggagcaggacaagtggggagtctctctctctctttctctctctctctttttaaccaaaaagagatgacaaaactaagttcaggggccatggaaaatgaaaaagtccgctatattgtgatttgggaagagaaagttatcaagagaaagaggtgaggatggaaggatggagaaaaacagactgtgggaaggatcagaaggaatccgccgaggcagggatgggtgtgcccatgtgtgccttgacgggacttcatcttatagactgttaaactgtcacacacaaacaggctttccacccctgctctgagagcaccacgcacagatttccagttcttagtgtggctgtttaaagtagaaaatctgggggctgggtgaggccactcatgcctgtaaacccagggctttagaaggctgaggctgggggattgcttgaagtcaggagttcaagaccaacctgggcaacatagcaacaccccccatgtctacaaaaatgaaaaaccaaaaagcaaaccaaaagaaaaatctgaaatttccatctggggattaacttctgtctttctggtgaacaatatagcaattcacgcattcttcaagcagcaaaagttcccggaacaattagggaagacgtatggtctgaatttatccaggcagtgggtctgctttggtttttgctggaaatttatatcagtgtctgggctcccaagaacataaatgtaattgccaaagcaagcagtgatgtggtgtgtttattttcttttactcatctaggaacttgacgcagctttatatttaataaaataatagagattgcattattttaaggtactttcatgctttgaagttttgttttttttaaactggcttcctcaaagccatttcctggaggtgtactcatccctcaagaagagtttgttgactatgattaaattccaaggaccagtgggggaagtctggaaacccaggaatctccatcaggaatctggggctctgtccagctccccgaaggaaactgcgggtcagatgttttgatttttttttttctttgagaaacagaatctcactctgtcacccaggctggagtgcagtgaagtgatcttggctcactgtaagctccacttcccgggttcacgccattcggcctcagcctcccgagtagctgggactacaggcgcccatcaccacgcccggctattttttttttttttttttgtattttcagtagagacggggtttcaccgtgttagccaggatggtctcgatctcctgacctcgtgatccgcctgcctcggcctcccaaagtgctgggattacaggcgtgagccaccgcgcccggccgccagatgttttgacttttcattttatttctggttgcagtcaggttgttaagtccagggactcttgccctactccacctcgttctcttattccatttcattcccggggcacacaacttggaagtctttctctgaaagaaggaaaattcattgcagacccttaggaacagcatcttcttagagggaagccaggggctgggcagagacgggaggaggagaggaagagaatatggaaacgagtaaggcacactcttctcaggaaggctccaatttgaaggatagacaaaggttaccataataatggtggggcctgacctcaccccattggatgctgtgccctggcttgcagagcactgggaaggtagcctagtagcataaattgcatttctagtgggcccagaaaaaagcaaaataacggattgattcaagctgatactgagtagcaaaattttgggaagagtcaacggtgcaagtttgtccgaggaggctgccgtgggcgcggctattccacacattacggcgcgaggcgaaagccttagtggaagcgcgtcctgcgcaaagccggggggcccccgactgcgccttggctcagccttcggttccgagtcctttccgtgcggagtctcccaggggtggcggctccgggtgcggacgcggagtccccaggatcagccggtgcgcagactcggttctttacggcccgattgccacgcaggtctcgcgagagcgcaggcgcaagtgtcgcgataaatgggcgccggcggagcggagggagatccgagcggcggcggcaagctggctgcgagcggctgaggtaagcggcccggctcgcgcgggcggcggggtcccggggtcccgggggtcccgggaatggcaagggaggggccgagggcccggaccgggtgtgctcgccagggtggggcacaacgacccagac

SEQ ID NO: 37566 - DNA, 2300 bp, Homo sapien
gagtgcagtggcgcaatctcggctcactgcaacctctgcctcctgggttcaggcgattctcctgcttcagcctcccgagtagctgggtttataggcatctgccaccacgccaggctaatttttgcattttagtagagacggggtttcatcatgttggccacggttggccaggctggtctcgaaatcctgacctcaggggatccacctgtcttggcctccaaaagtgctggaattacaggtgtctccgaatacccccatattctgaggtaccaagggttaggacatcaacacattaattttgcggggacacagtttggcctgtgatgcctgctttccatctgtgtagccttatcagttcacctcccctcctgggccttggtgccccatctctagaaatgaatgagttgatccgagggccctcccagctcatgacctgccgttctgtgtgatgccaacctgcctgctcctcttctctcccaccaggtacttgaagctggtgtgtgtttcctttcagcgtcaagggttccacactgttgggagtcgctgcaagaatcggacaggcgctgagcacctgtggctgacccgacatctcagggacccatttgtgaaggctgcgaaggtggagagttaccggtgtcgaagcgccttcaagctcctggaggtgaacgagaggcaccagattctgcggcccggccttcgggtgttagactgtggggcagctcctggggcctggagtcaggtggcggtgcagaaggtcaacgccgcaggcacaggtgggcctctgcactgctgttggcaccttctggctcccctgaggctgagtgggcatgggcaagctgcctttgccagtggatgcgggatggtggagcccttttttgaaggcgtgtgcttccgagtgggtggtttagcaatggtgatgataaaaataggatgctgccattttcaaaatgaaagacaaggtagaaaggtgcagtgaacatggaaatcacctcgcatgagaccgcccgcaggtaccagcaccagcatggtggtgtgcatccttccaggcttgtgcatgcatagatccctcacattttcaaaagcgatgttgtgccatacttttcttgctaatttgcagcctattggagctatttttgcttaatgatacatacatatatgtattatatatatatatatatatatatatatatatatatatatatatatatatataattattattgttattatttttgttcttcccccccctccagatggagtctcactcttgcccaggctgcagtgcaatggtgtgatctcggctcactgcaacctctgcctacctggttcaagcgattctcctgcctcagcctcccaagtagctgggattacaggcgcccgccaccgcacccagctaattttttctttttgtttttttaagtagagatagggtttcactatgttggctaggctgatctcgaactcttgacctcaggtgatctgcccacctcggcctcccaaagtgctgggattacagatgtgagccatggtgcccggctactcttaatgatgtattgacatctttccccaacagcacagctaaatttccaagtcgcataagccctggggctttcctggtggccccactggggctgctccgtccggaacctagaagaggcttcatggccagggctatggattctttgctctggatgaagctgagacacagttttcatctgttttgtatcttagggttttgagtaagattttctatataaaaaggttctcctgaataatgagatcagccaaccgcccatgcaactgaagacactgtcgtcattgggaaagtttcatcctattccatgtagtgcttgcaccgtaggttctttaaccagctccctcactgtggcatcaaggttgcttttggcttttggctgggatgcgtgtgctgtggtgaatatccttgccatttatgtttcctgctgtaaagccagggtagctgcatgcactggcatttgaacagggtgagacagtccacccagagctctcccaagtctctcccaaataccttagagtagggacactggtccccatttattggtgagaaaacaggctcagggtttcatgacttgttgaaagtgcagaaatggaatgctggccccctggatctgcacatctgcctcgctgctggtttgcggtaggtttgccatgaactcttggtgtctacctgcatccccttgggtggcccctgcccatacttaggcggggatatgcctcttcgggcttttcaacagcattttttttttttttttttttttttg

SEQ ID NO: 37567 - DNA, 2300 bp, Homo sapien
gagtgggccctggcccccgggaccggcttgtgccattttcccgggagaccccttaagcgaggggaagacagcgactcacggtcagcagtcagtgcctcctggcttgtcagcacgctttggtgttgcagaagctagaagctttggccttggagccatgagggtggtaacttttatttatttatttaaatcagaaagatggacatagagaccgggcttggtggcccacacctgtcatcccagcactttggaagtctgaggcaggaggatcgtttgagcctaggagttcgagaccagcctaggcaatgtagtgagatgccatctctaaaaaaggtttttaagaattaaaaaaaaaaaaaaaattagcccaggcatggtggtgcacacctgtagtcccagctactcaggaggctgaggtgggaggttcacttgagacccagaggttatggcagcaatcagctgtgattgtgccactgcaactccagcctggatgatagcaaaacaaaaatggccgggtgaggtggttcacgcctgtaatcccagcactttgggaggccaaggtgggctgatcgccagaggtcaggagttcgagaccagctcggccaacatggtgaaatcccatctctactgaaaatagaaaaattagccggaagtggtggcacacacctgtagtctcagctactcaggaggctgaggtgggaggttcacttgagccccagaggctgtggctgcagtcagctgtgatcatgccactgcactccagcctgggtaatagtaaaaccctgtctctaaaaaaacaaaaagaagaaagaaatgcctgggtgcagtggcttacacctgtaatcccagcactttgggaggccaaggcgggcagatcagcggaggtcaggagtttgagaccagcctggccaacatggtggaacccatctatactgaaaatacaaacattagccggacatggtagcaggtgtgcctgtaatcccagctacttgggaggctggggcaggagaattgcttgaacccgggagtcggaggctgcagtgagctgtcactgcactccagcctgggcgccagagtgagactccgtcttaaaaaaagaaaaagaggacatagaacttccttggtgaggttgttgtcagagttaaacaaggggaggtgtgtatagcttccacctgcttagctattgtgggctgtgaataaattgttacatttattgtaacaattgtctagagaatcttggaaattgtccttcaacgattgacacaggtttagttcaattttatttaagacatgtaggtgagaggattgtttgagcccaggagttcgaatctgcgttgaaccgtgacctcaccactgcactccagcctgggctatagagcgagaccctgtctcgaaaaaaagaagaaaaaaagaaatgtgacaggccagaccctctgtactagctgtcaaagccctggaactaggtcactaaggcaaggatctgtccttatgaggttttcttgcagcctgtcagagcccaatgaacatttttgccagatgagaaaataatattactttaattaattaattgatgtatttagttattgtttgagacagagtctcgctctgtcgcccaggctggagtgcagtggcgcaatctcggctcactgcaacctctgcctcctgggttcaggcgattctcctgcttcagcctcccgagtagctgggtttataggcatctgccaccacgccaggctaatttttgcattttagtagagacggggtttcatcatgttggccacggttggccaggctggtctcgaaatcctgacctcaggggatccacctgtcttggcctccaaaagtgctggaattacaggtgtctccgaatacccccatattctgaggtaccaagggttaggacatcaacacattaattttgcggggacacagtttggcctgtgatgcctgctttccatctgtgtagccttatcagttcacctcccctcctgggccttggtgccccatctctagaaatgaatgagttgatccgagggccctcccagctcatgacctgccgttctgtgtgatgccaacctgcctgctcctcttctctcccaccaggtacttgaagctggtgtgtgtttcctttcagcgtcaagggttccacactgttgggagtcgctgcaagaatcggacaggcgctgagcacctgtggctgacccgacatctcagggacccatttgtgaaggctgcgaaggtggagagttaccggtgtcgaagcgccttcaagctcctggaggtgaacgagaggcaccagattc

SEQ ID NO: 37568 - DNA, 2300 bp, Homo sapien
tgaagcaggagaatcgcctgaacccaggaggcagaggttgcagtgagccgagattgcgccactgcactccagcctgggcgacagagcgagactctgtctcaaacaataactaaatacatcaattaattaattaaagtaatattattttctcatctggcaaaaatgttcattgggctctgacaggctgcaagaaaacctcataaggacagatccttgccttagtgacctagttccagggctttgacagctagtacagagggtctggcctgtcacatttctttttttcttctttttttcgagacagggtctcgctctatagcccaggctggagtgcagtggtgaggtcacggttcaacgcagattcgaactcctgggctcaaacaatcctctcacctacatgtcttaaataaaattgaactaaacctgtgtcaatcgttgaaggacaatttccaagattctctagacaattgttacaataaatgtaacaatttattcacagcccacaatagctaagcaggtggaagctatacacacctccccttgtttaactctgacaacaacctcaccaaggaagttctatgtcctctttttctttttttaagacggagtctcactctggcgcccaggctggagtgcagtgacagctcactgcagcctccgactcccgggttcaagcaattctcctgccccagcctcccaagtagctgggattacaggcacacctgctaccatgtccggctaatgtttgtattttcagtatagatgggttccaccatgttggccaggctggtctcaaactcctgacctccgctgatctgcccgccttggcctcccaaagtgctgggattacaggtgtaagccactgcacccaggcatttctttcttctttttgtttttttagagacagggttttactattacccaggctggagtgcagtggcatgatcacagctgactgcagccacagcctctggggctcaagtgaacctcccacctcagcctcctgagtagctgagactacaggtgtgtgccaccacttccggctaatttttctattttcagtagagatgggatttcaccatgttggccgagctggtctcgaactcctgacctctggcgatcagcccaccttggcctcccaaagtgctgggattacaggcgtgaaccacctcacccggccatttttgttttgctatcatccaggctggagttgcagtggcacaatcacagctgattgctgccataacctctgggtctcaagtgaacctcccacctcagcctcctgagtagctgggactacaggtgtgcaccaccatgcctgggctaattttttttttttttttaattcttaaaaaccttttttagagatggcatctcactacattgcctaggctggtctcgaactcctaggctcaaacgatcctcctgcctcagacttccaaagtgctgggatgacaggtgtgggccaccaagcccggtctctatgtccatctttctgatttaaataaataaataaaagttaccaccctcatggctccaaggccaaagcttctagcttctgcaacaccaaagcgtgctgacaagccaggaggcactgactgctgaccgtgagtcgctgtcttcccctcgcttaaggggtctcccgggaaaatggcacaagccggtcccgggggccagggcccactcgacagcccaggaagcgcgggcaatggagctacccggcccagaagcgaaatcccgccccgggctcgcccccggcgccttggatctgggccccggcgctgcgccccccacctggactccgccgccggccccggcctccccacggccccgccggccctgcccctggagacctgagggcgccctcctcccggggaactgcgacccggaatcctggcctcgcccctgtcgcgctcgctgagtgcggggacggtgcccagcgctcggcacccagccccgaggccaggaccgaggaaggcgaccgggcggacccccaaccactcccgctgtctgcacgcgcagcagcagcgcccagctcaccccgccattggtgttccccgcgcctgcagcgcgccgccggaagtgcctggcctcacttccggtcagaggccacgcccccggaagcggcggtgcaggtacgaaaagcgcgcgcggggattccaggagtcgtggtgaccagggaggggagccgggccagcgggcggcaggagactaggggagctgagccatgggcttgggggagagcggggccgggagctcgaaggagaccagaagagcagggtcgggggctcgagggagac

SEQ ID NO: 37569 - DNA, 2300 bp, Homo sapien
tctttttctttttttaagacggagtctcactctggcgcccaggctggagtgcagtgacagctcactgcagcctccgactcccgggttcaagcaattctcctgccccagcctcccaagtagctgggattacaggcacacctgctaccatgtccggctaatgtttgtattttcagtatagatgggttccaccatgttggccaggctggtctcaaactcctgacctccgctgatctgcccgccttggcctcccaaagtgctgggattacaggtgtaagccactgcacccaggcatttctttcttctttttgtttttttagagacagggttttactattacccaggctggagtgcagtggcatgatcacagctgactgcagccacagcctctggggctcaagtgaacctcccacctcagcctcctgagtagctgagactacaggtgtgtgccaccacttccggctaatttttctattttcagtagagatgggatttcaccatgttggccgagctggtctcgaactcctgacctctggcgatcagcccaccttggcctcccaaagtgctgggattacaggcgtgaaccacctcacccggccatttttgttttgctatcatccaggctggagttgcagtggcacaatcacagctgattgctgccataacctctgggtctcaagtgaacctcccacctcagcctcctgagtagctgggactacaggtgtgcaccaccatgcctgggctaattttttttttttttttaattcttaaaaaccttttttagagatggcatctcactacattgcctaggctggtctcgaactcctaggctcaaacgatcctcctgcctcagacttccaaagtgctgggatgacaggtgtgggccaccaagcccggtctctatgtccatctttctgatttaaataaataaataaaagttaccaccctcatggctccaaggccaaagcttctagcttctgcaacaccaaagcgtgctgacaagccaggaggcactgactgctgaccgtgagtcgctgtcttcccctcgcttaaggggtctcccgggaaaatggcacaagccggtcccgggggccagggcccactcgacagcccaggaagcgcgggcaatggagctacccggcccagaagcgaaatcccgccccgggctcgcccccggcgccttggatctgggccccggcgctgcgccccccacctggactccgccgccggccccggcctccccacggccccgccggccctgcccctggagacctgagggcgccctcctcccggggaactgcgacccggaatcctggcctcgcccctgtcgcgctcgctgagtgcggggacggtgcccagcgctcggcacccagccccgaggccaggaccgaggaaggcgaccgggcggacccccaaccactcccgctgtctgcacgcgcagcagcagcgcccagctcaccccgccattggtgttccccgcgcctgcagcgcgccgccggaagtgcctggcctcacttccggtcagaggccacgcccccggaagcggcggtgcaggtacgaaaagcgcgcgcggggattccaggagtcgtggtgaccagggaggggagccgggccagcgggcggcaggagactaggggagctgagccatgggcttgggggagagcggggccgggagctcgaaggagaccagaagagcagggtcgggggctcgagggagacgaggagagcggggccgggggtttgggagagagacaaggagagcggggcggaggcttgggggagaccaggagtaaatcacaaaaatttactttggaaaccgtggcttctggcagaaacagatcagtgtcgggacaaagtacacgggcctggtgtgaaactaagccacaaacccatttaccctgtctgacctgcctccgccaccaggacccagtctcagtgaaatgggaaaggttcccttgtcctcctcgaagggcgtgcgatgaggatgtggctcacttcttcagtgccccgcttctcaagcctctaggggaacatacagacaggcaggctgaggggctcccaccccacggcagtgtctaggggtgaatgtttgcagctcctgaagccccagcaggcatgtgttagagggtgctctttcagtttagccttgtaggtggcttgtgttagtcagctgttagactccctgccttatcgcaaggacagagggctttctgtatccctaggtttcttgccttgatgtactggagcaatcagatcacacggcggcttggagagtgagtgcaaggttttatgagtggaattag

SEQ ID NO: 37570 - DNA, 2300 bp, Homo sapien
taccttccttctccacaagtcagtactcaggtgcagaggacaacatcacctttccagagcgtgctcttgctcctgcgtctacccccaggaaccccctgcttataggcacacagtgaggaacaacagtccccgtgcctgattggcaccaaaataaccacgcagtttatcctgtggtcctcaggtcaggcctttggattaacaggaacttctttcagtctagtgggacctggcctctctgtagcaggcttccagattcccaggaaatgtgtggctgtagacacaggtccacccagccaggcccggctagtcctccctcctgtgataggagtttataccccacccactctgctcctgctgtggctactgtgggacctggcacccaggggggccactggaagtcacaagggtccttcctgctcccataggtgtgcaggtccaggtccagaggactctgagggcgatgcctccgccaggtccctgctgaaaaaaggaccctggagaaatgctggagggccaggaccaactttcctttatttattttgagacaagatcctgctctgttgcccaggctggaggagagtggcgtgatcgcggttcactgtaacctccgcctccctggctgaagccatcctcctgcctcagcatcccacatagctgggaccacaggcatgagccgccacacccagctaatttctgtatttttagtagagatggggttttgtcacgttgcccaggctggtcacgaactcctgagctcaagcgatccacccacctcagcctcccaaagtgctgagattacaggcgtgagccactgcgcccagccaggaccaacttttctggggtccacacctggacaagacacagggttcaggaccagtgatccttcttggaagttgtggtgtctgagaaaagggaccagatgataaggaagggggcagggaagtgctgggtagaggagggcgtggtctctggccagggctccacacccaggcctgtgcccagggacctgggtgaggacaggcatttctgtttttttgcccaaatgttgcatttcccgagcccgccacgtccccgtcctgtgcctataaaaaaaccccagtggttttttatagtgggcagagacacaagccgctggacgtcaagaggacgtggaaagcacaccaacaggcaccagcaggccatcaactgatggaaccatgagtttggcaggggcggtcagaggagagcccaggctgctcagcagcccgactccaggggaaaatcaccttcccactccaactgccttctggctcccccatctgctgagggctaattccactcataaaaccttgcactcactctccaagccgccgtgtgatctgattgctccagtacatcaaggcaagaaacctagggatacagaaagccctctgtccttgcgataaggcagggagtctaacagctgactaacacaagccacctacaaggctaaactgaaagagcaccctctaacacatgcctgctggggcttcaggagctgcaaacattcacccctagacactgccgtggggtgggagcccctcagcctgcctgtctgtatgttcccctagaggcttgagaagcggggcactgaagaagtgagccacatcctcatcgcacgcccttcgaggaggacaagggaacctttcccatttcactgagactgggtcctggtggcggaggcaggtcagacagggtaaatgggtttgtggcttagtttcacaccaggcccgtgtactttgtcccgacactgatctgtttctgccagaagccacggtttccaaagtaaatttttgtgatttactcctggtctcccccaagcctccgccccgctctccttgtctctctcccaaacccccggccccgctctcctcgtctccctcgagcccccgaccctgctcttctggtctccttcgagctcccggccccgctctcccccaagcccatggctcagctcccctagtctcctgccgcccgctggcccggctcccctccctggtcaccacgactcctggaatccccgcgcgcgcttttcgtacctgcaccgccgcttccgggggcgtggcctctgaccggaagtgaggccaggcacttccggcggcgcgctgcaggcgcggggaacaccaatggcggggtgagctgggcgctgctgctgcgcgtgcagacagcgggagtggttgggggtccgcccggtcgccttcctcggtcctggcctcggggctgggtgccgagcgctgggcaccgtccccgcactcagcgagcgcgacaggggcgaggccagg

SEQ ID NO: 37571 - DNA, 2300 bp, Homo sapien
tcgggccttggtgctcccgtcgccggctgggccgggtgcgaaaggcggctgtttgctccgcagcaggagaacgcgattcagacgatggagctgcggaactacttctccctgtactgcctgcaccaggagacgcagctcatccacgtctacctgcccctcacctcccacatcctccgcgccttcgtcaactctcagatccaagggcacaaggaggtgagtccgccctgctccggccgccgtctcggccacggcctttctttgtccctccgcccttccttcaagcccggcagcgcggtggccggccgccctagagaggttctttagtggagttgggctccgcatgggccttggaacacggtgctcgcccggatcttctagtctcctgtgtagccaaaatcagaatcgtgagggtgtccctgtgattcctggggggcggagggaggagcagacagggagagtttgcctcctggagggatttgagaagtcggaggtaaagcccgcagagctcccgcaccctgcggctgagagaaggtttctagcgcttcggagcgccgcaggtggctgttcttccagagagccctggccggcttcctccagagcagatggcggttccttcagcctgggagaagaaacgctcccaaggtcctgggacaggcctccgttgatttctggtggccagctcactgcagcaccgctgggattacaggcgagcaccttgtgcccggctgaaattaagtttattaagtagctgcaagtagctttcaagccatggtctgtggtgtgtgtggaatggcaccgagtgtctggggtggtcacgagattccacactgtccccgggaggtgcttggtgccgtgggtgccgtccagcactttgggaatggcaggctggaggcggccgtggtggggctggagaggcggtagacagccgccgtgttaggagcatcactgtgagatggccagggtctcagggaccaggttggacttggacatgtgagtggccgggtgtgtcctcagtgaaggaatgggaccaacaggcgcccggagcatgatgccataaccccagtcctaccaggttttttattgtggtggtgaggaatttccagccctgtgatgctgtgtgcgctgtggtccagtgactcagcctcccctgcaggcccccagggtgcgccctgcccttctctggccacctgagcccctgcacggcaggtcttggcctgacccctgcctcactgccgcgctcccctcctcacatccacagcatccgttccttgccctggttccaaaagtgcttggcgagtggggccgccgtttgcattccggtttgggtattattgatttggtggatgtggtctttgtgtttttggtttgctttttggttttgaggtggagtcttgctctgtcacccaagctggagtgcagtggtgcaatcacagctcactgcagcctcaacctcccgagtagctgggaccacaggcaggtgccaccacatccgactcatatttctgattttctgtggagacagggtgtccgtgtgttgcccaggctggccttggtgtttgacctgccaaggcttccatgaggccagtgcccgcacggcagctagagcatgtactggcagtgacgcgatagtaacgtttctcacgattccacggcaggcagatttgcagccctttggtcctgggtgcagggatcgaagcgtgggtgtctgtgaccacaggtcacatgtcgctggtccactcctcatttgggcttcctctgtgcaggatgggcagcactggttctgccagaggtttgaggagctggcgcacctgagggcccctccctccctgtcactggcaggcgaaggaactgggatcagagcgtgaggaggagccccggccccgcctgctgatcttgttctcttcgcttccctttcagatgagcaaggtgtggaacgacctgaggcccaagctcagctgcctctttgcgggaccacacagcaccctgaccccaccgtgctccccgccggaggacggcctgtgtcctcactagcgcctgaggctgaggtggtgctccctgcggccgcactaaaacctctttccaaacggtgtgtcccggtgtaattccctttggacggcagctcccctccccgccacgccccgtgctgcagctggagcagaggagctcacgcctgcgggtcgggaggcgcatccgtggaccatgggggcagctgggccacactgtccttcgccctgtggcctgctagcctggtcgagagaggtggtggggttctctggaatggtttcctcctgacacccaga

SEQ ID NO: 37572 - DNA, 2300 bp, Homo sapien
gtgagtgagtggttgtgtgaatgaatgcaggatgcagtgcgtgagtgagtgagtgggtgaatgaatgaatgcaggatgcagtgagtgagtgagtgggtgaatgaatgcaggatgcagtgagtaagtgggtgaatgaatgcaggatgcagtgagtgagtggttgcgtgaatgaatgcaggatgcagtgcatgagtgagtgagtgagtgaatgaatgaatgcaggatgcagtgagtgggtgggtgaatgaatgcaggatgcagtgagtgagtgagtgagtggttgtgtgaatgaattcaggatgcagagtgagtgagtgggtgaatgaatgaatgcaggatgcagtgagtgagtgggtgggtgagtgaatgcaggatgcagtgagtgagtgggtgaatgaatgcagggtgcagtgagtgagtggttgcgtgaatgaaagcaggatgcagtgagtgagtgagtgggtgaatgaatgcaggatgaagtgcatgagtgagtgggtgggtagatgaatgaatgcaggatgcagtgagtgggtgagtgagtgggtgaatgaatgcaggatgcagtgagtgtgggtgaatgaatgtatgaagaagcagtgagtgagtgagtggatgaatgaatgcaggatgcagtgagtgagtgagtgggtggatgaatgaatgcaggatgcagttagtgagtgagtgaatgaatgcaggatgcagttagtgagtgagtgaatgaatgcaggatgcagtaagtgagtgagtgggtgaatgaatgaatgcaggatgcagtgagtgaatgaatgaatgtaggatgcagtaagtgagtgagtgggtgaatgaatgaatgcaggatgcagtgagtgagtgactgaatgaatgcagaatgcagtgagtgggttggtgaatgaatgaatgcaggatgcagtgcgtgagtgggtgaatgaatgtacgaagaagcagtaagtgagtgagtgagtgaatggatgaatgaatgcaggatgcagtgcatgagtgagtgggtggatgaatgaatgcaggatgcagtgagtgagtgggtgaatgaacgtatgaagaagcagtaagtgagtgagtgagtgaatggatgaatgaatgcaggatgcagtgcatgagtgagtgggtggatgaatgaatgcaggatgcagtgagtgagtgggtgagtgggtgaatgaatgcaggatgcaataagtgagtgaatgagtgaatgcaggatgcagagagtgagtgggtgagtgggtgaatgaatgaatgcaggatgcagtgagtgagtgggtgagtgggtgaatgaatgcaggatgcagtgcgtgagtgggtgaatgaatgaatgcaggatgcagtgagtgagtgggtgaatgaatgaatgcaggatgcagtgagtgagtggctggatgaatgaatgcaggatgcagtgagtgagtggctggatgaatgcaggatgcggtgagtgtgtgagtggatgaatgaatgtaggatgcagtgagtgagtgggtgaatgaatgaatgcaggatgcagtgagtgagtgggtgaatgaatgaatgcaggatgcagtgagtgagtgggtgaatgattgcaggatgcagtgagtgagtgagtggctggatgaatgcaggatgcggtgagtgagtgtgtgagtggatgaatgaatgtaggatgcagtgagtgagtgggtgaatgaatgaatgcaggatgcagtgcgtgggtgagcgaatgagtgggtgagtggatgaatgaggaagtgcgagtcagaaaaccccagtgtaaccggtgaatgagcgaacaagggcgtgactgggcgaggagagatgggagtgaatgagggtgcggtgggtgcaggcttgcgcctgaggtagtgcacctgcgagtccggaggtccaacctgaggggaggtaacctgcgccaccagcaggctccgtgtccacgtggacggggaggggcatgtgggcgtggctaggcgggttgtaggcgtggcgaggccgggcgaggagcgcggcgggcccgcaggggcggactgtgggcgtggcgcgcgggggagggggcgtgaccaggcggggtgtgggcggggcgagggcgcggcgcggcagggctgcgcggccgggtggcgcgggaggaagtcacgtgggagcgcgggctcacatgactggccgcgcgatggacccgctgcccgcggctgcagtcggggcggcagctgaggcggaggctgacgaggaggcggatcccccggcgtcaggtagggcgtggggcggcggtagcccccacctgcccagggcgcgcggcccgaccacccccggcg

SEQ ID NO: 37573 - DNA, 2300 bp, Homo sapien
gtggagcttgcagtgagccgagatcgtgccactgcactccagcctaggcgacagagcaacactccgtctaaataaaaaaaaaaaaaattgtcatcccttattgtacagatgcggaaactgaggtggaggcattaagtgacctgcccaaagatacaccactgacagcatgatgaggagtagtcaaacctggtactaggcatgggaagactctgcttctttttcgctcttttaaacaccgttaggatgggatgggtgtggtggctcatgcctatagtcccggcactttgggaagctgagggaggaagactgcttgaggccaggagtttgagaccagcctgggcaacacagtgagatgctatctacaaataaagaaattagctgggcacggtggcacataccttcagtcccaagtacttggcaatgtacttaatgtcactgaactgtacactaaattgcatattaaaatggctaggccctgcgcggtggttcacgcttgtaatcctggcactttgggaggctgaggtgggaggattctcttgaggctggaaggtcccgattgcagcggcgctgtgattatgccaccgcactctagcctgggcaacagagcgagaccctatctctgaaaacaaacaaaacaaaaaaactataggatgaaatatacataaaatttacctttttggcattttattttattttttcgaagacagggtctcgctatgttgccctgactggtcttgaactcttgggctcaagtgatcctcctgtcttggcctcccaaagtactgggaagagaggtgtgagccaccgcgcagggcctagccattttaatatgaagtttagtatacagttcagtggcatcaagtacattcaccatgttgtaccatcaccaccgtcatctccaaaacgttctcatcctcccaaattgaaggtccgtccccgataaacactccccactctccaccccagcctctgggtaccacctgttttatttatttatttaattttcgtagagatgagggctggcgtgcggggggtggtggtgctatgttggcaaggctggtctccaactcctaagctcaagcgatcttcccacctcagcctcccaaagtgctgggataacaggcgtgatccactgggttgttttctaggatgattaagacatcccccaaccagtggttgtcctccactccggcaaaaaacaagatagaagccacatgcacccaatgcccgtcccgtgagcacccgcgcagagcgaaccgctccggtccctccggagtcagcctcgagctccacgcggcgaggacccgcccccgcccccacgtgacccgcgctgtcccgcgctgaaggcggcggcctcggatggactgaaccactgtgaaagcccgaatggggggaaacaggcagtgacggccgctagggaaggactgggggtaagcgattaaagaaacttccatacatttttgtatcgcgccaggcagtcgtccttctagtcgtgtgggccctctctggctcgccccgaattccttttctattttgaagtagtctgtccttttgctcagtcagtaggcgagtccaagtgacagacacggacaggggggactttagtaacgtaaactaaacggtttccctagcgaaaggctcagacgccctgagcaatcgcctgttgagtctccactcttccagggtattaactgttgagttagaggacattttcctagcattccgggtactaaaatcatttcttgtccccgccttcagctccacaaatagttcagtcccgccccgcagcgtccgacgggaaaggaaagggggaggacgccatgttggacggaaccatctgctgccacacatggggtggtcaatgctcccatgagtttactgatgcacagaaacaaccttgctgaatggaattaagcactttcttgtcacaaatatatcagtttgatgattttcgggcgcggtcttgtggatgcgagtcctctcagggtcgttcgtgaggccccagggcgtgggtgcgccccccgccccgcggccttggtgcggcctccccgtcgcacgcacatggctgggctgtagccgtcgcggcgcgcggtgcggcctgggagagtcggaagcgcggcggccgcggagccctgcgagtaggcagcgttgggcccatgcaggacgcggagaacgtggcggtgcccgaggcggccgaggagcgcgccgagcccggccagcagcagccggccgccgagccgccgccagccgaggggctgctgcggcccgcggggcccggcgctccggaggccgcggggacc

SEQ ID NO: 37574 - DNA, 2300 bp, Homo sapien
tgcttggatcatttttctcgtatttttattagggacaggtttcaccatgttggccaggctggtcttgaactcctggcctcaggtaatctgcctgcctcggcctcccaaaatgctgggattacaggcgtgagccactgagcctggccgtgttctaaattctgacacgtgatgctttccagcagccctgcgaggcatttcatcacatcaagaacagcttcacctaccactaagaaaaaaatactgttatttaatctcagtgggggtggcagctcccacctgtagtccctgctacttgggaggctgaggcaggaggattgctagagcccaggagttccaggctagcctgggcagcataacaagaccctgtctctttacaaagaaaaaaaaaagttgtttcaggagcttgtatattctccagtctcctagtttaagtgccggtctctgccctgatagtgtttttcaaaaaggctctttgtgatataattaagaaatgtgtatttgggctctgcctggctcttggcactcagcgtctaaacccttgtaatttccaaagtggtaagtgtctttttgtagacgaggacttgattgatggctggggctccttgccagggaaccaaccacgtgattagagggtgggaccttttaggtctccccctgccacccagaaggaagagggctgaaagttgagttgatcaccggtgctcagtgatgtcattaatcacgcctctataatgagatcttcatagaaacccaaaaggaccaggttcaggggctccatgcagcggaacaggtggaggcttctgcagggtggtggcctggagagcacagggaggctctgcgcttctcctccatctgccttttcgtctatatcctctgtaacgtccgttataataagctggcaaacctagctctctgaattctgtaagctgctgcagtaaattaatggaacccaagaagcgagggatagtgggagccctgctttgtagcctgtcggtcagaaccggaggtgacagcccactacttgcgactgccatctgaaatgggggccagtctttggggctgagccttcagcctgtgggatctgatgctaattcctggtagatagtgtctgaattggattaagttagaggacacccagctggtggcccctggagaactgcttgatgcgacacccacgtccggtgtcaggcgttgtgttgagtgttacgtgagtaggaaagacactgtcacatccctgtctcctgcagttcagttgtttatccttagagctttttaacctaaggaatattgggtaaagattgttctgaacgaaggtgcgtggtggtgggctctgcagcggagagaggtggggaagctcaccccagacgcgcttcctctttgggttttttccccatcccctgtgaatggccatccagttcacggcctgaaaacatgaaaatcactgggaacaggaggtgggagaagagttactactttcatcccagttcactcgagagagggttcctccttgaataatttctggtaatttgtattcacagcacaaatgtgctgtgaatatattgagcatttaaatatttacttgtttgctaaaatcttctgtaaaaagtcagttttcattgacattgggatgggattctgcctgcctagatgttgcaacaaacctttcaaaatctaggcatctctggaagatctaatagtggatattcttgagatggtcttcttcatttgcattgtgcattgttaaaagcttttcactgttattctcctgtagtctttggttattaccagaacttaattgacctgtcttgactgtttacatttccatcaaagggagagaggagagttccagtccccccagctgtcatgtttaaaatctgaaacaagctagggttaggatttcttttgctcacagtgaaagcatttagacaattcattgtctcttcttgaagacttgtttagtgtgctcagttaatgtattaatgtttttcttggtaaaaatgatcatttgaaaaatctctcttgttcagaattactgggagatgtactcaaagatcggccccaggaagcagatggaatcgattcggtgattgtagtggacaatgtccctcaggtgggacccgaccgacttgagaaactcaaaaatgtcatccacaagatcttttccaagtttgggaaaatcacaaatgatttttatcctgaagaggatgggaagacaaaagggtgagtgttctcctgttggagaagtatcatctgtgtctggcacgtcatgatgagggagtgttgcaggagatccttactaa

SEQ ID NO: 37575 - DNA, 2300 bp, Homo sapien
gcaccactgcactccagcctgggcaacagagtgagactccgtctcaaaaataaataaataaataaatgtttttgtcaccctacaaagaaacaacatacctgttagcagcctctccgcccagctcctggcatcacgaatgtctatgatttccctattctgaacacacagctggaatcggatactatgccaccttctgtgtttgacctccttcacggagcacagcgttcccacagctggtccacggtgctgagtgtcagcagtaatctcttgttgggtggaccccgtttcttggcctccttcctctgttgatggacatcagggcagttttccctcagactcctcgagtagggcaggacttcttgaaggttatggctacaggacaccccactgtctgaagtggtttacccagccccattggtgtgcctttagggccctcaggaccctggcctgcagcctgcagtgtggaccctgggactgcttgtgcccaagtgtggcgggcagggcggctcctggaggtgggatctgggtcagagttacttcatgcatgtccagtggcttccagtagacgtggtgccggcagttctccagccttagaaccgtcttccatcctgagggctgtggctttcatcactgcacatgctcgtgtgtgaaccaggcatgcacactgaatctttcattgtgacgttgatctttgatttaaaccttttctcatattttcactgtccagaatgtcaccccttcccccttttttttaaacagggtgttgtcacaaattttgaaattttccgaatgagggagaaacaggtacctgtggatgtggtcgagatgaaaggcaagttgtattttagtcactttgaggcgaatggggcctacgtgctgttttactcttggctttaacacttccatgcgaggggttgtctgagcagctgagtcaggactgtgagccctcaccatgaatagtcatctccaggtcacagaacgtgtttagagcctgggcaacatagtgagaccctctctgtacaaaaaacaaataaaaaaaattagccaggtgtggtggtgcgcaccgatagtcccagctgtttgagacgctgaagcgggaggatcacttgagcccaggagcagaggttgcagtgaactgagattgcgcccctgcactccagcctgggtgacggagcaagaccctgtctaaaaaaaagagaaaagagattgagcctgtgttcttgtttggctttttgttttgccatggagaaaaggaggaaggaagggttaaaaataggtgagaaaatgggaaacatggccgcccttccaggcagggagaccggaggtcaggatcccactgtaggtgcacactgggtgcgagggaagcggcatccacagctgctgacaatgtcgggctcctgcggtcctgctgtgggtgtcctgctctcaggaagggagcagtttcacgtaggtcactccacacaagtggaagcagctgtctctgaaactccaggaatgtgcacctttcctgctgttgcttgctctcccgtccttttaatgaacttttacacgtcgggggatatttctctgtggttgaatagtgaacattttaactgatcaagagcactatgttctgaattgaccaaaaagggaggggtctgttttgtgcattttagaaaccatcatagcctttgcctgggaaccaaatggaagtaagtttgctgtgctgcacggagaggctccgcggatatctgtgtctttctaccacgtcaaaaacaacgggaagattgaactcatcagtaagtaacctggtccctttcctcttctgagtaggtcagcacagatgatgacccagtcgctgcccaacagtgagcatttgactggcctaggaccactgctgggcaggccgggactcgcctatgaatggggtgtggcctcggctgatggaagtgagcgatggcctggaggtgccgcctccttgcagggtgtctctctgagccccgttgagccctcacgtttaagcgagtatttccaaggcttccattctctgccatcatctcaagtgaagctttttctcttctggctgtagctgctgtccctgggcttggggtcacttcctgtggacatactcctgccagtccccagtctgggtcaggtgcctttgaccagggtgcgcagagctgttgcacacagctgtactctgcccccgtgcacccggttccaggggtgccacactgcacccacctggggctcgctcctcacagtggtgcgtgggccctcgcctgtctcacggcacctgctgcctgtgccctcagctcctc

SEQ ID NO: 37576 - DNA, 2300 bp, Homo sapien
cagggtgcactgccctcccacatctcctcccctcctccccacgtcagcctgccccatgcctcttttttggatgtaccacaggctgaggggagagaggccacaggttgtcagctctgtttgagatgcagggagcatatgctctgagggggacttgagccagccccagctggccttcacttctcactgttccagcggctctgcccgagatccattccggaagtaagagttagtacctgcaaagatgatgactgtagtcagtttcaacaagcatacagcttatccaaagacgccttgtcgctaggagagtggctttggtcttttggggtcacacgtctctgacatctctctgttggggtccctgcagcagtgaacatttgctgtaaagggaattctttgtccagttacctcaggaaataagatagtattgttttgaaatacccctgtcgcatcttcttttttttcccatttaaagtatggatcatgacttagggggtacttggcgatggactttgtaaaattgttttccgaggtggtccagcattaccagctctgccctcatgggcagcatgagcacggccaagtcctccagccttggctgccccggcactgtggaagccctcgcagctcgtgacaggcgcgctctttcctttcagagatgttcgacaagcagcaggcgaacaccatcttctggagcccccaaggacagttcgtggtgttggcgggcctgaggaggtaggtgtctgcgctctgagcctgtccgccctgtgagtagcgctctgctgtggcagagacccctcaggcgcctgcacccggcttcttggtagagagagtattgtgcgctgaaagggttgccccagtgtcagtggataggacttcattgaacctctgcagacccacggtactccaggactcaggccaagcccgcacagagtgaaataagcgctcccagatgctttcgtgaagtgaccaggcagacctgtctgcgggttgtggttctctgtggttaaacaagtgccttccagccatccagtaacctccccccgggggtcagtcccttgtcttctagtgggaagggtattcgttacacagctgtgaggctgccttacctttgtggttggtgtcacggtgtcggtctcagctgtgttccagcagtgtgtcgaaatcatggagaagcttccagctttctgctctgagttaaaagaatacccttttgttgctgctctcccttgcttcattgtccacacttgctactgtatttttggaggcttacttagcctcagataacatttccagtaaaaataatatgatggcagtcatatgtaatactcactgcacactctgcatctgtgatttggtaagtctcacagcggccaccagaggctgttgctgtgcttgtttccatgttaacgccgaggctggctccctggggaccccatgccgcagcacctctcaggagtgggatgccaggaggtatgcgtctccatgaagcctgacggtcctgtctgtctttgcagtatgaacggtgccttagcgtttgtggacacttcggactgcacggtcatgaacatcgcagagcactacatggcttccgacgtcgaatgggatcctactgggcgctacgtcgtcacctctgtgtcctggtggagccataaggtgcaggcctgtggggcatagttttgactgtggatagaagcagggagtgctggctagctgctgactctggtgctgtcctgggacctcagggaaggggcaccaagcctctgtgttgaacagaagccttggctggtgttagtggcaggaggaggaggattctgggttgtagaagaggtggcgccgagtgcaggagcagcccctgctcatggttgcggggaggtggggggtcttaccctgggcccagggacccctgaaaaggagtgagaatgtctgcagagaggagtcgtttcctttgaagtctgaacagagttccataaccgcagacattaagatctgttttggggtcagtggttgagtccagctgccgcgttacccacaactcgtattccaaaactgctggttaagtttgtcaaggactttcagtatttagtgacttgtaaaaacattgatggaggcactgatacttgaactagtccatgccaatagagcctgtgaaaccaaacgcgggtaattttgtttaatgagatacagaatttgtaggaatatcaacttcccaaatgttactgcaagtgtctagagttagaaatcttcgcattcgaatcaggatatgttgatcacagcctgtgtccaggtatgttcagatgtca

SEQ ID NO: 37577 - DNA, 2300 bp, Homo sapien
gtcgaatgggatcctactgggcgctacgtcgtcacctctgtgtcctggtggagccataaggtgcaggcctgtggggcatagttttgactgtggatagaagcagggagtgctggctagctgctgactctggtgctgtcctgggacctcagggaaggggcaccaagcctctgtgttgaacagaagccttggctggtgttagtggcaggaggaggaggattctgggttgtagaagaggtggcgccgagtgcaggagcagcccctgctcatggttgcggggaggtggggggtcttaccctgggcccagggacccctgaaaaggagtgagaatgtctgcagagaggagtcgtttcctttgaagtctgaacagagttccataaccgcagacattaagatctgttttggggtcagtggttgagtccagctgccgcgttacccacaactcgtattccaaaactgctggttaagtttgtcaaggactttcagtatttagtgacttgtaaaaacattgatggaggcactgatacttgaactagtccatgccaatagagcctgtgaaaccaaacgcgggtaattttgtttaatgagatacagaatttgtaggaatatcaacttcccaaatgttactgcaagtgtctagagttagaaatcttcgcattcgaatcaggatatgttgatcacagcctgtgtccaggtatgttcagatgtcactgcggtggggcctgccttgacacttgaaatcactttaggccaggcacagtggctcacacctgtaatcccagcacttcaggaggcagaggtagaaaaatcacttgaacccaggagtttgagactagcctgagcaacatagcgaaaccctagccccattaaaaaaaaaaaaaaaaaaaagactttttaagctgttgaccactctccttgagttatgaacacttagcttccaaaatgccggcctgcaacaaggagtttatgctgagtgccagtgaaggcgccctccttcatgagagaggcctgccatgaggagagcggaactaggcggcgtgtagtgatgcagttagcttacatccagcacagggctccgcacagctcacacccggcccagggctcagcagtgagtagtgctatgcagttagcttacgtttggcacagggttcagtccagtttaaatccagcacggggttcagcggcgcagtagtgaggcagttagcttacatccagcatggggttcttattgccagccagaatgtgcaggcctgtgctgtgatgagcgctgctccagctgctccgtgccccgcactccgggtcggttgcataatggaggtgtcttgcattgactgcccacctaccctgctgtcagctcagcacaggcagagctttgtttgcttcacacgtgtccccgatacccaggaccttgttcagcaagtgacatagtcacggttgtggctctctgacccctctgtgtcctggtgtgtccctgccctggcctaggtggacaacgcgtactggctgtggactttccagggacgcctcctgcagaagaacaacaaggaccgcttctgccagctgctgtggcggccccggcctcccacactcctgagccaggaacagatcaaggtcagcatgcccccacccccgggtgcagggcacatggaggcaattgtggcgttgaaaaggtgtcagttttttctgttattgttagggtggtgactgggggataaaaacgtgacatttgcaaggattctttgaagagacgcaggaacagtgagaactgaatggaatagaacagctttaggatagtaacttgaggctttcagcttctttagggaagttttgcatgaacccgaggggtggataaaaagatgccagggccattaaaaagtcctgctgggattagaagcggcttgtctgggatttacattattgtggtaaaataggccgttggtcttaggtcagagcaaagaggagggttaaatcccagggagaaagtccgtctcaaagtgaaagatggaggaaggagcaggcacgagcgctcctgggatgctgtgttgtgtgaatgaccctgggtgtcaaggaggaaggagcaggcacgagcgctcctgggatgctgtgttctgtgaatgaccctgggtgtcatggaggaaggagcaggcgcgagctctcctgggaatccgtgttctgtgaatgaccctgggtgtcaaggaggaaggagcaggcgcgagcgctcctgggatgctgtgttctgtgaatgaccctgggtgtcatggaggaaggagcaggcgcgagcgctcctgggatgctgtgttctg

SEQ ID NO: 37578 - DNA, 2300 bp, Homo sapien
ccaacaagcccagctgacctctcaggcttaagcgattctcccacctcagcctcctgagtggctgggattgcaggcgcccgccaccaagcctggctaatttttgtatttttatttttagtagagacaggtttcaccacgttggccaggctggtcttgaactcctgacctcaagtgatccacccacttcggcctcccacagtgctgggattacaggtgtgagccactgcacacggctgatagtgagaaatttctaagctgagacaggcatcacagggtgacattgccagaggctgtcaccttatttacatacgtgcaattgcatatatgtatgtatacaacatagacatattatacatgcataatacaggtctatatgtatgtgtacaatatataaacatatatactacatacatacacataggtaacatgtatgcattacacatacgtataaacatattatctactgtgagtgtgtatataatatacacatatattttgtggtggttgtttgttgcttttcccccccactagaatacaggagggcaggggccttgcccgtctccctcacttccacatttccagggcccggtgggttcggaactcctttgggactggctgcagggagtggaagagtgaagagatgaccttggttggaaggctgcctcgggagtccatcggagggggccaactaaaaatatcacggattgaaaaagttcttggggtggatggtggggatgtgaaagtgcttaatgccactgcagggagtgcttaaaaatggttaagatgggccgggcgcggcggctcacgcctgtaatcccagcactttgggaggccgaggcgggcggatcacgaggtcaggagttcgagaccatcctggctaacacggtgaaaccccgtctctactaaaaatacaaaaaattagccgggcgtggtggcgggcgcctgtaagtcccagctacccgggaggctgaggcaggagaatggcgtgaacccgggaggcggagcttgcagtgagccgagatcgggccactgtattccagcctgggcgacagagcgagactctgtctcaacaacaacaacaacgacaacaacaacaacaacaacaacaacaaaggttaagatggtaaattttatgttctatatattttaccataatttaaaaaaaaaatgactgggcctggcgcggtggctcacgcctgtaatcccagagctctgggaggctgaggcaggaggattgcttgagtctaggggttcaagaccaccctgggcaacatagtgagacccccgtttctattaaaaattaaaaattagccgggtgtggtggcacctgtctgtagttccatctacttgggaggctgaggtgggaggatggcttgaacccaggaggtcgaggctgcagtgagctgtgactgcaccgctgcaccccatcctggacgacacggtgagatcctgtctctaaaaaaataaacaaacaaacacacaaaactacattgatgccaagaacaattactgcatgctcactatgcattaggcatcttgctaagctctttacccgtgtcatctcgtttgtctcacatactccctgaaaggtagggtcactaacctattatattttacggattggcgacaacctcagagaggttaagtcacttgcccaaggtcacacagcgagtctcaagccccagccggtgagcatcacgatcctttgccaatgagccgatgctcgagaaagggtcggatagacaacaggcactgcataaaggttggttaacgggatcgtgtttggctgcaacgtggagctcccgggtcgaacggcgagacagctgcgcgtccccgagccgccgcgcgcccggtccgccggggcggagtcaacgccgcggattggctgctgagaaaggggcgtggctcgtggcggccggtgggcggagtcgatctctggccgtaaatacggcgccacatggcactggctcgcgagggcgggggcgggcgggctggccgggcgcaggcgcgctgagggcgggcgcccctcggcctccgtggcccctccggcggccgcgacgtctcgcgagaagacgaccggtaggaggggctcctgcgccgggggcggggccggcgagggctgcctctggggggtccgctagtcgcggggcggcggcggcggctgcgggcgcgaggtgaggggcgcgaggtgagggtcgcgaggtgaggggcgcggcgggcggcgggctcggggcgcggtctccctctctctcggccagtgctgggctcccagggcccgggcgggggtcccgggccgcgct

SEQ ID NO: 37579 - DNA, 2300 bp, Homo sapien
taccctggtgtcctctgtgtgtggtgtccctgtgtttcccaggctcaggtgggcttgtgtgggtcttggcccccagtgcctgctagcctcaggtgtcccctgtgttagacacctcctgccttcctttctgaagcttcgctttcttttatttttgttttgttttgtttttggagacagggtctcgctctgtcatccgggctggaatacactggtgcaatcacagctcactgcagcttcaacctcctgggctcaagtgatcttcccatctcagactcccaagtagctggggttacaggtgagcgccagcctgcccagctagttttttattttcagcagagatgaggtctcactgtgttgcccaggctgctctcaaactcctgggctcaagtgaccctcctgcatcaccctcccaaagtgctgggattacaggcatgagccatcacacctggcccctccaagttttttattatgataaaaatgtttaattttaaacgtaccatcttaaccattgttaagtgcactgttgtgtggcattaagcacattcgtattgtcgtgccaccaccaccatcatctccagagctttctcatcttcccaaactgaaactctgtccccattcagcactcgctccccattggtagaaggcagcagcttccactctctgatttctactacccgagctccctcagaaatggagtcacacagtattggtccttttgggactgaagtacttcacctcatgcaatgtcctctaggttcatcggtgtcgtggcaggtgtcagaactaacttcctttctgaggcggaataatgtcccattgtgtggaagaggcatggtttgtttatctgttcatcagttggtggacactgagttgcttctgccttcctgcgaatgtgaattgaatgctgctgtgaacagggtgtcagtgaatctgctgagggcttgttttccgtattctgggcatggccctttgtgtctgcctttgctggagcacctccccgggatgcgtttgtttataggatgttcagacgaatgtcagaacccactgggcggttcactcactgaggggggcccgcgtcccctccatttctgcattcccagttcttggtatggttcctctgaggttcggttttcctgagcacctggggtgtttgcagggatgtggaggggttcctgcagaagacaccacccacatccacgcacctgctcagattcccgggccatggtcggggccaccgcccgtggggatgactccggatgggagtggcagaaaagggcctgctgggccgaggggaggcgtctccgggaagagagggaggtgtgagcggggagaacccactttgattcttcgctgtttgcctgatgcgcagcaccacactgcgtagagacctttggctctggttttttctttttccactgaaacacagcaaattatacattttatgaaaattggcatcgtacaactggaaaatttaaccataaacttaaaactcttttaccctgttggcccccatcctccagctgtgtccacactttgagcacagtcatgagaatgacttggttgggtgcggggtggtgtcacaaagccctgtctcttgtgtgatggctgcgcctcgaatcagtgggagggcacctcgcccgtttacagttgggcaatgcttgggctgggcggcctggctgctcctggactcgcctcccagcgtctgatgctgtgtattttccatctgccccaggaatttgacacaggtgtgacttgcaggttgtgtgggtgatgcctccctccctctttcctcttaaagcatctcatgcttcttcattcgctgatacttacaacccccagtggatatttagtggagtttgctgtagtgcttttgccatttatttggactattggaaaaatttcaggtttggttttggccctatgtcttgatggagggcaagggttaggatttcagtttatcttcccggtgaggtctgagcacgtctgtgccctgaggtgggtggtttggtgaaggtggggctttaacctagctctgccacttaggaatcagaacacacacacacacgcgcgcacacacacacacacacacacactctctctcacacacacatcgggatatttttcttgtttccttcttccagagggtgtaggagttgtgttccaagtttgttcctgcaaaccctccgatgaggccagctgcattcatcggggcctggatggccgcacctctctctccccgccctgtctcctgcactcaggtgagaggctggcagggctgccgtaggggtggagagtgaacg

SEQ ID NO: 37580 - DNA, 2300 bp, Homo sapien
tctggactgagtactctgtgggtgccgggctgtgctgagggctggacgggacccaggaacagacaacaggtagagtggaggagggagcagcgaggagacttcccacaggggtggagacgctgagcactccaggcagacacagaggggcggctggagtgtggggatcctgggcctggcagggcctggggggttcggcaggcagagtgggccagggggtggcctgaggacgccaggggcagagccagccctcccaactgggcagtggggagccaagggagggtggcagagccgagccccatctctaagatatggggacagccctcagagccagctcccacccagctccagctcaggacaagcagtgggcatggaactgagatgcaggaaggccgaggtctggagacgcacgtgggctccccgaggtgacctaggggtgggcggccctcagccctgcccggagatccctggtcctactgagtcagccaccggggagaagataagggaccgccaggctcttaaggggcctgacgttgctgttgggtgaagtgcccgcccagaatgacctcagaggctgccggggccacctggcatatcaccctgcccgtctccgcagcttcctctggcagtgggtggatgtataatgtccgcccgctgccagagggttcacggcaccacagccctgctgagccctgctgagccccagctgggtccgacctcctgggtaccccagggacggggaggccaggcacgggggttgctgtgcgggttggacagtggtgatggtggacagagccactcccaagagtgttagagacctggggtgggggcatccaggcagaccaccctcaccccaccctgtgggacccaaaccagctcacttccctctctgggctcagcttcctcatttgcaaaatgaggccaagagtcacacccggcccggcctgtgaccccggagccccctccagcctcctgcctcactctggcaccaggcctccctgcagcttgcagagcaagcggggtaccgtctccccgaggtgcagcctggggggctgtggcaggtgatgggagcagctgtatttgagggcagggtctgtcggggagccccccagcgtggggagaggaggagggaccagggagtgtaacctggcagcccgcagcagttccggctgctgcttctgtcaatacggccttcctgttttggagattaaaccccggctgagcaaacagctttccaggcggcccctccctccaccccagccccagccttgtcttcaggtcctaaggctgggaccacctggaggctgtgggggtggtgggggatggaggggaccaagctttgccatccctgccctcaccaaggcctggaccacagcctgagcagcccagcccctgcccctgccgcagcctcctcccagccccccgccgtgggctcccccggaacccccccgtgcgatccttccaatccagggcagcctcactgtcctggacgcccggccactgcatcctctgcccttgtgtgacctcctgcaagaaggcgggagcacgccgttcccgggcctcatggccagacacaagcccaccttgtgaggaccccaggcgaggcaggagagccaccgcaagagccccaccaaggcacggccaggggagggcccgccatctcttggatggtttctgcgccgtggccactgacattgagggtggatcattcttggttgtggggctgttctgtgcatggggggctgtggggcagcctctctgggccctataggccagaccctactgtctgttcagccccagcccggtggcgacaaatgaaagtgtctccaaacattcactgtcaggtgtccccagaaaccaagacgagcactggataaccccgtctgggcaagtccctagcagatggcgtgcacagaaacgggctgcagagagaggacggtgcctccaatgcttggactttcctctgatgccagcctcagcccagcctctgccgccctgagagagactctgccccacctccccacacccgcctccaccatcccctcctgccagggtcccacccctgagcaacacggccctgccttctctctgcaaatccttcccagactaagctgcaacactggcagagcctcccaaggaagggaggagggaggacagaggccaaggcggctcctggccaccctcgcagcttcctccctccctggccacaaggacccaaagctcagagggatggatgaacagacaggaaggctcaggctggacacgtattgtatgaggtgggcctcagggttgcttttcctcct

SEQ ID NO: 37581 - DNA, 2300 bp, Homo sapien
acacagtgggcgaggggtctgggcatagcaggcaggcagggttgggaatggtgggggtgctactcacagctggagtctgctagtctcagggcagtgcccactccagctgcagtaatgggaatcagctgtgccaccctgcggtatccctcccccggccttgggagccggctgtgctgagcccagccaaccttcccatcaccctccttcctgccaccaagggctgctcacagaagctcctgggtcgggacactcactaggccacgcctgccttttggaaatccatgggccccctggcatctgggggcttcaaacactgccagttctgatgcctggccccagcctgggggttggcattcctgcgtctgtgtcaggagaggacagggaggtgcaggcttgcccgagccacagccaccaccatgctgagtcctgtccaggagtttccatctctgggcactgctactggcccagaggaagctggttcccaagacactgagtggggccgctctccatcagccgatgagtggacaggcgcctcggatggcttcctgccgagttaatgggtcacccattatgtctccacagatcttcccaggaccctgcaggaaggcaggccagagcagccccaaggaacagcccgggggagggaaggcagatggccacctcaaagccagccccgagcccttcccctctaggcctgagtgtcaagggcagacccagcccatggctttggggacctggtggcactgactccagcaggagaacccccgggctgagccctggcagttagaggaggcctggactcagatggggacagaacactgtctcagcctgatggcggctagaggaggagggtagggcccctggtcatgtgggtcctggctccgtgggcctgctttccacctgacctcagcaggcaggtctctcgggccattcgcacacccagctgcctgggagccccaaactgggactggtggaggggccctgcagaggggaagactagggtccaagaagcccatgaagccatgcgccagggccagagctggcctgcctggtctggatggtatgtcatccttgtgttacaagtgaggaaactgaggctcagggagtaacaccaccggttcaaggtcttaaagccgagaagtggcccctctgggttcggaaggcaggctgggccctggggcagcctctatccccagcccctcttccccaggaccctacggccccaagaggcttcactggcaactcggtcagccctctctagccccctccccagctcccctttgtcctgtccagggctgagcaccatcccacagcccacttccctaccagggctgtgtggcccagtgggcccctagagggagacctggggtctggatggggagggaagtgtttcaggctgaagctgagcctggggaagcgggcgggggtggctaggcgggccaccccctcaacagttttcagacctcaagaagtcaccacgaaattccattctcctgacagcaaagaaattgattcactcttgccaaagcctgcggcccccacaagaatgctgtaaagcttcctcccgctgcttccagacaggcagcagcatcaggtcccccactcctcccattcctggctacagagagacgcgggaaccccccctacccagttctatgcatgtgcccctgccaggctgggccatccacctctgtatggtcactcccttggtacaatatcccccttgctttctctacaatgggcacattgctcccacgacctgctgggtcaaaggcaccgcagtcaggggtagctggggagcaggagttgcgggggtggggcggctcagggcaggaagccccatcccctggcctgggaactgtggggagatggactcacagcatcttgtcaggtggggtgcagggtggcatggcacccaccatcggtgccactgatgtaaagtccaggtacagagcacaacccgtgcacatatttgggggcttggccatgcttggctgcaggggattgaggagggattgggcctcaagaaacggggctgggactaagtcacgaggtgcgtgaatatcaggcgggactttaactcagccagtggagagctatggagggttttgctctttgtgtgggtgtgtgagtggctatgatcctagttgtccagctgctgcgtggagaataagtaaagcaggtaggataggagtgggtgggatgggggtggaggctgcccaagtgattcagggaagagatgatggggatggatgaggctccgtctctgaaacaattcagatatgggagagcctgaagtc

SEQ ID NO: 37582 - DNA, 2300 bp, Homo sapien
gtgactgaagcacgtggggtcatggacacccctcagtccggaggctggggctgggctgggactcagctgactttgtgggggcagccaacccagtcactgggtccttttctccccggctcaccctcaagcctctccagctgcatggaggctccagggctaggctctggctgatcggaaggggtttatggcaggaggtgacgccatgggagacttgtcacttgggcacagccagcaccatctgctggggcatctgctttcggaggtggtgactgctaattacctggggccaggaagaggcctgggaacccccatcccccacaccacccagcgggtacaggggctaggggtggggcccctggggccctaagagcaaatgggctacagcgtccttagcggggggagagggtctgacagtggggccagacatttatccagtgaattttttcagagcacctactatgtcccaaaacctgttccaggtctgaatgacaccaggtcgctgctgtcttgcggctgacattcaggtagaggtaaggagaggggctccaagggcacttaaagaatttaaaatgccatctcaggcgtgaacataactccgaggggggcagtttagccacggtggtggcggtggtggtcgtggtggtcgcagagaccctgcttaggagggcacgggaagacagcgcagccacgggcagagccgcctccgtccacgcttccggaggacgtggcgggcagggggctcacaccctgctcaggcgacccttggccacttccgggcccctcgcccctcaccctcggctgccggcgcgcattcctgccgcccccgctcgtgcgaggggcgggcccgggcccgtgggaagggccggggatgggggccgtgtgccggggaggcggggtggggagggcgcacagctgggccgcatctggcccgagcgcaaggagaccaaatgggacagaaggcggcctttcatccggcgagggaagtggcggccttcgtttctcctcgccatggggcgcctgaggatttcggggagccaaccctcccgacggagggccaggatcgaggaaatcagccagggaggaaggagtggaatttggttctggtgctttctcgttagaacctcgtgtccccacctgcggcacaggtggccaagctcttgctctgtacaaataacggctcccctgaaccgagcgctcgggaagacccaggcgccaccccagtttgcaaggcctgccgcgtcccaaggggaggaagccgtgctcaggaggggaagcgcacagcgaggaagtaggatgtcccccgcggtgcgtcggagcccagagcccgggtctcagcaccctgcccgctgcgccgagggcgcgcccctcccgtgccgggacgcccggtgcatccccggacggcgctggccaggctgggtttcctcttcagggacaccggcgcgggccgggcccgtccccaagcccctcggcggcccgcaggggctacccggggcggggggggtgcggggcgtgcacgtgcgcgccgggggcggggccgctgcgccctctgggcagttcccagcccccagccgcggccccacgtgggtctgcgggcgtggagcggcgaccggcgcgaggccccgcccccgagcccgggagccaatgagcgcacgggggcgggaccggggcggggaggtttaagagcgcgggacactggtgctgcgctgctggactgcgccgccggagcgacgggcttcgggtcggtgcaaggcaggcgcacggggaagggcgcgccgcgcggccgccaccccaccatgctcaagcgctgcggccggcgcctgctgctggcgctggcgggcgcgctgctcgcctgcctgctggtgctcaccgccgacccgccgccgcctccactgcccgccgagcgcggccggcgcgcgctgcgcagcctggcgggccccgcgggggctgccccggcgcccgggctgggggcggcggcggcggcgcccggggcgctggtccgcgacgtgcacagtctgtccgagtacttcagcctgctcacccgcgcgcgcagagatgcgggcccgccgcccggggctgccccccgccccgccgacggccacccgcgccccctggccgagccgctcgcgccccgagacgtcttcatcgctgtcaagaccaccaaaaagttccaccgcgcgcgcctcgacctgctgctggagacctggatctcgcgccacaaggagatggtgagccccccgcggcctggactggcgggcgagcggggcggggacccaccatctggtccagctggtggcagtgtc

SEQ ID NO: 37583 - DNA, 2300 bp, Homo sapien
gctcatgcctataatcccagcactttgggaggctgaggcaggcggatcacctgaggtcaggagttcgagaccaggctaaccaacatggtaaagccctgtctctactaaaaatgaaaaaattagctgggtgtggtggtgggcacctgtaatgccagctactcaggaggctgagacaggaaaatagcttgagcccaggaggcagaggttgcagtgagccgagatgtgccactgcactccagcctaggcaacagagtgggactgtctcaaaaaaaaaaaaaagaagaagaaagtgtcctccagaagtatctccaccagccctggaaaactgaaaacccatctctgctttgctccacatccctggaaacctaccaggtcccctcacctctttttttttttttttttttttttttttgagatggagtctcgctgtgtcacccaggctggtgtgcagtggtgcgatcttggctcactgcaaccttcgcctcccgggttcaagcaattctcctgcctcagccttcttagtagctgggattacaggtgcatgccaccacacccagcaaatttttgtatttctagtagagatggggtttcaccatgttggtcaggctggtctcgaactcctgacctcgtgatctgccctcctcggcctcccaaagtgctgggattacaggcttcagccactgcgcctggccaccctcacttctttttttgcttcccagcagggggagttactaccagggctctttggggagccaggacccctcggccgagcaacctgggccgtccccaccgtgcgcagcggctggatccagggcctgcgctccctggcacagcaccccagcgccctgcgcttcctggccgaccatggtgagtgcgcccacaccccaccccattcctcatcctgcctgtgtgatcccagggaattcactgcaccttgctgaatctgagtgtctggtctgtgcgatgtctcagggttgttgcaaagactgcactgtgacagtacggctgtccagtgttctctggttggcaggtcaggccctaggagccaggacggctttctcagccacttacagatcagccgtgaggactcagtctttgaaactatttgggagccaggcgtggtgatgcgtggctatagtcccagctactcgggaggctgaagcaagaggatcacttgagcccaggggttcgaggctacagtgagcagtggttgagccactgcactccaacttaggcaacagagcaagaccccgtctcaaaaaaacaagaaacgaggctgggcacggtggctcacgcctgtaatctcagcactttgggaggccgaggcgggtggatcacctgaggtcaggagttcaagaccagcctggccaacatggtgaaaccctgtctctacgagaatacaaaaattagccgggcatgatggcgggtgcctgtaatcccagctacttgggaggctgaggtggcagaatggcttgaacctgggaggtggaagttgcagtgaactgagatcgcaccattgtactccaccctgggcaacagaacaagactctgtctcaaaaaaaaaaaaaaaaaaaacaacaagaaggaacgaattgggaagcatcacaagctgtgtgtgtttaacgctcggggggaggaggtgcttgtctccagggagcttcagttcctgttcttttttgcttttgagtggagaggcatttgggggcatcttggggggccctctgctatttgtatcttccctgaggccctctgcctcccccagctctattctggctcacccccttttccctctcttcccccatcccctacccaggtgcggtcgacaccatcttctccctgcagggagactccagcctgtttgtggcctcggcggccagtcagctcctggtgcacgtcctggctttgtccatgcgaggtggagccgaggggcagccctgcctgccggggggtgactggcccgcgtgtgcccagaagatcatggatcacgttgaagagtccttgtgctccgcggccacccccaaggtcactcaggccctgaacgtcctgaccacgaccttcgggcgctgccagagcccctggacggaagccctgtgggtgcggctgagtccccgcgtggcctgtctgctggagagagaccccatccccgccgcacactcgttcgtggacctgcttctctgtgtggctcggtcagggccccgggacgcagctggggggcctgggtgggcaactgttttcctcggataacgcccagggatgtcccactggcagccggagactctctgaggacatggcctgcagtg

SEQ ID NO: 37584 - DNA, 2300 bp, Homo sapien
ccctccccattcagcttcccgagtagctgggtccacaggtgcatgaaccacacctggctaactttgttatctttggtagagatggggtctcactatgttgcccaggctggtctcaaactcctggtctcaagcgatcatcctgcctcggcctcccaaagtgttgggatacagtcgtgagccactgctcccagccaagaatttctacatagcaaggcatgagagctcgagagcctcccagagctgtgtcttccagcttcaagtgcctcagacaggcaccgctgagtctgtcgggatgcgtggtgtgagcttcagggcccttgcccgtctaccacgacggcttctcttggtgcctcacaggccctcgccaggttgtgcgaaggcacatccagtaccgttagcttgccgttcacgatgccccccagttaagcagctgcaggctccctagcagcccacccaggcaccatcttgctgcaggacagactttccaaggtgtcctagggtgctgccgtacagtgaatccgggggcccttgtctgtcagcagctggtatgaaagtaccctccaggctgggcacggtggctcatgcctataatcccagcactttgggaggctgaggcaggcggatcacctgaggtcaggagttcgagaccaggctaaccaacatggtaaagccctgtctctactaaaaatgaaaaaattagctgggtgtggtggtgggcacctgtaatgccagctactcaggaggctgagacaggaaaatagcttgagcccaggaggcagaggttgcagtgagccgagatgtgccactgcactccagcctaggcaacagagtgggactgtctcaaaaaaaaaaaaaagaagaagaaagtgtcctccagaagtatctccaccagccctggaaaactgaaaacccatctctgctttgctccacatccctggaaacctaccaggtcccctcacctctttttttttttttttttttttttttttgagatggagtctcgctgtgtcacccaggctggtgtgcagtggtgcgatcttggctcactgcaaccttcgcctcccgggttcaagcaattctcctgcctcagccttcttagtagctgggattacaggtgcatgccaccacacccagcaaatttttgtatttctagtagagatggggtttcaccatgttggtcaggctggtctcgaactcctgacctcgtgatctgccctcctcggcctcccaaagtgctgggattacaggcttcagccactgcgcctggccaccctcacttctttttttgcttcccagcagggggagttactaccagggctctttggggagccaggacccctcggccgagcaacctgggccgtccccaccgtgcgcagcggctggatccagggcctgcgctccctggcacagcaccccagcgccctgcgcttcctggccgaccatggtgagtgcgcccacaccccaccccattcctcatcctgcctgtgtgatcccagggaattcactgcaccttgctgaatctgagtgtctggtctgtgcgatgtctcagggttgttgcaaagactgcactgtgacagtacggctgtccagtgttctctggttggcaggtcaggccctaggagccaggacggctttctcagccacttacagatcagccgtgaggactcagtctttgaaactatttgggagccaggcgtggtgatgcgtggctatagtcccagctactcgggaggctgaagcaagaggatcacttgagcccaggggttcgaggctacagtgagcagtggttgagccactgcactccaacttaggcaacagagcaagaccccgtctcaaaaaaacaagaaacgaggctgggcacggtggctcacgcctgtaatctcagcactttgggaggccgaggcgggtggatcacctgaggtcaggagttcaagaccagcctggccaacatggtgaaaccctgtctctacgagaatacaaaaattagccgggcatgatggcgggtgcctgtaatcccagctacttgggaggctgaggtggcagaatggcttgaacctgggaggtggaagttgcagtgaactgagatcgcaccattgtactccaccctgggcaacagaacaagactctgtctcaaaaaaaaaaaaaaaaaaaacaacaagaaggaacgaattgggaagcatcacaagctgtgtgtgtttaacgctcggggggaggaggtgcttgtctccagggagcttcagttcctgttcttttttgcttttgagtggagaggcatttgggggcatcttggggggccctct

SEQ ID NO: 37585 - DNA, 2300 bp, Homo sapien
atggtggctcacgcctgtaatcccagcactttgggagtctagggtgggtggatcacttgaggtcaggagtttgagaccagcctgaccaatatggtgaaactctgtctctactaaaaatacaaaaattagccaggggtcgtgggtgcctgtagtctcagctactcaggaggctgagacaggagaattgcttgaacctgggaggtggaggttgcagtgagctgagatcacaccactgcactccagcctggacatcagagcgagactccacctcaaaaaaaaaaaaaattgtggacctgtgcaatacaatattcaaatctggagccagactgcttgggttcaaatccaaactgtgccaatccagtagctgtaaggccttatgagttagcctctctgtgcctcattttcctcatctgatgggctggtagtggtactctcctaccgttgctgtagaatcatacaagtttacagtaagtgaagcacttagcacagtgctgttgttgagttttctttactccacaattacctaactgggtgaatgttagtatctcatttcacaatgaggaaccaaatttcagggaagataactgtgcatttcaaactttttcacacatgtagttctaaggatgtacgtgtgtgtgtgtgtgcagggggcatgcaagcgtcagggaagttgcttttccaaggttacccagcacggctgggcgcgttggctcacgctggtagtcccagcactttgggaggcctaggtgggcggatcacctaaagtcaggagttcgagaccagcctggccaacatggtgaaaccccgtctctactaaaaatacaaaattagctgggcgtggtggcccgcacctgtaatcccagctactcgggaggctgaggcaggagaatcgcttgaacccaggaggtggaggttgcagtgagtcaagattgagccattgcactccagtctgggcaaaaagagtgacactccgtctccataaataaataaataaaataaaggtgacccagcaaagtcagtgcttttaaatttttaaattttaatatccataggaattctgctttgtttcctaaatctggtgttggctcccaacaatcttgctataaaacaatgctttgggaacatgagccttgtctatccactggctttgagactctcgaacacacagttagtgttttgaactcaattttttggacctagtttttctgcctgtttgctttcttaaaacacagggtcttgctctgttgcccaggctggagtgccggggcaggatcatagctcactgcagccttgaacttctgggctcaagcgatcctcccgcctcagcctctggagtagctgggaccacaggcgcatgctaccaggtctggctgattttctttttttttttttgagacggagtctcgccctgtagcccaggctggagtgcagtggcaccatcttggctcactgcaacttccgcctcccaggttcaagagattctcctgcctcagtctcccgagtacttgggattacaggcgcgcgcctccacgtccggctaattttgatatcttagagatacaaaaattagagacgagacgggatttcgccatgttggccaggctggtctcgaactcctgacctcgtgatccgcccgcctgggcctcccagagcgctgggattacaggcgtgagccaccacgcctggcctttttttttttttttttttttttttttaaattttaagagatggggtctcgctttgttgcctaggctggtctcaactcctggcttcaagcaatcctcccaactgcgcctcctaaagggctggaattacaggcatgagccacagcgcggccgcggaggacttaatttgagaacctgaagctaaatgaccaagggctttggtgcacggatcaggacgcttctctccggcacatagttttctcgctcccgccggtgcagacactgggcgccctgcaggcgaagccccgcccctccggacacaaccccgcgccttcctcagagatccccgccctcgagacgccccgcccacccaccggatgctcggcatgaaccactaggcgcctggcgggggtgatctgtcggagcgaccggcttggcgcctgcctgtccccagcccctctcagcttgaactccttccttcaagtctgggccctcgaggcttccagagcggcctccaggggtgcagtctcagttccccacgccagccgtctccgtcctccgcctcctccgggcctggcaggtggcactgtccggaggcggagccttgggcgaggggtggttgcggcggaggacgca

SEQ ID NO: 37586 - DNA, 2300 bp, Homo sapien
tcaagcgattctcctgcctcagcctcccgagtagctgggattacaggtgcgggccaccacgcccagctaattttgtatttttagtagagacggggtttcaccatgttggccaggctggtctcgaactcctgactttaggtgatccgcccacctaggcctcccaaagtgctgggactaccagcgtgagccaacgcgcccagccgtgctgggtaaccttggaaaagcaacttccctgacgcttgcatgccccctgcacacacacacacacgtacatccttagaactacatgtgtgaaaaagtttgaaatgcacagttatcttccctgaaatttggttcctcattgtgaaatgagatactaacattcacccagttaggtaattgtggagtaaagaaaactcaacaacagcactgtgctaagtgcttcacttactgtaaacttgtatgattctacagcaacggtaggagagtaccactaccagcccatcagatgaggaaaatgaggcacagagaggctaactcataaggccttacagctactggattggcacagtttggatttgaacccaagcagtctggctccagatttgaatattgtattgcacaggtccacaattttttttttttttgaggtggagtctcgctctgatgtccaggctggagtgcagtggtgtgatctcagctcactgcaacctccacctcccaggttcaagcaattctcctgtctcagcctcctgagtagctgagactacaggcacccacgacccctggctaatttttgtatttttagtagagacagagtttcaccatattggtcaggctggtctcaaactcctgacctcaagtgatccacccaccctagactcccaaagtgctgggattacaggcgtgagccaccatcgtgcctggcccaggtccacaatttcttatctcaaacttttggggacaaatgttttttcagaattcagaactgttcagattttagaaatgtgacatggcacatgtacattaaatatgagattacagcagagtgtgacacacaccccataattaaacgtattaatagttattcagggccgggtgcagtggctcacgcctgtaatcccagcactttgggaggtggaggcgggcggatcacgagatcaagagagcgagaccatccttgtcaaggtggtgaaacccgtctctactaaaaatacaaaaattagctgggcgtggtggcacgcacctgtagtcccagctactcgggtagctgaggcaggagaatcgcttgaacccaggaggcaaaggttgcagtgagcggagatcgcaccactgcactccagcctgggccacagagcaagactccgtcaaaaaaaaaaaaaaaagaagttattcagtgaaactcactcatgtacaccccgtgggataaataagcactataaatagcctcagctcagagttttcctcccggagagttgaggttaggactggtctggccttcaaatgagttgtgaagggctttcggaagtttgtggaattcagaatcacagataaaaggtcgtagataggcgctggctctataattagataagagaagggcaaaaagtttgcgaagcccaagggtgggagagtggcaagaggtacttatgcacagggagcacgtagagcaaagcgccctgggtgagaccctgaaagcaaacgaaagtttattatgtgtgtttgtttgattgagacagggtcttgctctgtcgcccaggctggactgtagtggtgcaatcatagctcactgcagcctcgacctcctgggctccaagcgatcctcccacctcagcctcccgaggagctgggactataggcgtgcaccagcatgcctggcttttatttttattttatttttcgagagacggggtctcgctacattgcccaggctggtatcaaactcctgggctcaattgaatctcctgccttaggctcccatagtgttgggattacagacgcgagccactgcgccgggccggtttttttccccctctcagcccccgcgctccgccccgggaactccgggagcgctcctggtcggccggccggcgcccgcggactctgcgcacgcgcatggtcgccccagggggaacgcaggtcgcttacccggctgggtaggtcggcggcctggttgccatggcagcggggtcgcgggccggcgccagggaaggccccgaggctgcgggcggccagggctgcccgcggattcccagacccggacgcccgagccagcaaccctgaggggcggccgggcagcgccgccaccatgttcctgggcaccg

SEQ ID NO: 37587 - DNA, 2300 bp, Homo sapien
gacacagaactctgaggtcagagtcagcccagggcacgggccgtgcaggcgatcccctggctgtggagatgaggtcacaggctggatgctggagcagtgtcaggctaggagtgggcgtcctgcctaagccacctgttcacagtgagcaatcagctggcgccaaagaagaggactcacctggccaggtaccagcccactccaagtaggtagccttggtcttagggggttggggggggcttcattctgcctggagctcccaccatccttggcattggagagagaggaacctgagccagtatccccaccccaccccaaatttctggctcttcggcctttagggatggagaatgcgacctccccccttctgcctggctgttatttcccagctgggtggtgtctccaagttatccagcgggtggaaaccgcagctcagctagtccctcttgcccggtgccctatcacaggaaaacaggcgagtcagggcagtcaatgagccaaagtccaggcctcctgggaagacactgcccggaaccgtccctgcctgcaaagagctcttcctgccaggaacggcctgcctgcccacagagctggccaagtcgggcacagcagatggtggagcccgggtgtggaaacctgtttctcagtacacaggaggtccaggaataaggccccaggtgatgaagcagagccaggatgcacccactgccctagagtgcggagggaggcgtgcacctgggcccaagcacgcactatgtccatcctcctggctctggcagctcccatctcccctttagcaaaggaggaggcacaggcatggggaggccctgttaggaaatttggctgtgtggctccaaagcccatgatgggccctctctggcaggtgcctgaatttttaggccccaggacaccagaacagggcaccgtcttcatcttaggtcttgacaaaagactcaaccttccccagagggaaggccggatggggactgaatctacctgcggatccacttaacactcgtacctttttaaaaaaaattttttttatttttgagatggagtctcactctgttgcccaggttggagtgcagtggcgcaatctccactcaccgcaacctccatctcgcaggtccaagcaattctcctccctcagcttccagagtaactgggattacaggcgcccgccaccacgcctggctaatttttgtatttttagtagagacggggtttcaccattttggccaggctggtctcgaactcctgacctcaggtgatccgcctgcctcggcctcccaaagtgctgggattacaggcatgaaccaccaccacgccctgccaacactcgtagctttatcatccccttttacagacaaggacaccgatgcacagagtggttaagtaacttgccccagatcacacagctctaggtgccccagccaggccctgaatccagatcatgtccattgtacagataggccactcggtgccttgctgggcgctgcgggctgtgggctgttgtgtgtgcaatggggaggccaagaccagcccagcccaccaggccggaccctcgagtcaaataagaaacatgcaaagatccaaacgaagagcgaattcatggaatgaagcgcagctgcatatgcagccagggttccagcccccacggccacgtggaaagactggctggcccgggtcttacagcgctgagggtcggtcttccagcgccttaggggccaggcgtccctccaagaaggcgaggaagtaggcggagcttctgccggcggactaatgacggtacagaggcggggccgaagggcggggacacgtggaggggcggggccattgggtaatgggcggggatgcgagtggaggggcaaaaccatcaggtaaaaggaccaatagaggttcaggagcgagtgggcggggcacgctgtggggcgggatcggcgggggatagaccaatggtgggtaagaggcgggacagagggcggggcgcgcgggggctgggctggcgggaggcgggccaatggaggctcgggggcggggccggcgggcggacgggcgggggtgcggagggggcggcggcggcggcggcgaacaaagaggcggcgggcgcgggcggccgagcggagccgagcgcagccgagccgggccgagccgggccgggccgggcccaggagcgcgcggatgatgcgggcggccaggcgggggtcgacgggtccctgaagcccgcgccccgggccagcaagggagccccgcgcaggccgcgcgcatccggaggcggccgggccccgccatggccggggtca

SEQ ID NO: 37588 - DNA, 2300 bp, Homo sapien
ccagtttccctgtggatgaaatggggtgagagcactcggccaggcagatcgaatgcagtgccaggagaagggacagctctggggccacgttaccctccctccccgcagcgggtgctgaggaaatgtcactgttgcatcaaattagccacttcctgtgggggtcgcctggcctcgggacaggggagctctggtgtctgttctgtggtctgtcttttgtgttcagagacctggggagagccacactggaaggccgtgcttggagccagacagggctgtgtgtccgatggggcgcctgtatgcagcctgtagcagtgtggggccagccccaccatctcatccagcgtgggggcacgccatggacggtgcccacccctgagtgcagcttctcggtgcacagaccccagacaggatcagactcctgatggggcctcttccatgttcacccctcagaaacactttcatggtcagcaagagggggttcagtcccccacaggctcccaatttccctaccagacctgaaaacctcaggactacagctggggtgggggatcctgccaggactcaggtaggagagttctgggcctgagacggggacgggctctggggtcctggggctgtctcgggctgggggtgaggacagtagctgatgccggcagccccctccccagggcttcgcttcttcgggggagcagcagcactttttttttttttagacagtgtctcgctcttgtcgcccaggctggagtgcagtggtgcaatctcggctcactgcaacctccgccacccgggttcaagtgatcctcctgcctcagcctcctgagtagctgggattacaggcacccgccaccaggcctggctaatttttgtacttttagtagagatggggtttcgccacgttggccaggctggtctcaaactcctgacctcaggtgatccgcccgcctcggcctcccaaagtgctgggattacaggcgtgagccaccctgccctgctcagcagcacttctttctacagaagataaaccaggctcggagaggtggagggacctccctagtggggctgtggctgcaaagatggtggctcaccagcagcgtcctcgtttgtcacccacattctctggctacctccatccagcgcctctccttggggcctggtggggcagacgtcctgagcacctgccctggactctggggacccggtggggaggggacatgtgcccttgctggagccacagaagcctggagtcggttcacccggcccctcctagtggctatggagtcttcatgctgtgcagccttgaggatggcgagaccggggtcccaggtgtggggtccaggcctgggtgaccccaggtgcatcactgaggtggtgggagactccatgcctcacctacaagtcggggatggggcccacctcccagggctgggggcaggattaaatgggagtctgcgccaggtcccctgctggggcggggcgtgggactctgagctgggggtccacccctccagcgccgcttcctgcctgccctcaggccctgctgctcctgggggccgccgccctggcctgcctcgccctggacctcctcttcctgctcttctactccttctggctgtgctgccggcggcgcaagagcgaggagcacctggacgccgactgctgctgcacggcctggtgtgtcatcatcgccacgctggtgtgcaggtgagcgcggtggggcggggacggagggcggggccagagggggcggcccgagggggcggggctggagtggggtgtgtgtgggtgggcggggctacatctcacgggcccgccctctccagcgccggcatcgcagtgggattctacggcaacggggagaccagtgatggcatccatagggccacctactcgctccgccacgccaaccgcacggtggccggggtccaggaccgcgtgagtggccgcggagttggggccaggagcactcttgctgctccggagccccacgtctgcgcgaggacgggcggggcagccgggactggggctgtgcaggaggggcccagactctggggcgaggcgggcgcgctcccagcctcacgcccgcgggtccggcgcaggtgtgggacacggcggtggggctgaaccacacggcggagcccagcctgcagaccctggagcggcagctggccgggcggcccgagcccctgcgagccgtacagaggctgcagggcctgctggagacgctgctgggctacacggccgccatccccttttggaggaacacggcggtgtcgctggaggtgctggcggagcaggtggat

SEQ ID NO: 37589 - DNA, 2300 bp, Homo sapien
gcaggtgtcccccaccatggggtgcaggtgcacgacgctgtgggggaaaggttggtggtccactgtgcaggcttagctctgccaggggtagtccaggtagctgtggcctccagctaagtgaccaggatagaagccagctcccctggagccactatgtccttacctttgaagtgggggtcctggtggcccctgcctgagtcttcccattcagtactggtttgagtggtgtattggggtgacaggctccttcccttgccagagctcctatggcttatctttgagaccttcacctcctctcccacttggactgtggctgctgcttggtggcccaatatggatggcaggtagctcagctcagatttcttccttttgtctggatttctattattttcctttgtgatggtgatggtgatgctgccaacgatgatggtgatggtgatggtggtaatgatggtgatggtgatggtggtgatgatggtgatggtggtggtgatggtgatgatggtgatgatggtggtggtggttgtggtggtggtgatggtgatggtgatggtgatgtcattgttgatgttggtgatggtgatggcattggtgatgtcggtgatggtggtggtgatggtgtcagtggtaacaaagatggtagacataggggagtagataagagcatagccctggacccacagggctagattcagattctgtctctatccttgcttattgtatgatgtgggcaagtcacttaaccaccctgggcctcaatttccctcattgtaagaggacacagctggagtgtcgagtgggcacttgagccactgcacgtgaggggcttggctggtggcccctgcgcagccaaaagctaccactgtcctgtttctgaagtgcttgctgccaggcagcccaccctgtgtcccatgtgggacctcctggggcgtggaggctccaaagtgccagaggctcgcgcagagtggaagacagaaagccagagggcagcagggctaggaaaactggctcaggccacccaagggtgcagttggatcctgcagagccaagaggcaccccagcctcctgtgccttcaagaggcaccctggcctcctgcactctcccaggaggggccctgcactcttctttcagtaagcagccagccagccttgccatgcacaggccgcagtacagggcctggcactcgggtgaccacacaggtctcatagcaccccacctcgcaagggcagggctggatgcagagccaggtgacctgcccacagtcccacatggagtgtgcacacggccgagccagaactggaaccaggagtgtctgtctgcaccagaactgacccccatgggtctgtggccagctccttcctgctggggcctgagcccgtgctgcgtgtccctcctcacagaggccctgatgaggacggggaggaggaggccgctccagggccgcggcaggcgcacgacagcctctaccgcgtccacatgcccagcctgtacagctgtggcagcagctacggcagtgagaccagcatcccggccgcggcccacaccgtcagcaacgccccggtcactgagtacatgtgagttgacgtgggcctagtggggccagcggacacgtcagctgcggctgagagcgcggatctgggctggggctagctcgaggcaaggggctggagaaggggcggcctccgggctgggcagccctggccttgagtgcctcctgccccaggtgaacacggtccaggggccatggagaggccacatggtcacatggaggttccgtgtccagggcacaaggactctgtggccaaggacctcagggcccagctacatggtgaacaggtggctcggagggagtggactctggctgggccaaggtgggcaggggtctctctgtgggccctctctgagccctttgttactgtgctgggttcgtgggacccccagtgagaatggatgtgcccatctgggcacagcgggcctacccatgggccccccgacctgcagctgggactgcatggccagcaggcactcacagcctctctcccctcatgcctcaggagccagaacgctaatttccagaacccccgctgtgagaacaccccactcattgggcgcgagtccccgccgccctcagtaagtcttggggcaggagggtggatggggggctgctcagccttgggggtccgctgttccactgcgtcggtgggctggtgtggcatgtgcagccagtgtgagctctgggggcagctgtgagctgccaccaccggggtcccaggtgacccttcccagctgggacctctct

SEQ ID NO: 37590 - DNA, 2300 bp, Homo sapien
gccaacatggtgagaccttgtctactaaaaatacaaaaattagctgggcatggtggcgggtgcctgtcatcccagctactcaggaggctgaggtaggagaatcgcttgaacccgggaggcagaggttgcagtgagccaagattgtgccactgcactccagcctgggtgacagaatgagactctgtctcaaaaaacaaacaaacaaaaaagagactataaactcacaccaatcattacctcgtaagtgcagttagcttaggaagtacaatatttccaaaaaggtgaccacagggagaaaaacatgaagataaccaccagctcagacccagccggggcttgtggccatgcccacctgctcctgtgtgtcctgggcctcgggcaagccactcatcctctccccactgtttccagtctgtaagctgggattagtgacgctgccttctcagttgtgggaacctagaaggcagcaatgggcctctctccctaggttgcaacccggggctggcacgtagtaggtctgtttccagctgccacacacgctaccttaccaggggtccccaggagacaggacagggtgatgggcccatttcacagggggaaaaaccgaggcaaagaaaggcagtggagactcgtgcttctgcttcagtagctcctgccatggacttgacttgggaaccccctcccacaagctctgtccctggcaccctctggcactgttagccagcggaatccagctgtcaccatggcctggttcttagcacccctgggaacttttagagcctctggcctgtgctaactgaggttgggcagctgctggccagggccctagagagaggggtatcaggtagctagtgctgagtaacaaatagctccaaacacatgacttcacatgtccttagtattaaagggcctggtggtactgctgctcattgctaggcctggcaagtcctagctgggctcactcacacatctgtgggcagctgggagctagctagtccaggatggcctcagctagggtgacccaggctccatggccctcttgccttccagcaaagcagcccagcccgttctcgtgctatagcaggagtcggggagagcaggcagaggcacgcatgtccctggaggcttaagctcagaactgggaatgtcattgctgtcacgttttattggccacagcaagtcataagacaggctcagattgaaggatggggaagtagacgccacctctagacaggagttggggcaaagtcacacggcaaagggcgtggtgattcaggggaggagtggggcatcggggacacgtttgtaactgatctaccacagaggggagcccccctttgagaaagtgctcggtgggccttggtgcttacgcagccacggaccaacctgctagatggggccttcagtagggtggcgggacgtcagtttagcctcaggattcgactccgagcctcttgcgagaccacgtcttgggcagcatcgtagacccggctgtgagcacagagtggctcttccagaaagtttgttgaatgactgactaagtcagcccctgtgccaggcagcccagagggaccagcccagagcctccttctcggggtgcaagcctggcttgggactggggggtgtctgcactcgtggagccccccatgcctgccgggagcctgaagacgcagagacctcctgcctcgcctcgcccctccgtggggaccctcttccccacactccttggttcctgtcggagccaagatgtgtcaccatggaaaccgcttggcaaacgctggcaggcagaggcggccaacagcagctctcccgatcgagctccgggcgccggctggagcaacgtcgcgggacggcgtgagcgagcacacccggccgtgtgtgacacgcgtggggacagaggccggggcggctgcgggagggcgtgcggggaggtcagggcgccccggcgtgtgtgcgcccacgtgtgcgctcgtgcgtgtgggtgtgtgcgcgcctgtgcgtgtgccaacagtgcagccacatcggagcgcgtgtgctccgagtgtgatggccgcgtgggccggtgcagggtgtgtgtggggatgggggtgtctgattggtgctgtgacctgcggcagcacagccgcctgcgttgagcgcccacggtgggctggactttgcactaggtgctgacaggaccggcagaggtggccactgccctcgtccccagcctgcactcctgggcgaaggctgacgctgaacaggtacttgtaagagtcaccgaagtgcgtgccgggagggttctgggaagaggcagctgt

SEQ ID NO: 37591 - DNA, 2300 bp, Homo sapien
tatcccaaagcaggtgacagatccatgacacggagtccagcgcagaccatcagggtgtggagacggacttttggctattgatgagtgtgaagtcacgggccgcctgcagaacgcagtatgtgacgtgaatcccttaaaatatgtatttaggctgggcacggtggctcatacctgtgatctcaacattttgggaggccgagctgggagggttgtttgagcccaggagtttgagaccagcttgagcaacatagcgagatcccatctctacataaaagtttcaaaattagccaggtgtgatggcacgtacctgtagtctcagctactcaggaggctgagggaggaggattgctggagtctaggaggtcgaggctacagtgactcgcgtttataccagtgcattctagcttgggcaatagagcaagatcctgtctcaaaaaaaactttttaaaaatacatttcaatgtggaggagaaggcgatcagaaggatgtctgacaagaaggtgagagaggttacctctacacagttggcttatggggtcttctttttgtttttatttttcataattttccaaattttgcacaccggacacctagtgttgtgttgtttttctctctctctcttttttttttgaaacaaagtcttgctttgtcacccaggctggagtgcagtggcataatctcggctcactgcaacctccgcctcccgggttcaagtgattctcctgcttcagcctcccgagtagctgggactataggcaccagccaccacgcccagctaatttttttatttttaatagagacggggtttgaccatactggccaggccggtcttgaactcctgaccttgtgatctgtctgcctcagcctcccaaagtgctgggattacaggcatgagccaccacgcccagccgtgttatttcttaaggcttaaaaaaattctttgaggctgggtgtggtggctcacgcctgtactcccagcactttgagaggctgaggcgggtgtatcatgaggtcaagagtttgataccagcctggccaagaaggtgaaaccccatctctattaaaaatacaaaaattagctggacacaatgatgggtacctataatccccactactcaggcggctgaggcagaagaatgacttgaaccccggaggtggaggttgcagtgagcccagattgcaccattacactccagcctgggcgacagagcgagactccatctaaaaaaaaaaaaaaattctttgcactggtgtgggacgatggtgacgaatccctcagccatctgtggggcgctgctgagggcgtggggggcatttctgcacggtgaagcagagctggtgggaggctgcccgagggaagctggtgctgggagggtttgcagagaggaaaagggcagtttatggaaaaggcctctgggctctgtctggagccgtcatgccggccttcacggcatccttccgcacttagagtcctttccatctcctggtggctggcacagggccagggctgcactcacagctggccagggtagggcagggcgcccgtcctcagggccactgactgtagggctaacctaggggcctggttcacccctctcacctggggcttcgctgataagcctggttcacctcctcacctggtggcctcgttcaccccctcacctggcgccttgcctgatagcctggttcacccctctcacctggggcctctcctggtggcctggttccccttcctcacctcgtggcgctggttcacccctctcacctggggccttaactggtggcctggttcacctcttcacctggcgccttgcagagtagccgggtttactcctctcacctggggaggcacgaactggcccgggctgactgacctccctcacctgtttggctttaggctctggggcccccctgcccgggtgtttctgggaggctggagggtcccacgtgagctccaccgcgggcagctggagggagtggggcaggacgctgagcgccgggaggggtgtggccctcctgtcctgcccgcggccccacaccggccccagtcccgcccgcctcggtccctgccccgcgcgccgacgtcaccgggacctcccgatcctcccggcccaggccgagctgcccacgctgctgcccggggctcggtgcccggcgcggcctctgccggctccggcgggcgcgggactgcgaggtaggggggcgcgcggggaagactcgggggcgcagggaccgagagggacctccgtgccggggcgggtgggtaggggcagctccgggtccagcccggcccgcgcac

SEQ ID NO: 37592 - DNA, 2300 bp, Homo sapien
gctgtggtgaagagtgacttgggacagtcaccaggaaagacgcaaggcagaggagagagaatgagggctgccttctcgaggaaggtcacagctcacgaatctttctaaacttaagtgctgcagaagttgaactgagattaaatttagagatgatggtttccaagacacacagggccacggttctttcagtttttaaacacgtgcaaagtccactgaattgctttctcgtctcatctgtcagaagcccctgcattcacaaggatgggtcttccagcttgacgatgacctctcttcggagagcctcacccatcttggtaagccaagtcagcggggcctcatggagctaaaaatagtttcaggtcatgacagatgttatctgtattgctgtgtgtgcgatgagtctggggaagctaacacatgccttctgaagtggctagaatacacactcccacgtcacagccatgctatgatgaaggggtgagaagcagtgtcccctctgaggcaaatctctcttcaggcagccccgcagtcctcttccgaaatctcattcttttccctctcttcctccccaaaaagcccaaactcattgtcagagtggggagaggggagaagcagcatcctgactcctgtccatggtgtgaaccctgagggcacgggacagtgagtggagctctgccaccacccgtttccagagcatgggtgaggagggagggatgccgacctgttaatatttgcttcagacctttccccgatgaacgaaatctccaaaagccttaaacataaaatggcttagtcaagcacgagtgataaagctgggagtccaaatttagatcccaccaagttcaaagggggaggctagaacattccagggacacacctacacgcagagggtctccatacagtgccaagggagctgctctgcagacccaccaggcagggacggccaggcctcggagagagggaccggctgccctgcccaaggcccacctggacaggcaagtcttccctagtgggtcagtcaactccaccgcttaaggggtccttcctatgtaacggaatttttttacatcatcatcgagtctcgaaatgacctgtaaggcagatggctgcatccccaccatatggctgtggctgtcgagatgggactgggaagggctggagcctcagaaacggcagagcggaagttgaggcgcagtctgttcttgcttgaaccccgagttctcccgctgttgtgcagctttctaaaagcaagctggagcggtctgagcaggaagagagtaagaaggcgcacggacgcgggaggcctgcaccctgatccctgagcagcccccacacaccggcacccacgcccctcggttctgataaccaggaggctttctggcccgtgcagctccttcggactctgaggagaggcctgggtgggtggccggcactcttaggtgaggtgccaacgaaaacacccccgtgattgctggggcttcactgatttgttttgtttataaaaggagggcgaggcctgcacaggaatatttttatccccgtgaagacggagagaatcagggcttcgcgacggggctcatagacctgaactgggtctgcctgcctgtgtgctggaagcaaacgacggcccgtcctctaagctggctttgcagctccagtaagagtgagagactcacgggggcctggctgccgtcctgggagaggccccgggaaccggctcgccctgtacccaagggctctctggagctcaccccgcacgcaggctgctccagagctgaaatctagctgtgatccctgtggggcaactgcacacagaggtgcccagtttcaaggaaacctaaagcagcagcaaatttatggctcttggaacacgaggctgtcaaagataaacaccgcagggtaatctaggaaacacttccggcttgactgtaaagagccctggcctgcgaacgctgttaaaaacagatgcagatcgcgggtggagacggccggccgagccttcccttttctgacatcctacagcagcaccttgatgaatgagaacccggaagaatggaggtttatttttgaactcagcttcttgggtagggaggcaaatgaaaacaggctgatgtcaggggtttattttaaaaagcaatttccaagaagcgtcctggggtcaccacgcgttcagtccaactcttccccgctgcagtgttcccgtgacgatgaggcaaatccaaatagtcaccggagtcgagcaaacacggcggcccctgcctcccccggcggctccacaatggccctcagagggtccgcgg

SEQ ID NO: 37593 - DNA, 2300 bp, Homo sapien
cagcattttaggaggccgaggcgggcggatcacgaggtcaggagatctagaccatcctggctaacaccatctctactaaatgaaaccccatctctactaaaaatacaaaaaaattaggcgggcgcagtggcgggtgcctgtggtcccagctactcgggaggctgaggcaggagaatggcgtgaacccgggaggcggagcttgcagtgagccgagattgcgccaccacactccagcctgggcgacagagcgagactccgtctcaaaaaaaaaaaaaaagtcagcctgtgattctttttttcccttagattttaatccaagtgattatgaatgtcaaggattaaaatttgggggggttatttgggattccctggattcagatttctgagattatgcttcctttcctttaaggaaaggttttcattttcattataatacaaaaagcaaactgcttattacttttccaccgtacaaaatgcagttgacctacctcaacgctttgtgcattcacctgaacagaagcattttggataactaacgcgtgcttaagcctctgaggacctcattcactaagaggacgaggcggcgcaagtccagctgtggtcagtctcagtgttcccttcagggtccgccggctcacgctgggagaatgagagggacttcagatgctgcttcagttcccagctgtggctgaagctactgggttcacccagctcacctacagtttacagagaaataaagcaaaactcagatgcattcagacagaaccccacctcgagggcagcctcagctctgatgagaccagctgacaggccctggctccctaagccatggcagaggagatcattcattcacatgtcagagacaaagcccaggagtctggattgtgaagtaaacgctgagcccgaccacaaccactgtgaatactgggcaactggggcgtctcagaggattcaggtaattgaacaaatagacttcatacggaatctcaactctcctctggtcagcaatatcagatgtacttctgtgtgaataataaaccagactgcctggatgcgggagcacacgcctggaatcctggcactttgggaggctgagatgggaggatcactccagcctaggagtttgagacctgcctgggcaacatagtgagatcccatctttattaaaaaaaaaaaaaaaaaagaaattagctggggataggtggcacgtgcccgtggtcccagctactcaggaggctgaggcaggaggatcacttgagcccacttcagtttgaggctgcagtgagccatgattgcaccacggccccctaacctgggcaacagagtgagaccctgtctcaaaaccaaaatgataaaaaatactcaaccaatcagaggacaccagcacagcagccttaggaagacttctagaaagtataggcaagcctcactttaggtgcgtaccctgttctcatgcccctgtagtgttgctataggaaagaagggtgcataattggattcactttaaccaagactctaaagcaacagctcagctgagctccttctctctccgtctccctcgctctctgccagccatggaggccactgagtggggatctcagtgcagaggtcccggcctcgcctgcccagggagctttcttgttccaggcgacaggaaaagcagagcctgtgggggaggcattttgtgcagggaaggcacatttagaagaagctttggtttcctggacaagcccaggctttctcattcttaccagggatcttccttagatgcttgtccttgggaagtgtaaatgtgttcactgcagctctttctgcatattttagaccttaaaataattgttttttgtttcgagctagccttagattacaggaccattgagaattgagacactgcttgggacatggactggagcttcatcctcagccatagagcagcactgctgccggggttgagggagctcggggagcttttccagacaaaacctttgctccaggcgtttggcagggccataggaagagctcctttgtgggctccctgagctggaactcggccttctccgcccgatgaagcaaacaaactgtgccgagggcgcaccggcatttgtgccgtcagcaagccgggctgtgtctcagcctcacagcactcctcccacgggcctgggaaggcaaatgtgttttctgaactgtgttgagaccgtgtgtgtgtgtgtgtgtgtgtgtgtgtgtgtgtgtgtgttggggtgtcttgtgaagtcctgctaacctcttgtcagcagaatattcgagaaatgcttctgaga

SEQ ID NO: 37594 - DNA, 2300 bp, Homo sapien
aggggtgggaggaatcacctgaagtcaggagttcgagaccagcctggccaatgtggtgaaaccccgtttctactaaaaatacaaaaaatgagctgggcatggtggcgcgtgcctgtaatttcagctatcaggaggctgagacaggagaatcgcttgaaccctggaggtggaggttgcggtgagccgaggtcgcgccattgcgctacagcctgggcaatagagcgagactctgtctcaaaaataaataaataaaaataaagtggagtatgatgggaagccattggaaagtttaagtagagagttgaactgacccaactgtgtttttaaaagggtcattgtttgttaagtggggagtgtagacctcctccaggggtaggaggtggaagtgggcaagaatgagagcaggggcatcagtgaagagcagcagagacccagactgacttgatgggagcagaggaggcggtaagaagtcaccggagtgcattgcacattcctgatcatttctctagcctgagttttctcatctgtgaaatggggacagtaatcatggatgtctcctggccgctcttaagaattgaatgagttaatgtgtgctagacctgtgcctggacagagtaggtgttcagtgaatgttagcttcaatatcattctcactgtcactgctgctactgcccttcccaccgaggaaaccctggcatgagctggataattattcaatttgtgttctgtacatgttttgagtccataatcaatatgtatattacttgtttttaagaatttatggaaatggcattattttgaatatatcatttaaaaaatggatttgctaggctgggagcagtggctcacgcctgtaatcccagcactttgggaggccaagacaggtggatcacctgaggtcaggagtttgagaccagcctggtcaacatggtgaaacccatctctactaaaaaatacaaaaattagctgggcatagtggcaggcacctgtaatcccagctacttgggaggctgaggcagaagaatcgcttgaactagggaggtggtggtcgcagtgagccaagaccgtgccattgcactccagcctgggcggcgagatcaagactatctcaaaaaaaaaggatttggtgagcagcacatgtgcgtgctgtccatgggggtgcgtgaagatctggtttacttctttccaccgtcacattacttaccataattgctgatccgttccctgtgaatgcgtattcaggttgtttaccgttttccctgcgaccaacagtgctgcactgtgtgtccgtgtccacgcctccgtgcgcggcggccagggtctctccgggatgtgtacttagacgcagagttgctgggtcagttccacgcaggcccagctttgccaggggctgtcaaccattgcttctcatggaaagtctcagcaaggctattaaatgaactcaaaaactatctcccttattttcagatgaatgaaaaattcagtgtttgtgtagatggagaggagcagaggagtgatgggaaatgtctctgggattggacgtcatcaggtgtgctaagacacagacgggactgttgtgaggaaggagcttgtgctcacagatttgtagaaacaggaggcacagcacacggggccacacggggagcaccaggctccagggagcaccacgctgggtcaggaggcggaggggtacttgtgggcaagagcctcgattgtggtttctgaaaagaaatgggcaaggcagcatccgcggtttaggattggctggtttgagtaatttccccagcctctgtgctatcagggtggtccctggttgtccagtgcttggccctggggtggttggcagaggcatatggctgcctgcagtgtggagcctgggccgccaatatagccctgcactccaacctgcgctgagtcatctctcctacacgctccagcctccctcatgttttctttagtgtttcaaaaatgcgaagctcagggtcttcgtgcgtgagattccttccaccaggaaagctcctcctgcccctgctgcgcagccggcccctccttaaggtcttgtaaatgcctcctcctgagccgccttccccaacagccctcatttaagcagcctccttgactgtaggtccgctgactggcttcctccttgagagcacactcacagtgccggaccgcaggcacctcgccgatgttcctgtccacttgctttttgtattgctccttctccagtgagcttggaagcctcatgcgggcaaggccttgtctgtctggttctctgttgtgtcctcggagcctgccac

SEQ ID NO: 37595 - DNA, 2300 bp, Homo sapien
ggctggtcctgaactcctgaccttagataatctgcctgccttggcctcccaaagtgctgggattacaggcatgagccaccgtgcccagccatatttggcctcctatgggaggtcatttccacaaacaagcaagactttctaatcattttccaaggattacaaaatcttgactcataagtgatacaaattcatggcatgatttgtagtatttgtagcaagtgacaaataatacatattatgtgcattcaaggttgtcagggagttggtttttgttttgttttgtttctgaaacagggtcttgctccgttgtccaggctggagtacagtggcacgatcataggtcactgcacccttgacctcctgggctcaagtgatcctcccacctcagcatctcaaactgctgggactgtagttgtgagtcaccgtgcccagccttctggggagtttagatctgtgactaagcaaaaagaacaaatctggaggcatcactttacctgacttcaaactatactataaggctatcgtcacaaaaacagcatggtactaatataaaaataggcacagagaccaatggaacataatagagaacccagaaatgaagccaaatacttacagccaactgatcttcaacaaagcaaatgaaaacaaagtggggaaaggacagcctattcagcaaatggtgctgagataattggcaagccacatgtagaagaataaaactggatcctcgtctctcacgttatacaaaaatcaactcaggatagatcaaagacttaaatctacaacctgaaaccataaacattctagaagataacatcggaaacatccttctagacgttggcttaggcaaagactttgtgaccaagaacccaaaagcaaatgcaacaaaaacaaagataaatagatgggacttaattaaactaaaaagcttcggcactgcaaaagaaataatcagcagagttaacagacaccgcacagagattggactttggggactcagggtaaaaggtggggggtggcgagagataaaagactacacactgggccaggcgcggcggctcacgcctttaatcttaagggatacctgagctccttctaggaggttctgattcagtagatctgggagagtcaagaatctgtaatcagctgatctctatcaagagctgattttgggctagctcacgtgctaagtgtttggtaagttcatgttctcagtttatatcttcatgacgatttgagcaatgtcaagccataaccaatgtcgtcaatgacacccccgttttacagatgaggaaacggaagctaagaacatccaaaagggtttgttggggggggtggggaaagctgctaaaaaaagttatgcaactagtacacctagtaactggtcgactggagattccaactcaggcccagcaactccagaccccactctctcaatcactgtgagacataagacttttgggggagcttctggtgattttagtgattagtcagcttttcgcaaagcctcctagaagcccatgccactctcaaagggtgcatgtgtttgaaatttatggcccatccccctccagtgtttctggaaggaaaatagtgtagaaacaagatcatcggagggaatacgacgagcagctgaacctcttatcagcatttcccagcctttgggctactccgcgaggtcctggtctcacaggcggacccaatctgggaaccaagggagaatctttctgtacacctggcacttctcgtcacgccccgtcccccgaacacccaatccaaagcccgttgggcacgtctgatgtccactcagagcaattataattggccatggcggacgatcgctccgcctcccgggcgaccccgcctccctttcattctgaaagaaagaacctcagcctgggcgtccaatgagaagcgccttcacctcaaagatcccgcctctttcggcgtcgaccccgccccgaggccggaagggatgcccgcctcccttggcgagatgagccaatcgaagggctctcacggccagatggacggcagccggcccaatccgccgggcctcacgcggcgccgcccgcccctccgccgggcccgagtggcggccgggcgacgagtgcgggcctcggagcgactgcagcggcggcggcggacgcggcctgaggcgagcggcggggcgtggggcggtgcctcggcccgggctcgccctcgccggcgggagcgtccatggcccccgggcgccggcggggcgcggccgcggcctgaggggccatgtccggggtggtgcggaccctcagccgctgcct

SEQ ID NO: 37596 - DNA, 2300 bp, Homo sapien
ctgagcacagctcacgttatttatccccatgtctcccacagtgcttagcacagtgcctcacacgtggcaggtgcttaataaatattctgtgagtctattttccatccagcagccagagtgatccttctcagacataaatcaattgtcactcttcagctctcaatccttcagagggttctcatcacaactagaataaatcccaaagttcttaccatgcccccatgatctggaccccgccatcccttccactcccttctgcaccatttgtttatttggctctggccccactgactctcctgccatttcttttctctttcatttgtttctcttccttccttccttcctccctccctcttcctccctccctccctccctcttccttcctccctcttccttccttcctccctccctccccttccttactccctccctcttccttccttcctccctcccttcctccctttccttccttcctcccttcctttcttccttccttccttccctccctcccttcctgtctttttccttcctttttctttctctttctctctctctcccttccttccttccttccttccttctagttctttcttttgacaggcatggctcactgcagcctcgacctcccaggctcaggtaatcgtcctgccttatcacccctagtagctgggactacaggtgcataccaccatgcctggcttatttttgtagagatggggttttgccatgttgcccatgctggtctcaaactcctggactgaagcaatcctcccgccttggcctccccaaatgctgggattacaggtgtgggccatcaagctcagccttcctgctgtttcttcaaaaacaaaaacaaaaacaaaaacaaaatgccccctacttatgggctttgcgagtgctttcccctgagacttgcatggttggctcctttcatcccttcagatctctcttcatgtgtctccttctcagagacctttcctggacaccctagttaaagtagcaatcctcatgttctgtcctcacgccctgtcttctcttcttgatagcactcatttctaccaagtatctatgcatttgttttctgattacaatgttagttccacgacagaagggttttagtcttcagctatgtatccctggaaaagagcctgggggccaggtgtggtggcttatacctgtaatcccagcactttgggaggccaagtgtgcagattgcccgagcccaggagttcaagaccagcctgggcaacatggtgaaaccctgtctttactaaaaatagaaaaaggggggtgggtaggataaaaatagaaaaaaattagctggcatagcatgtacctgtagtcccagctacttgggaggctaaggtgggaggatcacctgagcctgcaaggccaaagctacagtgagctgtgatcacaccactgcactccagcctgggtgacagagtgagactctgtccaaaaaactcctccaaaaaacccaaaaacaaaaagcctggtacccgatggaactcaataaacagaaagaatgaacgaggccgggtgcagtggctcatacctgtaatcccaccactttgtaaggccaagggaggcagatcacttgagcccaggagttgcagatcagcctgggcaaaatagcgagaccccttttctacaaaaaaattgaaagaatagcctggcgtgatggtgggcacctgtagtcccagctactttggaggctgagacaggaggatcacttgagtctaggaggtcaaggcttcagtgagccatgatcacaccactgcagcctgggcagtggaagaccctgtctcaaaaaaaaaaaaaaaaaaaaaaaaaaaaaagaaaagaaaaagaaagaaagaaaagaaggaaaggaaaataaaagaaaagaaaaaagaagatgtaaatctccttaattcatttgcggagtgagccattctgggtctgcatgcgcatgtgcaaggtggatctgggactgagccggtggtggaaagctgcgcactgggtcggtccttgtgcgcatgtctgcccatgcgcacaggggatgtaggccgcttacccggtagcgctaagcactatgggtacacgtgcaggtgcatagtggacctagaactcccagaggccctgtgtcctccattcccccacacctggctggcaggaagctccggcagaccacgtgcatgtgcctgcacctgctttatgggagaattgagccctggtgacatttgtttcccccgggtcaccctggcggagtagcccttgggcacccctcacctcgagttggaggtctcggctcctca

SEQ ID NO: 37597 - DNA, 2300 bp, Homo sapien
ggacgatcacttgaacccgggaggtggaggttgcagtgagccgagatcgtgccactgcactccagcctgggcaacagagtgagactccatcccaaataaataaataaataaataaaatgccactgcctgatttagaggtttcatggagtacaagcagcttccccagtcccaggtaggcagtgagatgtatccttagggaccaaggcctagaaggctgtgggtcttggtgttagaaggctgtgggtcttggtgttcattttagaaactttctttacggcccttgcttgcatttctgaacacgctttacaggaagcaaactcgtgtcttccttcatccctagcacatgtgcatcagtgcaaacagactcctcactggtatttcagattcttccgtgcttggaccaatgtcccattttttatttattgtcttgctgaaaatttaatttattgaaggcctttccttctagcagctcgaggaacttttctcagaacacttaaaacatgaaacagaagcctacattctctagccataatgaggggatcaaaagagagggagatagatgagaggagaatggtaaactgaggcagagtagaatgagaggtgcagaggctggggcaacgggggggcgggcggtgcaggaggcagtgcaattgcagcaagagaatagaaactaaggttttctgggtaggcatggctcatccagatttttatttcaatagctttaggggtacttgcggttttgggttacgtggatgaagcgtatagtggtgaagtctgggcttttagtgcatcagtcactggaatagtgcacattgtacagtatacattgtacccaataggtgatttttcatcccctaccccctcccattcttcccccttctgagtctccaacgtccatgatcccactctgcctgcctttgcctacccatagcttagctctcgcttttaaataagaacatgtagtatttggttttccactcctgagttacttcacttaggataatggcctccagttccatccaagttgctgcaaaatactttatttcgttcttttttatggctgagtagtattgcatggcgtgtgtgtgtgtatcacattttctttcatccagatttttgagtctgcaatccatgtaaacccttgggaccatcccacccatgacgatggccatttggggtaaattattaaaatgatgacatccagctgggcgcagaggctcatgcctgtaatcccagcactttgggaggctgaggtgggcatatcacttgaggtcaggagttcgaggccagcctggccatcatgttgaaaccccatttctactaaaaatacaaaaattagccaagtttggtggtgcacgcctgtggtcccagctactcgggaggctgaggtgggagaatcgcttgaacccaggaggtggagcttgcagtgagctgagattgtgccactgcactccagcctgggtgacagagcgagactccatctcaaaaaataaaaataaagtaaaatgatgacatccaaatcacagtttctcttacaagtatacttcaccggaacatcgagggcacaagctgatggtgggtgtcttggaccccaaagctgtcggggtgaggaaggcctttgaaggggtgctgaccacccggcatgcccaggaagcttccagaacaggggctgagggaggaaagaggcttggggtgtaggaggctgcaggatttgatgtggggcaccccgttcccctcccattgcagtgacaggctctggaatttcttcagaaattcagctagatctcgggagccagtgccctggagaacctagaagggagagagcccctcccaaggccccacctggactctgccgggggtcacggctgggtggggactgatgcccagactggtccagcctcaccccgactgatgcaggtgggctgggccctgagactcgccttggtctccccatctccggctccctgatctgtccccaagcacccccacccccggccctgtccccactcccacccccacctccttgccgccctcctcccgaagcaccgactccgccccctccctctcttccttatctttttctaacctttcgcattttttagtctcatttcctgtcgggttttgcatttccctcccccgcccctcccagcctatgacatactttctctccttttttctctcctgcctcctctggccttcggactcctgcccgcgccgcccgcagccccctcccggccctgcagcccctgggcgggcggcgcccctcggaggacggctccgggcccggggggacggagggc

SEQ ID NO: 37598 - DNA, 2300 bp, Homo sapien
gaacgttttgaaggcttttgcatagcagagttgtcaggctgatggtggaaatcccagtaagttggcagctcccaccagaccccccacctgcctcatcccctgttgctgacacctggagtttgtcagccctgatcagaggcctccaaagcacactcgctggtgggggtgggggattagggagtaggggataggttggggatatcataagctattctcccacatttcccaaaccagggcactgcttgaggcgactttgctgctaactaataatcagtacagtaaagtcacacttttctgtctctattttttttttttttttttttgagacagggtcttgctctgtcacccaggctggagtgcagtggtgcaatcatagctcactgcagcctcaaactcctgggcttcagcattcctctcatttcagccacccaggtagctggaattacaagcatgtgcctccacacctggctaatttatctgtgtgtgggttttgcttttgtttttgcttttttgtagagatcgcatttcgctatgttactcaggctgttctccaactcctgggctcaagcaatcctcctgcttcggccttccaaagtgctaggattataggtgtgaaccaccacacccagccaaaatttcactggagttcagattctaaaaactaaagttctgcacagtaaaaatcacgtacagtcaatatgatgcttggaaaggaccttaagaagttcaaaagccaatgatcaattccttttgtttgtctttgcatttgggcgagctttctcaggggcggcggaggtcaaggtctagcttggggtctctgtgtcagcccctgtgttgtgtggccgggctttgggatacatttcccctgcacttggggaaggaccctctcgtccaagagaagccctgagaacctgaactctacctcacaagaggcagcacaatctctctagccccatttctgtagccccagccttccctcttccctgcagcagagcctgcaagcgaacagatctgaaattgtacaattccctgggcgtgtgggctcagcctacatagacaccctagctggggtctgtcagcaagatgaatggtgcagaggcgaccagtgacccccagggacacagtggatgcctccaattatctgggcagcctctaaagccccctttttattttctatcagtgggggcaaagaatttttctgtgggccagtagctcctgtaatgaggcctgtgtcctcagccttcgggaggaggaaaatgaggaacagggctgtcagcctgcttgctaatccagaaagatgatgaccgtgacttggggaagtctaaaagcaggaaaaaggagcccctcccagggttctggcagagaggcagagaacccctgggtccgatcgataaaatatgtaatggactgaggaggtttgctttgggaaatttccccatctgctccgtccaattatcctttctcatgatgaggatcctaagtgtttcgccccatgtgagtgacatttaaagacccacccttgtgtgagaggaggcaggggccccgggaggtggactccccagtaaatatcggtttaagtggagtaaacacaaatgttgtgcaccatccctgatttattgactcgcttctcccagtcaatttcccgccagggagccacatggggctgcaaagcgagaggtggacagattggaagccatgtgaaaatgtttccgaatgatgctcagaaaacagggtgtcatccctggaatacattacctgctccttgcaacactcagatacaaatcccggagctgaatttactgcggggtgtttacggtgaatccaaaacaccaaacacactcagggctcccaaccagcccttgatcaatgtaccaaggcgaggaattttattagccagaagtttccctggaggatttcaagggggcagggtggggagggtggagtgggtcagagtgatgggagaacaacccttcccaggaggactctcggggatgagggaggagaggagcagggagcatcgagtgagtcctccagccttcctagagctacccagcaggccagagggaaggtggggaagcagccaccattgctgatgggcggaagaactcctgatggctgagagcccaggcaagtctgggaaaggaaggtgagcggacaggtaggaaaataggagacttcttttcacacagggaagcaaaaatgaaggtttttgttattgatttttttttaaagtcctcttattagttacaattttttctcctttaatattttaagataaaataatccaacgttggcattat

SEQ ID NO: 37599 - DNA, 2300 bp, Homo sapien
tcccaggttcaagcaattctcctgcctcagcctcccgagtagcttggactacaagcgcacgccactacgcctggctaatcatcttcttcttctgtctttcttcttcattttcttctttcttttttcttttcttttttttttttttaactgcagacgaggtttcaccatgttggccaggctggtcttgaactgacctcaagtgatccgcccgcctcggcctcccaaagtgctgggattacaggtgtgagctaccgcgcccggcccacttctttatgcctcagtttctccatctgtaccagggccagcacctctcacacagcaggtagtgaagctgctgctgctgctgccctgggctggcctacagtgagtgctcactgcacaggaggtattgcttccccccgcccagcaggttctcattataatcttgcaagtttgaagaaacccagccttgctaccaacagaagataaaaacagacatgcctctctgcctccagtctcatccccatgtccttggggagctgtcctcttccggctcgtcccatctatgcgccctcactatatcctcagaacagggcactccgtggctcctttaacttttttgcccctcctagcatggtgtggaaagggggcagatgggaggcctctttctgaaaccacctcctgttcggcggctgtacttggacctcagtttccctgttttgttcacgtggtcattgttaagtcttaggggacgtgtacagaggctaatattgagccaccaatcagttatttgacaaataccataggcgctctgtgagcaggagctggctcctatcccagaccccagccctgtgacctgctctccactcgcccggggtctttcttggctgggacaataaacctactgcatcaggtgattcctggggagtcagccccgtgctgggctcacacccagcccctctgcgttcatctcttacatgatctcatgcgaccatcatcacacgtccccaggctcctcccgggccaactccagaggcagtgcgtgtcacctccagctctcctcccacaaaaatgctggcctttcagcctccagtgcgcttagttcaccccataaactctgctaatgcttaccacatgctgagcgtcggcgcccgtccccacccccagccccacaggctcccgggtcccgccctgggagaccctcccactggccgaccctgccccaagactcgcccactccacggtgggaaacctgcaatgtgtccctccctaccccgccctcctccagcgccggccaaaagtgaccttggacgcttctacaatgccatatccactcctctgaacaggaggcgagtttgcacccagtggtgcctttggttgctagaaattaaaaacccgattgcgcgtgtttgcaattacggtaacttggcgcgtcacccccaagcactgagctagctggtggtagccgggcgcctctcggggcgcgccctattccgccctcggccctgggctgccgcacgatctgcgcgtcctgctgcacctgagcccttcccactcgggcgcccgcaccgctgcggggccgggcgaggatgcaccacccccgcccgcgagcccgccacgggagcgcgtgccgaatcgacgccgcctgcagtccccactacgggtccctagggggcgcagccggcgcgggaagccgcccgagccaggcgccgcggccggcacaaaattgcaggcgggcgggcgccgcgactttgaaaacaagcgagggcctggggggcgggccctgggagcgggcgccgcctccctcggccaatcaacggcgggcggcgggcggcgggcgcgggcggcgcgtgcggccgggctgtgaatggggagcggcggccgcggcagctgagggcgagcgcgaccgcgacgtgcgggcgggcgcactttcttctcagcgccgggcgggggcggcggcggcggcggctcctccgcgcccggcggacccctcggagctagcgcggcgggctcgggactgcgtgagcgccggacgcgaatttcccccgttgacaacttcttctcgcccggctcgtccccggcccgcgccgcgcccctcacgcggggacccaggacgccgcccctcagcgctgggcggccgctcacctcgggccggggggcgccgcgcctcccgcggagtggccgcgcccgctcggagccgtcccgcctgtcctgcccgcccgtccgtccggcgcggcgctcggggtggcggctgctcggcatggcccggggcgcccggccctcggcggccggtggcggcggcggcggcgcggagccccctg

SEQ ID NO: 37600 - DNA, 2300 bp, Homo sapien
ttgagtgtatactgagaagcagaattgctggattctatggtaattctgtcttaattttttgaagagccaccatactgttgtctgtagcggctataccattttatattcagaacaaccgcgaaatggggcggaatttcttcacatccttcccaacacctgttattttctgtttgtgtgtatgtgttttcttttcataatagccaccctagtgggtattagatgcaatatcattgtggttctgttttgtccactgttttcacggaagttcaaacaaaactgaacacccttaagtgggagagctcgtagtcagctgtggtctccatgcttctttcttctacataccagttctcttcagaatgagaacggtatttccatggaagctggacttggcacgaaggggccctgccttctaccaaccgagtctggttgccctgatactgggaatggcctttcgtcttctgcattgacaaatggctgttttctgtaagggagactgcttagcaaaccagatcaccatgagctgcatgatacaagtggaagggttttaggctcccagagtaaaaagggaagttgctgtgagttcttctgtaggtaactgggaatgcgcacattttgtttttaaaggagacacacagagagggggatcctcatcagctgcccattatccatgtcactggaaatcaaaagccaagaacgctgaaatgcccagctggtggcgaagactgcgttcccagaaagccatttttggaagcagcttgatttgaaataattaaaaagatcccatcttcatcgccaactggcttcatgcttcagagcagcttaactttgtgttaaggaatccagtgagcagattctgaattagtgatagacacctctgtgtgaggcaacagaagtttcctttgagagtctcattttcattttggagcaatttatggccactgcttggtgattggtaaggagctggagtgcatttccaatgagctcgcaggcgcagacttacgaatccccgcggttggggctgcaggtttttggagaagcggctgggattttatgtgtggatgctgacacgcagctggtactgtctgcaggctctgcctagcccaacactatggtggaaagcatgtgccacctctttctgaccatctctaatgtgggtgaaagggaccttagcgccacttcaggtcagcgagacagctcgatttccagaagaatttcccccacccaggttttacttcgctagtaacttgaaaattcagttcaggcatcatcacaattcagaatgggaaccgacagcggatgctggaagtcactgccaagactttgttcattccagggcatcagtctacaaaatgactgggctgaaaagcctgtttaaactctgcaaaaaatccacgcaagggtgtaggatctccagcagaaccttcggaagccttgccggcaagagtgcatttggctggcagagtccctcttgcacacctgctggaaagctgggtgggaagatattctaagctcgctgtgaatttcattacgcctctctccagccaaagccactcaagggtgtggtggtgtaatgggcctgccacgcagatgggctgcgaaatacacagcccatctgtctttatcatgctcatttcctcttttattaaaatgttaatgaatatagtttttatttatcattcagtgacatgtgcagcatccttttctgggagacaaatctgcaatctgcctaaccatgtgagccgacggagaactttctccccttacatactgaacacaggaattagggacgttttggttccttttaaaccgccgtatgcaggttgcacaaaaaaatccttttgctcattgatggcggcaccggggaagttgcctttctggcttgtaagttactagccacatggccagagcctcagtttccacacctgctaaatgggataagctttccttctcctagagctgtcctgctaagcaaatgagatgttccctgagaaagcctttgcattcacctcttattattcagacatgataagcctgtgggcttgaattcgttttcttcattctttcagactctccatggaaggtgcatctgtcaaacgttggccctgagatgacaggcgtcaccgtgagtggcctgactccggctcgtacctatcaattccgggtgtgcgcggtgaatgaagtgggcaggggccagtacagcgccgagacaagcaggtgcgtgaatcccgccccaggtgggggtgtggaacagccgggggcctgaatgccaaagagaagcatcacattatgtggtggaattg

SEQ ID NO: 37601 - DNA, 2300 bp, Homo sapien
gcttgagctaatgtggtagcaggcctcattttggaaaacctcctgagtctgccgggtacacacggtgcccctctggcatgtgcgtgtcgcatgctgcatgcgtgagtgttgaacgcgtgagtgttgttcctcgttgctaccacagtgcaagcccccctcactatccaagccattctgtcggagagcctggggagcaaagaacaccgcttcctccacgtttgggttttgcctcgtgagtagcaagagtccaaagaaaaagcgatttctctaaacatccaacccctcctggtgcctgggttcagatagtgaggaccagagagagtttggattgcaaggatgtgttatttaccgggggcagcaaaacaagttactacgcattaggtggttggaaagggcagagccttattctctcacagctctgggggccaaaagtccaaactcaaggtgtcggcagggtcctgctgcctctgagggctccagggaggatccttcctgcctcttccagcttccggtggccgatgacaactcttggcgtttttcacttatggacgcgttactccagtctctgtccctgtcttcatcgggtgttccccctgtgtgtcctgtgtccaaacttccctcttctcataatttccctccactcatcaaattaggaccctcccctaatccagtatgaccttgtcaaaaccaattgcacgtgcaaagaccctgtttccaaataaggtcaggttcacaggcaacagggcttagacttgagcgtgtcttttagggggacacagttcaacccacagcaaaggggctctcgtgcagcaaagctgtggctccgcccagggagcaggatggtgctgcggtgtgggtgcctcacagtgagcccgacaccggaagttctgtgcacatccgtcctctgacgaggcttcgtggcctcgtcttcagccatcttctggtcacagcttagaaggttcctgttccttatccctcatctgagtatcccaagaagagaccagatgctcggaggctcagcacccagatgagtgcagaagtcactgaggctttccagggcatccgcctggagtgggaggacccttctcagtctcagatttgtctcctgcgtggaaacatcctccccaaatgtacttataaacagaaaccgactgaaggaaaaggcaagccttgcgctgggtctcgagtggtgaacagccacatcctaaagtggacaggtcttgaggtctcataaccctgtgtttagattccagcaagacctgaaactccacttccttatctgcctgtgctccctattccatgggagtctaatgtgtgtctaatgagcgcctagccatggcttggtaagaactgcagggtgagagctggatggcaagggtgtattgtttgcctggggcagctgaagcagatcaccggaccgcaagatgataggccaggccagccatcatgcgaggggccatggggattccagcctgaggactgagtccggcacagtggggtggcctggcatggggaggcatcagtgaggggtacagtacggcagccacagcctggatggccaggggagtgagggagggtggggtcagctggtgggtgcttcagagcaggccgcctctcgaggttccaccctgctctgggctcaccacacagcacccagcctcctcgccgtctgtgtctgtccccagcctcctgccccagcctgggggctcatttgaggatttgagctggacaggggtcaaaatgctgatgtccccacacacatgcacatgaaaactgggattctgagagtatctccacagcttggtgctgtgccctgggagctgcctgggttcgtcttgatgaatctgacacctgtcgctggaacccacgactttcttctgtgcagctggctagttaaacaggggtggaggtgagccctgctgcaggccagctgggttgactcccatggtgtggctgagtcggtgtgatgtctttgcagcctccgagggacgaaagcctgaatggccttcttcagggatacaggatctactacagggagctggagtatgaagccgggtcaggcactgaggccaagacgctcaaaaaccctatagctttacatgctgagctcacaggtgagactgtcccctctgtcctggtacagggagggaggttcccaggggacccttggtatctgctcagtgcacatcatggtgggaaacgctgtggaagaggctgagagaagaggcagccctgccctcaggaacagggagcaggcgggtttacccaccaggggcacacagggtgcaggtgtgcggcag

SEQ ID NO: 37602 - DNA, 2300 bp, Homo sapien
cttcaactacctcaaaatgatatgtttagcgtcaagtaatcattgaaaaagccacggtgtccgtcctccccagcctgctcggacaagcacaccaatgtgtctttgagcactcttgtgtgggagagcggcctgtgggatggggcggtaccagccagacacgggtgcctgggctcagcctcttaacgctgtgaacacatctcagcattttccaggcagcgataaggcattggttctcaggcttgccgagagagcccttgactttctcctcaggttctcatatgctgctccgccggctgcacgaagggaacaggacgcctgttggttactggtgcggcccagggagcctggcaggccgtgcggattagaagtaattggcgtgtcggcgagggcttcacactgggcccacgcctcagagtggcttgcctaacatggagaagcttctgaagtcagctgagtctgagctcagcagggttggggccagtgtgtggaaactgacccacaggggaccaagatgtgacaacagacttatcaagaagaccccagctttttcggcgagggctgaagatcctgcacttaattctgcttggctgctcaacattcaaaagcaggtcgccaacgatctcccctttcggatcatgaagggaacccaagcaggccgcgggacccgtgttctttcatgggaagttgagacgccccctcccttcaatgattaaggccagcagcagctcaggcaaatgaaacgctttatggattgtcaatatttaagcaccttgctggtacctgagggctttggatctcagctgtcatccattacaggcctcattacacaaaacattaaatgctgtatcatctcattttcccaccgaagctccctggcaagacgttctccaggtggggtgtggtttgctccaggtgcaatgaatgggccccgttttgtattgggaggggccacacaggggccctcaccgctgggtatctgggagacgggcactcggtgccaggcagcccctctggcccacgtggtcggctcggcctgatgtctctctatccagctgagtctctaccttgcccctgggagacaagacactcatcagctttgttgctgctttgcagagggtggccagcgggcctgggcagcccgggcagatggtagtggagcgtgctgccctcccatccccatccttccttacaccccccgcacattctactgcatagcccctgttgctgtggccatgtggagacgcagaactgagcagcagctaatgaaattagcaccaggctagaacacagatcccctcttattcctggagagggcgctccatgagtgtgagcccaaggacaccgccaccagcttccaccagcatggcctggcccacacgttcctttctctggctgtgcgtaagtttcctccaaattggtgttgcaaaactccctggaaggcactggaaactatgcactggacatatgcagatgatctatttacacagattattctaaggcattttactgggtagatcatgaagcctaatttacatatttacacaatagactggaatgacgctaaaggaactataaatatattttcctctccaaagcagccatgaaatacatatttagaatgtgcccaatgcaggcagatattgtattgcattttttttttttttcttaaataatgtgtgtagcccagagacgagggcaggtggctggaggacaggtcccgtgcctgatggggacaccccccagccggaggcctggactgctgtccactcgtagtcccctgggggctttccagttccctccccattgattttgttcaatttcagtctttggcaacgggagttttcaagtgagtaaggaagaaaatcagtatttctctgaaggtttgacatccatagaagttccaagtcagcaggttcagcaagagggggctgttgccatggctctgatggtgcccggtcccctcatgtgctgcttgtctttctcataagctgcttgtctttctcataagcgtgtttctgacagcttgtcagcccggcttcccaccccttcctgggatcagcctgcaacacgggctttcttcgtcatcttaacatgcaatgcattttgcctcctgccttgaatgaggatccgatggaaggtaactgtcttttttttaaatcagatgtatttagcctcatgtttaagcgccaccagcttcagtaaaatttctaacctggattggccattcatacaaaaagaaatggcagtatttaagaaataaacaactgacaggcttgcatttgctctgagctgcagactga

SEQ ID NO: 37603 - DNA, 2300 bp, Homo sapien
cctactgggcctatgtgcctttcccgcccttaattcgggcagtcacatggatggataatcctacagaagtatatgttaatgatagtgtatgggtacctggccccatagatgatcgctgccctgccaaacctgaggaagaagggatgatgataaatatttccattgggtatcattatcctcctatttgcctagggagagcaccaggatgtttaatgcctgcagtccaaaattggttggtagaagtacctactgtcagtcccatctgtagattcacttatcacatggtaagcgggatgtcactcaggccacgggtaaattatttacaagacttttcttatcaaagatcattaaaatttagacctaaagggaaaccttgccccaaggaaattcccaaagaatcaaaaaatacagaagttttagtttgggaagaatgtgtggccaatagtgcggtgatattacaaaacaatgaattcggaactattatagattgggcacctcgaggtcaattctaccacaattgctcaggacaaactcagtcgtgtccaagtgcacaagtgagtccagctgttgatagcgacttaacagaaagtttagacaaacataagcataaaaaattgcagtctttctacccttgggaatggggagaaaaaggaatctctaccccaagaccaaaaatagtaagtcctgtttctggtcctgaacatccagaattatggaggcttactgtggcctcacaccacattagaatttggtctggaaatcaaactttagaaacaagagatcgtaagccattttatactattgacctgaattccagtctaacagttcctttacaaagttgcgtaaagcccccttatatgctagttgtaggaaatatagttattaaaccagactcccagactataacctgtgaaaattgtagattgcttacttgcattgattcaacttttaattggcaacaccgtattctgctggtgagagcaagagagggcgtgtggatccctgtgtccatggaccgaccgtgggaggcctcgccatccgtccatattttgactgaagtattaaaaggtgttttaaatagatccaaaagattcatttttactttaattgcagtgattatgggattaattgcagtcacagctacggctgctgtagcaggagttgcattgcactcttctgttcagtcagtaaactttgttaatgattggcaaaaaaattctacaagattgtggaattcacaatctagtattgatcaaaaattggcaaatcaaattaatgatcttagacaaactgtcatttggatgggagacagactcatgagcttagaacatcgtttccagttacaatgtgactggaatacgtcagatttttgtattacaccccaaatttataatgagtctgagcatcactgggacatggttagacgccatctacagggaagagaagataatctcactttagacatttccaaattaaaagaacaaattttcgaagcatcaaaagcccatttaaatttggtgccaggaactgaggcaattgcaggagttgctgatggcctcgcaaatcttaaccctgtcacttgggttaagaccattggaagtactacgattataaatctcatattaatccttgtgtgcctgttttgtctgttgttagtctgcaggtgtacccaacagctccgaagagacagcgaccatcgagaacgggccatgatgacgatggcggttttgtcgaaaagaaaagggggaaatgtggggaaaagcaagagagatcagattgttactgtgtctgtgtagaaagaagtagacataggagactccattttgttatgtactaagaaaaattcttctgccttgagattctgttaatctatgaccttacccccaaccccgtgctctctgaaacatgtgctgtgtccactcagagttgaatggattaagggcggtgcaggatgtgctttgttaaacagatgcttgaaggcagcatgctccttaagagtcatcaccactccctaatctcaagtacccagggacacaaaaagtgcggaaggccgcagggacctctgcctaggaaagccaggtattgtccaaggtttctccccatgtgaaagtctgaaatatggcctcgtgggaagggaaagacctgaccgtcccccagcccgacacccgtaaagggtctgtgctgaggaggattagtaaaagaggaaggaatgcctcttgcagttgagacaagaggaaggcatctgtctcctgcctgtccctgggcaatggaatgtctcggtataaaacccgattgtatgc

SEQ ID NO: 37604 - DNA, 2300 bp, Homo sapien
aggagatattaattggattcggccaactctaggcattcctacttatgccatgtcaaatttgttctctatcttaagaggagactcagacttaaatagtaaaagaatgttaaccccagaggcaacaaaagaaattaaattagtggaagaaaaaattcagtcagcgcaaataaatagaatagatcccttagccccactccaacttttgatttttgccactgcacattctccaacaggcatcattattcaaaatactgatcttgtggagtggtcattccttcctcacagtacagttaagacttttacattgtacttggatcaaatagctacattaatcggtcagacaagattacgaataataaaattatgtgggaatgacccagacaaaatagttgtccctttaaccaaggaacaagttagacaagcctttatcaattctggtgcatggaagattggtcttgctaattttgtgggaattattgataatcattacccaaaaacaaagatcttccagttcttaaaattgactacttggattctacctaaaattaccagacgtgaacctttagaaaatgctctaacagtatttactgatggttccagcaatggaaaagcagcttacacaggaccgaaagaacgagtaatcaaaactccatatcaatcggctcaaagagcagagttggttgcagtcattacagtgttacaagattttgaccaacctatcaatattatatcagattctgcatatgtagtacaggctacaagggatgttgagacagctctaattaaatatagcatggatgatcagttaaaccagctattcaatttattacaacaaactgtaagaaaaagaaatttcccattttatattacacatattcgagcacacactaatttaccagggcctttgactaaagcaaatgaacaagctgacttactggtatcatctgcactcataaaagcacaagaacttcatgctttgactcatgtaaatgcagcaggattaaaaaacaaatttgatgtcacatggaaacaggcaaaagatattgtacaacattgcacccagtgtcaagtcttacacctgcccactcaagaggcaggagttaatcccagaggtctgtgtcctaatgcattatggcaaatggatgtcacgcatgtaccttcatttggaagattatcatatgttcacgtaacagttgatacttattcacatttcatatgggcaacttgccaaacaggagaaagtacttcccatgttaaaaaacatttattgtcttgttttgctgtaatgggagttccagaaaaaatcaaaactgacaatggaccaggatattgtagtaaagctttccaaaaattcttaagtcagtggaaaatttcacatacaacaggaattccttataattcccaaggacaggccatagttgaaagaactaatagaacactcaaaactcaattagttaaacaaaaagaagggggagacagtaaggagtgtaccactcctcagatgcaacttaatctagcactctatactttaaattttttaaacatttatagaaatcagactactacttctgcagaacaacatcttactggtaaaaagaacagcccacatgaaggaaaactaatttggtggaaagataataaaaataagacatgggaaatagggaaggtgataacgtgggggagaggttttgcttgtgtttcaccaggagaaaatcagcttcctgtttggatacccactagacatttgaagttctacaatgaacccatcagagatgcaaagaaaagcacctccgcggagacggagacatcgcaatcgagcaccgttgactcacaagatgaacaaaatggtgacgtcagaagaacagatgaagttgccatccaccaagaaggcagagccgccaacttgggcacaactaaagaagctgacgcagttagctacaaaatatctagagaacacaaaggtgacacaaaccccagagagtatgctgcttgcagccttgatgattgtatcaatggtggtaagtctccctatgcctgcaggagcagctgcagctaactatacctactgggcctatgtgcctttcccgcccttaattcgggcagtcacatggatggataatcctacagaagtatatgttaatgatagtgtatgggtacctggccccatagatgatcgctgccctgccaaacctgaggaagaagggatgatgataaatatttccattgggtatcattatcctcctatttgcctagggagagcaccaggatgtttaatgcctgcagtccaaaattggttggta

SEQ ID NO: 37605 - DNA, 2300 bp, Homo sapien
caaactttagaaacaagagatcgtaagccattttatactattgacctgaattccagtctaacagttcctttacaaagttgcgtaaagcccccttatatgctagttgtaggaaatatagttattaaaccagactcccagactataacctgtgaaaattgtagattgcttacttgcattgattcaacttttaattggcaacaccgtattctgctggtgagagcaagagagggcgtgtggatccctgtgtccatggaccgaccgtgggaggcctcgccatccgtccatattttgactgaagtattaaaaggtgttttaaatagatccaaaagattcatttttactttaattgcagtgattatgggattaattgcagtcacagctacggctgctgtagcaggagttgcattgcactcttctgttcagtcagtaaactttgttaatgattggcaaaaaaattctacaagattgtggaattcacaatctagtattgatcaaaaattggcaaatcaaattaatgatcttagacaaactgtcatttggatgggagacagactcatgagcttagaacatcgtttccagttacaatgtgactggaatacgtcagatttttgtattacaccccaaatttataatgagtctgagcatcactgggacatggttagacgccatctacagggaagagaagataatctcactttagacatttccaaattaaaagaacaaattttcgaagcatcaaaagcccatttaaatttggtgccaggaactgaggcaattgcaggagttgctgatggcctcgcaaatcttaaccctgtcacttgggttaagaccattggaagtactacgattataaatctcatattaatccttgtgtgcctgttttgtctgttgttagtctgcaggtgtacccaacagctccgaagagacagcgaccatcgagaacgggccatgatgacgatggcggttttgtcgaaaagaaaagggggaaatgtggggaaaagcaagagagatcagattgttactgtgtctgtgtagaaagaagtagacataggagactccattttgttatgtactaagaaaaattcttctgccttgagattctgttaatctatgaccttacccccaaccccgtgctctctgaaacatgtgctgtgtccactcagggttaaatggattaagggcggtgcaggatgtgctttgttaaacagatgcttgaaggcagcatgctccttaagagtcatcaccactccctaatctcaagtacccagggacacaaaaagtgcggaaggccgcagggacctctgcctaggaaagccaggtattgtccaacgtttctccccatgtgatagcctgaaatatggcctcgtgggaagggaaagacctgaccgtcccccagcccgacacccgtaaagggtctgtgctgaggaggattagtaaaagaggaaggaatgcctcttgcagttgagacaagaggaaggcatctgtctcctgcctgtccctgggcaatggaatgtctcggtataaaacccgattgtatgctccatctactgagatagggaaaaaccgccttagggctggaggtgggacctgcgggcagcaatactgctttgtaaagcactgagatgtttatgtgtatgcatatctaaaagcacagcacttaatcctttacattgtctatgatgcaaagacctttgttcacatgtttgtctgctgaccctctccccacaattgtcttgtgaccctgacacatccccctcttcgagaaacacccacagatgatcagtaaatactaagggaactcagaggctggcgggatcctccatatgctgaacgctggttccccgggtccccttctttctttctctatactttgtctctgtgtctttttcttttccaaatctctcgtcccaccttacgagaaacacccacaggtgtgtaggggcaacccacccctacatctggtgcccaacgtggagtcttttctctagggtgaaggtacgctcgagcgtggtcattgaggacaagtcgacgagagatcccgagtacatctacagtcagccttacggtaagcttgtgcgctcggaagaagctagggtgataatggggcaaactaaaagtaaaattaaaagtaaatatgcctcttatctcagctttattaaaattcttttaaaaagacggggagttaaagtatctacaaaaaatctaatcaagctatttcaaataatagaacaattttgcccatggtttccagaacaaggaactttagatctaaaagattggaaaagaattggtaaggaact

SEQ ID NO: 37606 - DNA, 2300 bp, Homo sapien; identical to SEQ ID NO: 37604

SEQ ID NO: 37607 - DNA, 2300 bp, Homo sapien
tgcttcttttttctttcttttcttttttttttttttgagatggagtcttgctctattgcccaggctggagtgcagtgggtgcgatctcggctcactgcaagctccacctcccgggttcacgccattctcctgcgtcagcctcccgagtagctgggagtacaggcgcccgccatcacgcccggctaattttttgtatttttagtagagacggggtttcaccgtgttagcctggatggtcttgatctcctgacctcatgatcggcctgccttggcctcccaaagtgttgagattacaggcgtgagccaccgtgcccggtcctgagttgtttcttaaaaaaaattttagattcagggccaggggcagtggctcacgcctgtaatcccagcactttgggaggtcaaggcgggtggctcacctgaggttgggagttcaagaccagcctgaccaacatggagaaaccccgtctctcctaaaaatacaaaaacattagcagggcgtggtggtgtgcacctgtagtcccagctacttgggaggctgaggcaggagaattgcttgaacccgggaggtggaggttgcggtgagctgagattgcaccattgcactccagcctgggcaacaagagtgaaactccatctcaaaaaaaacaacaacaaaaaaaaacaatttagattcagggggttcatgtgtgagtgtactgaacgatgctgacgtttgggcttctatccatcttgtcacccagtgaacacaatacccacagcacccaagagatgatttttcttctctcttttttctttcttttttttttttttttgagacgaagtctcactctgttgcccaggctggagtgcagtagcacagtctcggctcattgcaacctctgccctcctggttcaagggattctcctgcctcagcctcccaagtagctagggttacaggagtgcgccatcacgcccagctagttttttatttttagtagagatgggtttctgtggggaaaagcaagagagatcagattgttactgtgtctgtgtagaaagaagtagacataggagactccattttgttatgtactaagaaaaattcttctgccttgagattctgttaatctatgaccttacccccaaccccgtgctctctgaaacatgtgctgtgtccactcagggttaaatggattaagggcggtgcaggatgtgctttgttaaacagatgcttgaaggcagcatgctccttaagagtcatcaccactccctaatctcaagtacccagggacacaaaaactgcggaaggccgcagggacctctgcctaggaaagccaggtattgtccaacgtttctccccatgtgatagcctgaaatatggcctcgtgggaagggaaagacctgaccgtcccccagcccgacacccgtaaagggtctgtgctgaggaggattagtaaaagaggaaggaatgcctcttgcagttgagacaagaggaaggcatctgtctcctgcctgtccctgggcaatggaatgtctcggtataaaacccgattgtatgctccatctactgagatagggaaaaaccgccttagggctggaggtgggacctgcgggcagcaatactgctttgtaaagcactgagatgtttatgtgtatgcatatctaaaagcacagcacttaatcctttacattgtctatgatgcaaagacctttgttcacatgtttgtctgctgaccctctccccacaattgtcttgtgaccctgacacatccccctcttcgagaaacacccacagatgatcaataaatactaagggaactcagaggctggcgggatcctccatatgctgaacgctggttccccgggtccccttctttctttctctatactttgtctctgtgtctttttcttttccaaatctctcgtcccaccttacgagaaacacccacaggtgtgtaggggcaacccacccctacatctggtgcccaacgtggaggcttttctctagggtgaaggtacgctcgagcgtggtcattgaggacaagtcgacgagagatcccgagtacatctacagtcagccttacggtaagcttgtgcgctcggaagaagctagggtgataatggggcaaactaaaagtaaaattaaaagtaaatatgcctcttatctcagctttattaaaattcttttaaaaagacggggagttaaagtatctacaaaaaatctaatcaagctatttcaaataatagaacaattttgcccatggtttccagaacaaggaactttagatctaaaagattggaaaagaattggtaaggaact

SEQ ID NO: 37608 - DNA, 2300 bp, Homo sapien
caaggacacgcagcaggtgaaccctccgcaaggcgaggagcagggctgggaagggcgagggcgcctctccgcgcccctcccctgcccggccacagagcccggccccgccccgggccctgctcgcggcccgccctgcgccgccactgcgcaagcgcaggaggagcagcgtggcgcaaccttaaggcgcatgcgcggccggcgcagacttgcggaaggctccgttcccctcgcgtgaatccgccgatccgggctttggggcccgccgggagctctgtttataaacacacggcgcggctgccggcgaggggtaaccctaaggggagtggggtcggaggtcagaggtcagcgggcgcggggtcgccggctgtgagaccggccccgccaccctcggggactgctggctgcgcagcgtggccagccggaccgccctactgcgcaccggggctgccggggcgccacgtggtgcgcacgtggtccggccccggcgcggcagctcccctcccccaccacgcgagcctggccgcagcgcccgctggcggcgcggcgttgcacattgcgcgtgcgcacaactcgccgcgaggcgccttccggtggcgcggcggggtcggttgcctcctcgcgacggctgcgccgggatgttccggggcggtggggtcgcctgcccaatgtcgggtgcgcgagtgacgggtggaagctggatttgtgcgcgttcttcaatgctccaaagggaggagggagcctccgagagtccacgtggggccggtgggattcgcagggtccgttttctaaacattgggtgtcctcgaacctgggggcgcgggctgtgtccgcccccagcagggatgaccatgcctgggtcagtggctgcataaataaataaacgaatggggaggaaattgataaaatattaaaagagtgttgtttcagagtttttactatgtcacctcttacagatttatgagagtttgttgttttttggagaagaggggtctccctatgttacccaggctggtctcaaactcctgggctcaatccatccgtccgcctcagcctcctgaagtgctaggattacaggcgtgagccatggtgcccggcctgttgatgagattctacgtgaaatatattgggcgttacctaagcactcagtcagtggtagttcttatagttgttgcttaaaaacagaaagaaatgtcataccgtgttctaaaaggatttgagaaaggtttgcaaagactaaaaagcaagtggcagggaaaaataacatacgcaaacttcctcctgactttttctgccattttatagcaaaggctcagaattgcattgccattgtcggttgtttcggtaaaattagtgttcctcaagttatctactccagggacattttttttttcttgagacagggtcttactctgttgcccaggctcgagtgcagtggcacagccatgactcactgcagcctcagcctccggggtcaagtgattctcctgcttcagtctcccgagtagccgggattacaggcgcgagcctccatgcccagctaatttttgtattaatgtactttataggagacagggttttgccatgttacccaggctggtttcgaactcctggcttcaagtaatcctcccaccttagcctcccaaagtgctgagattacaggcatgagtcaccacacccagctcagcaatatcctttattattttattttttatttttgtagaaacgagtctcactgtattgcgcaggctggtttcaaacgcctggcctcaagcaatcctcccacctcagcctcccaaagtgctcggattacaggtctgagccaccgctgccagcgcatcttaaatacagtcatgcatcgcttgggaaaggggataccttctgagaaatacattgttaggcaatttcatccttgtgtgaacatcatagtgtgtaattccacaaacctggatggtacagcctgttgctcttaagctacaaacctttaacagcatgttaatgtgctgaatactatgagcaattgtaacacaatggtaagtatttacgtatctaaacgtagaaaagagaaggtaggccgggcgcggtggctcacgcctgtaatcccagcactttgggaggccgaggctggcggatcacgaggtcaggagatcgagaccatcctggctaacacggtgaaacccccgtctctactaaaaatacaaaaaaaatagccgggcgtggtggcgggcgcctgtagtcccagctactcgggaggctgaggcaggagaatggcatgaacccaggaggcggagcttgcagtgagc

SEQ ID NO: 37609 - DNA, 2300 bp, Homo sapien
gaggctgcagtgagctatgattgtaccactgcactccagcctgggtgacagagtgagaccctgtctcaaaagaaaaagacaagaaagagagagaaggaaggaagggagggagggagggaaagaaaggaaggaaggaaggaaggaaggaaggaaggaaggaaggaaggaaggaaggaaggcaggcaggcggccgggcacggtggctcccgcctgtaatcccaggactttgggaggctgaggcgggcagatcacctgaggtcgggttttcaggactagtctgaccaacacggagaaaccccatctctactaaaaaaatacaaaatgagccgggcctggtggtacatgactgtaatcccagctacttgggaggctgaggcaggagaattgcttgaatccagggggtggaggttgcgttgagtcgagattgcgccattgcactacagcctgggcaacaagagcgaaactccgtctcaaaaaaaaaaaaaaagaaggaaggaaggaagggaagaaagaaaggaaggaaggaaggaaaggaggaaggaaggaaggaaggaaaggaaggaaggaaatggagggaggaagggagggagggaaggaaggaaaggaaggaaggaaggaaaggaaaggaaggaagggaaggaaaggaaggaagggaagggaaggaaggagaggaagggaagggagggaggaagggaaggaaggaaggaaagaagggagggagggaaggaaggaaggaaaggaaggaaggaaaggaaaggaaggaaggaaagggagggaggaaggaagagagggagggaaggaaggaaggaaaggaaggaagggaagggaaagaaggagaggaagggaagggagggaggaagggaaggaaggaaggaaggaaagaagggagggaaggaaggaatgaagggaagggaaggaatgaagggaaggaagggaaggaaggaaggaaggaaagaaggaaggaaggatggatcagggattcagggatggatctcaagtggtcttcagttacagtagagtatgatgacctttaatctgagggcttaagaatgatcaggcctggcactgtggctcacacgggtaatcccagtgctttgggaggtcgagatagatagatcacttgagaccaggagtttgagaccagcctggccaacatagcaagaccctgtctctataagaagtaaaaaaattagctgggcgtggtggcacttgtgaggcagaggcaggagggtgacttgggcacaggaggtggaagctgcagtgagctatgattttgccaccgcactgcagcctgggcgacagagcgaggttagaatataaacatatgtattgtatataatacacatatattttatcttctgtctatcttacactttagggttgggggcctggagtgtctggggcggggagactgctgaggtcatccgtccctttctccaatgacccaggctcaaaactttgtggctgggcatttcaggggtcccctcttccccctggatggaggaaagggcgcccgccgcctgcagccccgcggggaggggacgaggtgcgccgggcccagctctcccgggggcccgccggccctcccggcacaggcctcgcccccagccccgcgctggcgcgcgccacgtgggctacgctgggcgggaccggcgggcgggcgaggcgaggcgcacggtgggctgggaggctccgctccgcgccggcgcgatctggcccgggtttccgcgcccgcccagcgccccgacctccccgccccccgcgccgccgctgcagccgccgccgccggaggccgctcggagccgcgcgaacatggccgaagtcggcgaggacagcggcgcccgcgccctgctcgcgctgcgctcggcgccctgcagcccagtgctgtgcgccgcagccgccgccgccgccttccccgcggccgcacccccgccggcccccgcgcagccccagcctccgcccgggccgccgccgccgccgccaccgccgctgcctccgggcgcgatcgcgggcgcgggctcctccgggggctcctccggggtatccggggactccgcggtcgcgggcgcggcgccggccctggtggccgcggcggccgcctcggtacggcagagcccggggccggcgctggcgcggctggagggccgcgagttcgagttcctcatgcgccagcccagcgtcaccatcggccgcaactcgtcgcagggctcggtggacttgagcatgggcctgtccagcttcatctcgcggcgccacctgcagctcagcttccaggagccgcacttctacctgcgctgcct

SEQ ID NO: 37610 - DNA, 2300 bp, Homo sapien
cgctgctcttacttgaagttatcagacagagcggcaggtttactcttcgaggggattaaacccagcgggaaccctggacctacggccggtcatcagacgtcaacaggtaaaatcctcaaaaatacatgatcccttttgtgtctgtctcaggtgtacaatgaagtctgaattccatgtttaaacaaacaaagaaaaacttggggtctgaagtgaaatcggacaccccccgagttaatgccaacactctctatgtcacgttccgggcggagaggctgttaggtggtccgtggctcggcagctcctggcttcccaacaggcatctgtccggtgcccgggcctccccggcagccttggtgtgtgccttgctgcgtttctgtctgtcctcccggacaaaggcggctggccgtgcagcgcggagcggaggggctgtcttgacacattcctcaagatgctgagctccaacctcctccccatgcccgacagggaggcctggggagaggaggtggtgccgagggagaaggaaaggaaagcaaagaattcccagaatcatacaatcagttgtctgaacttgtttatgtgtttttgtcttaaaccacgggaaggcaggcgatcaaatggaaagggctgggtgtgtccaggtgccgccgatgcccacaggccgccgcgggctgttctcctccgtctgtgggtgcggccgcctgagctgccgggtccagcttcggggtcgccgctgggtgagtcccactcccccgcgttgcaggtgacctcactccccggtgcctggcccctgggggccggcagctgcgatcactccagccggtgtggttacagcaccactgggctcctccacccgggaccttttgacctcgggctctccagtggaagaggcggaggcagaggcggtggtggcagtggctggggtggtggtggccgtggccgcgacggctgctgctggctccttgggccccacctcgcacacccgggtgaccaccaccggcgcggatgaactcgcttgggtcgcaaggagctgcaaagggctggtgagggctggagtggaggaagaagagggttactctggggtctggttaggacccagctgcttttttcaagtcccctatacaggggctaagccaccaagccggaaccggaggtcagtgcacccctgccaggcaggacggctacccttgctctgctccctgcgggccctgccgtcccctccccacctcatctgccctgtctctgctggctccagcctgttgggtggaggcccctctcattgctgtctagatcctgctggacatcgacggcttgcctcactcctttacacagatgcactgccctgagccaccccactgacaatgcgcccggtgccctggtaccctgcacccccgcccagcacccttgcaccccagcaccccaactctcctccttcctttgacctcttgcctcaccccatggagtgtgagctccagagagtgggcagatctgggttttccttccaccctgttttctttccccccactttttttttaaagggacagggtctcgctcagtcacccaggctggcaggtagcggagcaatcacagctgactacagcctcactctcccaagcagctgggaccatgagcgtgcaacaccacacctggctaagtttttgaatcttatgtagagatggggtcttgctatgttgcccgggctggtctcgaactcctgagctcaagcgatctgcctgccttggcctcccaaggtgctgggatgataggtggccccttccaccctctttttctttgcattaccccagtgcctggagtatagcaggtgctcaataaattgaactgagtggaggatcgggagatactgggagaacattctcatgccgcactgactactgggagccacagagcttgggatgtggcatggagaacagggccagggcctcaccgtaagcgttgccggctaaactgttcgtgggaaccgcatgctttccgttctgggtcacggcccggactggaaggtggtgctgcccgagggtcacgggtgtggcgggctgcaggatggtgaccgtgtgtccggggaccccgggggccatctggctggccaccgtctggatgactccaccagccgcggggattgtggcaaacgcaatggtgggtttctcctccaggcctgcgggacaggaaccaagtcagcaccacactcggccaacgagacaatcgatttcctcgacgcctgggcagcaggtcggacaagtggggaaagtgaggtcggcactgggaaaaaataggtttgctagaggaaa

SEQ ID NO: 37611 - DNA, 2300 bp, Homo sapien
ggagcaaaagtagctgattccagccccgttctggggtcactggggaggcagaggctgagggcctgttctctggtcaccagggactgggggcacggtccacagcggatgagaacagcaggtcacagtagtggctttgggaagggcccctcctgctttgccctgttcggaaaggggctccctcagagcccctgggcccagtaacccgcttctgtctcctgactcctgctggataaattgccaggtttatcaaatacaagaaaacacctgctttggctaggaggtaagtcccaaaaagaacgtcttaagtagagcaaaggcatccaccgaggccatttggtggcccctgggaagtggggaagcagggcctgagcgtccccaggctgctagggcagcagctggctcagggcacactctctcgtgccagcttctgccaccagcccagtgtccacggagccgcggggccagaggagctcagggagacctggctgtctagggcatggtacccagtatcccggtgtgtgcccatcctcagccacttgtgtctttctttccatgtgggagttctcccggtgacacctgccctccgttgagggtggaatctgtcactcatgcctttgagggacccagatggaccatccctcttctgcttgctttctacattcctaaaaacctcaacgttaatccctcaccagtcgggccgagtgtggcctcatggttctgccgcggcccagtcttctcccactggcttcacgctagagggcgccatgcgctctgggtgaaatgagacgctggtgtggggtccccatgtagagaccctcaggtccctatccagagaccctccaggcagtgctgggaagacactggtggcggggaccatgaccaggcgggtggagccatgtgtgtctcacacctgccgcccctcactttccttcccgaggtctggtaggtcctctttgggatttgctgtttatttgtatctcccttttctttgatttaagaacaatgccaagtgaaaaagctgggaatgaatttctgagttgctgagtgttccctgctcctaggtaccacgctctgtgcttctcaggcagggaggagatggattcggtggagttgggccaggacgggggcttcaccctgccccctccagactgccgaagcccccaagaagttttgagcccagctgggcctcgcctccccggctcctgggtccattttctgtactggtttgagatcacaggcatcattcagcgaatgctcttgtgtcctctgcataaagagggccctccctggagcacccccggggagctgggactctccagaaagccccgggtgagggctccgtcttgagagagagagaaatcccttctttgggcgattcagtgagttcaggaggaggaggaagcttttccttggctttgaaatcagtgtttttatggagacaaagaacagacctcagtgggaaaaatgaaaacgtaatggaacacggggaggtgtcggagaagaaaggattttccccttcgctttcagagccggcgggagtgcaggtctgttttgcttcagaagcctcacattctgctttgcccttgagtgacttcatgcgggatgaggaactgttgacccctctagagaggacaccccaagtccatcctgggctcctcctcacccctctgagaaagcccccctaaaaaaaggcttcagagtcaccggcatgccgcctcacgttgcaggacggaatcgcgcgctcctcacgctggagtaagttacgaaacatgatcgtcaggctctttgcaaacgcagagccccagaacgctggatggaggcctcctcggccctgcgggcggcctggctgcggtaggtctgctgcaaggagccaccacggggactgcgccacactcctgatgaaaacgtgtttacccacagcctcgcctcgagcctccttgacaataccgctgcttcaaagcaatattatttaatgagaatactttacattgctcacatgtgctgctatgaagacaggattagtctgtagacgggactcagctccagaggttcctgggtaatgtattgtggctcttggaaatgagggtagaatttgaaatataacaaatggtctctcgcccggttctgtcccttatttttagattgttttcctgcatcttacaatttccttttcttttcaaagttcctttctccaggcctgtttttcagtgctcaggacacggttttcatcacatacttactgtttttttggttgggttttgatacgaaaagctgctacgtttggtgaccagagggagggt

SEQ ID NO: 37612 - DNA, 2300 bp, Homo sapien
atgcgggatgaggaactgttgacccctctagagaggacaccccaagtccatcctgggctcctcctcacccctctgagaaagcccccctaaaaaaaggcttcagagtcaccggcatgccgcctcacgttgcaggacggaatcgcgcgctcctcacgctggagtaagttacgaaacatgatcgtcaggctctttgcaaacgcagagccccagaacgctggatggaggcctcctcggccctgcgggcggcctggctgcggtaggtctgctgcaaggagccaccacggggactgcgccacactcctgatgaaaacgtgtttacccacagcctcgcctcgagcctccttgacaataccgctgcttcaaagcaatattatttaatgagaatactttacattgctcacatgtgctgctatgaagacaggattagtctgtagacgggactcagctccagaggttcctgggtaatgtattgtggctcttggaaatgagggtagaatttgaaatataacaaatggtctctcgcccggttctgtcccttatttttagattgttttcctgcatcttacaatttccttttcttttcaaagttcctttctccaggcctgtttttcagtgctcaggacacggttttcatcacatacttactgtttttttggttgggttttgatacgaaaagctgctacgtttggtgaccagagggagggtttggaatctgtgctttgcaggggatctcggtgggtaccgcggcccctcgcagggtggcgagtggggtccgtgcctcgagaagggggcccttacccacaccgtgcggcttgaattctgtcggagttgaatctgtggaaaggattgtcccattagagctgctgcgtcctttcctctgtcctccctgtcacccaaaccccgaagtcacagctgcttagaagaatgggattttggggatacaaccacacacatttccctctggactgaaattttaaaaacagacccatttcactgacttctttttttttttttttttttttttttttttgagacggagtctcgctctgtcgcccaggctggagtgcagtggcgtgatctcggctcactgcaagctccgcctcccgggttcacgccattctcctgcctcagcctcccgagtagctgggactacaggcgcccgctaccacgcccggctaattttttgtatttttagtagagacggggtttcaccgtgttagccaggatggtctcgatctcctgacctcgtgatccgcccgcctcggcctcccaaagtgctgggattacaggcgtgagccaccgcgcccggcccactgacttctttagggaaaatagtttcagtcttgggttgtcttgtgagcccacgggcatgggaccctgtctctgctgggcttttccggccccgtcccagctcctcctcaggcagaggctgcagccctcagctctgctgctggatggaacatttcaaccccctccgggaaggtgggcagggtggagggcccagggctaggcctgccatgcaccatgagcaggggtgctacctgggtgtgtgaagttgggctggcttttcctggaggtgggtgagaaggctctccgggcaaatcagaaggccacgagagagagaggagcggggagagtggtgaggaggattcgtctctgactgatgaacctcgccgtgcctgtctgtcacatccaagtctgtgccagctgctgggaggtcagactcctgccctgagaaacagcccagtccttggagaatgaaaccctgagggtcagtgagtggaggccttccctcggggccagccattcccgggaggcctgagtgtgacctggaagctctgtgggtcaccaagactggcattttccttgtatttttgtgcagggctgaagtgagcgttcctcctctgaattggtgaggctttggaaattttttgtttcttctactcatcctaatggctggttttggctgcccggagtatcagagaatatcactaagagggcagtcagtttatttttaggcatctttctttctgtccagggagaaacccctcggaagaatcttagtcactctttgcacctgccctgtcattctcgccatggggaaaatgcgttgaaaagaaaaataccggggccagggagaagccgtgaatgtatttatttgctttggtgaagctgctgaacactggctgcggagggccccccgcccccatcccgcttcaggccccagtgacccagttgcgtcttaagttccatcgtccagatttcaggccaccagaggctgccaaaggtgactgaagcgg

SEQ ID NO: 37613 - DNA, 2300 bp, Homo sapien
tgtgaagagagagagggagagagagattgagattcctggcacacagttggaatctcagttaaagttagcttccctgtgaacctggtatctatacaacaaagaggggtgcatctctcagaaccccagaagacatacaattgtgcactgcagctctattcgttattgtcaaaatctggaaaccgaccaaatattcatggacgaacaagaaaagctaagtacggtacgattccatttgcatgaagtataaaaagacgcaaaactaatctctggtgataagagagactagcagttacttgtgggggaagggagtgggcgttgactgggagggggccacagcggggaacctctggggagctggaaatggtctaggtcttgaactcaaaccatggcaggaacatttacaccacagaaattatcaaacacaaatcaacccccggctccccaccgtcgccaatggagccgaggcttaagacatttgcaaatttaccaccgatttctagaaatgtaaatagtggagttcatttaagatttgtgcgctttggtgtggacgttttaccctagtaaacgttaaacactggcagtaggctttccatagactacctgtcaccagctttcctttgccagtcttcaacctgcggctccaggggcacccgccgcactccaccgactcccatccaccgctcaccatccaccgattcccatctcttcattctctgcaccaggtgccctcagacatcactgggcgccctagggcatctcaaagccatgtttggaactcctgcaggaagccctccctcctcctcctccttccttccatccaggggtcttctcggggcttatcccttcaaggcctaaccttgacccaccctatctacgcaacattgattcccacccctaccctattccccagaaccttcagcagtgcctagcgcagctaggactcaatcatcgcttgtccacttaatgaatgactcttggcacaaatttcctcgtccttttctgccccagacagacaccccacaaacatgaagttacccttgatttttccactttcttcctcctgcctgcaaattcctcaatcacaggtggtgcaaatcctacctctaaatggtactgaatctgcctactttcggggcaacctcccttacctggaccacaactgcaccagcctcctttctccctcaggagcttcccaatccattatctcccctgcggccagagatcagtttcctcctggggtgcatttaagccataggaagcagatcgctaccctaggcccgtccctccccaccccttggtctggacaccctctgggctcatcttaggccgcagtcgccgaagccttcctcctccggttggacccccaaccaggtcaggctgtcatagcgtttatcatgacgctggcgtgtcgccctgtgtccctcggccgtctgcaggatggcaaacttatggccagggcccagcacatttgggcacccaacacatccgttagaatgaacagaaacttcccctctccgagcctgtggcctcatctgtaaaacagagatcgcgagatcccatgaataccgtggggattgaataagggattttttcgtttcaagcagcaggaacagcgcgggatgggtgctcaataaatgggagctcaaaaaatccccaaaactgcccagagccgcggctattccttgcaaactgctggacactgctgggctcagcccacaagtgtcggagtttgcatcagattttcaggtcgtacttagcaaagggactcccgcacgacaaagctgtttacgaaacagaaaccagaactggggcagtgacactttggggccagcaatgccctctcccaaagccccaggcgcccaatttccgccgaaatgctttccggggtcgaagggcgccggggctccagagtgccgaggttccggggtcgcgcgattccgcagctcccaggcgccgacccggacccccggccgcggcacctacgccccgccccagtcgctccacgccaaagcccattggtcggcaacctgtccctcctgctcatgtgatgcggcacgtgacgcagccacgtaaggccgctgcgctcacgtgacgcggtcccggaagttgaccggggtgcggagctcctgggctgcagctcctggagtttccgaggttcgtgcgcgtctggtggcggcggcgtgatgttctcggcaggagcggagagtttgctccaccaggccaggtacgggggagctgcggccccggccctccttcctgcatctctccctaggggcacacgggggtgggtctcacagggc

SEQ ID NO: 37614 - DNA, 2300 bp, Homo sapien
cggccaccgcttcacagacgaccagtggctgaacgtgcaggccttctctatgctgcgggcgtggctgctgcacagcggccccgagggcccgggcaccctggacacaggtgtgcggggtggggggatgacgtcagacaggggtgggaggtgggcgcactatgggttggtcgcagggggacacgggcggaggtggggggactcgggtgtgcccaggatgcagcagaggtcaggactgagcaacgcagcctgctgacctggagctaggcggagagcactccctggccagcatctttggggtccagggtcagcaccggggatcctctggacaccccgtgaccctcatgcaatgtgcagatgtgagagctcccacttaaggcaggcacccttaaggttgttggagtgacgccactgagctcctcccggctgctctgtggacttgttggggaagaagcctcagccaccctgaagggcggccgtgatggggaagctgccgggtgggtggacgtcctgagacggtgacgcctcacgcctcccgggaggggctgcggcctgtgctctcctcctgcccttccaagcagggcagcaggcatgtcccagcccgggagccacacgtcagcctgctgagagttcccacctcccgcagatgacaggtcagagcaggagggctccactctgtcggtgatctccgccacctcctctgccggccgcctgctgccgccccgggagcggcttcgggaggtggccttcgagtactgccagcgcctcattgagcaaagtaaccgacgtgagtcccccacccagggcactggcctccccagggctcgacgcacctgctctgcaaggccacctgaggccagcacagcttccctgagctactgctccacagagggggtccctgggtagccggtttggagcaggggcatttttgcttctggggtcagccccaagtgttcttcaggctccaccccagcccccagcccggccctgtcccacctgggcccctcgcctcagtcccactcaagtcctcctgggggcctgtcccacccccctgctcccggtcctgcctggagcttccagagcacaagctgccccctcattgggccactctaaggctgagacagagccggctgactttttcccctccttccaggagccctgaggaagggggactccgacctgcagaaagctgtaagtggctggggaccaggggatgggaggcagcgactcggcccatttgatgtggtccatgtcccgcagtgcctggtggaggccgtgctggtgctggacgtgctgtgccggcaggacccgtccttcctgtaccgaagtctctcctgcctgaaggccctgcacgggcgggtgcgcggggacccggcctctgtgcgggtgctgctgcccctcgcccacttcttcctgagccacggtgagcccagggtggggtggcgctgactcggggctctgcttctgcctttagttttaggatggaatttcttcttcccttttttttttttttttttttgattgaatagagacaggggtcttgctgtgttgcccaggctggtctggaactcgtggcctcaagcgatcctcctgccttggcctcccaaagtgctgggattacgggcatgagccaccgtgcccagctcatatttctttttgatggattgctgtgccagatgttggtaatttttaaacttttaaatagagaaataaacagactctttttgctgtgtccctagcccaggaaacctgaaagtctaggaaccagcaccttccaaagaatgtgccatagtgtgtgtgactcacgagctgtccgtgtccctgggcgagggagaccaagtgccgcttccccagcgtcccagcgtaggacgcctcggagcccttggtgtcctggagagcaggcctgagactcagggcccctaaccagtcacagaagcacggccagggcgaggtcaagacgtgtgccctggcgggccctggtcttgcaggggaagcggctgcagtggactcggaagccgtctaccagcacctgttcaccaggatcccggtggagcagttccacagccccatgctggcctttgaattcatccagttctgcagggacaacctccacctgttcagcgggcacctcagcaccctcagattgagcttccccaacctctttaaggtatatttgggcatccctgggtgccagggcaggggcatggtaagtccctggggctcctcccctctttccagcggggttcagggcgagtcctggctgagcatagagccctgtgagtcccgggcctggaatgcggtgt

SEQ ID NO: 37615 - DNA, 2300 bp, Homo sapien
taggacgcctcggagcccttggtgtcctggagagcaggcctgagactcagggcccctaaccagtcacagaagcacggccagggcgaggtcaagacgtgtgccctggcgggccctggtcttgcaggggaagcggctgcagtggactcggaagccgtctaccagcacctgttcaccaggatcccggtggagcagttccacagccccatgctggcctttgaattcatccagttctgcagggacaacctccacctgttcagcgggcacctcagcaccctcagattgagcttccccaacctctttaaggtatatttgggcatccctgggtgccagggcaggggcatggtaagtccctggggctcctcccctctttccagcggggttcagggcgagtcctggctgagcatagagccctgtgagtcccgggcctggaatgcggtgtgcagggtgaggtggggatctggggtgtccctgcagcgtcacgtgattgacggtgctgtccaagaactcccttgtgggtgttttggagagggggctgtgacacaagacggtgagtttgttctcacagcactggggcagggctgctgcctggtaggatccctcccccgggagccctgcctggtgccttgggcacttgggtgccatttgccttttttttttcttttgagatggagtctcattcctgtcacctaggctggagtgcagtggcgcaatctcagctcactgcaacccccgcctcctgggttcaagcgattctcctgcgtcagccacctgagtagttgagattacaggcacccaccaccatgtccagctaatttttggtatttttagtagagatggggtttcgacatgttggccaggctggtctcgaactcctgacctcagatgatcctcctgccttgacctcccaaagtgctgggattacaggcatgagccaccgcacccggcctggtgccatttgcttttgaagtgtcttttgcagcctcgcctcgctgtaaggtcttttcaactgaggtggggaatcctctttctggagaaaaaccaggacagtggaaaattattgacctgttggtacgaaagtagatacaggctgggggcagtggctcacacctgtaatcccagcacctcgggaggccaaggcaggaggatcttgaggccaggagttcaagaccagcctgggcaacacagggagacctcttgtctacaaaaagtaaacagcctcacatggtggtgtgtgcctgtagtctcagctgctcaggaggctgaggtgggaggatcacttgagcctgggaggttgaggttgcagtgagctatgattgcaccactgcactccagcctgggcgacagagcaagaccctgtctcaaaaaaataaaaagcgggaggaggcaaaggtagaagccctcctggggactgcaggtctgggacagctgtggggccctagctggctcctccctctgccgcctgctccacagctccgagccgtgtccgaaccgctgtgctgtgcccacagttcctggcctggaacagcccacccctcacctccgagtttgtggcgctcctcccggccctggtggacgctggcacagccctggagatgctgcacgcgctgctggacctgccctgcttgacggcggtgctggacctgcagctcaggtgggcccctcaccctctgccagcgctgcgtctcccagccagctggttccacacactgggccccctcctcgctgctcctgacccctacaccggggaccctccttcttccccccccaacacctgaccagtcctcccctgcaaagccacctctaggacagggtgtgtctgtcacccttggccacttgccaagggcagcccctgcaccctggagtgcctcacccgtcttcacgcccaggcctggagcctcccatgccaagcccttcctggcacccgaggtgctgtgatattagggacacctgccgtgtgtctccctgacgggggtgcccttgagtgcaggggccgcatcccagcctggccttgggcgtctgtccacgcaggtcagcaccggctgcatccgagaggccactctgggacacctctctcagggcccccagctgcctggaggccttccgggacccgcagttccagggtcttttccaatacctgctgcgccccaaggccagtggcgccactgagaggtacggggccctagggccagggggccaccagtggctcagagagcccggccacagccactggggtggggctcactgctcagccctaggctgaggccagggtgctttgtgtcccacacaaggctgcgtccccg

SEQ ID NO: 37616 - DNA, 2300 bp, Homo sapien
tgacggcggtgctggacctgcagctcaggtgggcccctcaccctctgccagcgctgcgtctcccagccagctggttccacacactgggccccctcctcgctgctcctgacccctacaccggggaccctccttcttccccccccaacacctgaccagtcctcccctgcaaagccacctctaggacagggtgtgtctgtcacccttggccacttgccaagggcagcccctgcaccctggagtgcctcacccgtcttcacgcccaggcctggagcctcccatgccaagcccttcctggcacccgaggtgctgtgatattagggacacctgccgtgtgtctccctgacgggggtgcccttgagtgcaggggccgcatcccagcctggccttgggcgtctgtccacgcaggtcagcaccggctgcatccgagaggccactctgggacacctctctcagggcccccagctgcctggaggccttccgggacccgcagttccagggtcttttccaatacctgctgcgccccaaggccagtggcgccactgagaggtacggggccctagggccagggggccaccagtggctcagagagcccggccacagccactggggtggggctcactgctcagccctaggctgaggccagggtgctttgtgtcccacacaaggctgcgtccccgtcatcaccattatagaggccctgcttctgcaccacgggtctgccgggggcggggcctggtctcagctctctctgctgcccacatcaaccctcataagcttggaggttggccctgtgggtgctccattttgcagatggacaaaccgagcctgagcccaggaagcaggaggcctgggaccggccacaggcctcctgccctcagcccacgccagcctttgtcccgatggctttactgtcccgggtgtgctgacgccaggggtctccccaaacccaggggagcaggaggtcccgagaggcgatgagtgaggatgggagcgggctcagctgtgcgagagggagcagtggcgacgtggccccggcctgcagtcaccaggtcggggagcgggcagcactcacggccacactgtgtcctcaggttggcgccactccaccagctgctgcagcccatggccggctgtgcccgcgtggcccagtgtgcccaggccgtgcccacgctgctgcaggcattcttctcagcagtgacccaggtgagctcgctgcctggggccccccattcccacaggcctcacaactgaggggcaggccagagccagcactggggggccctcttgagctctgcagaaggctgctcccgccacacccaccatccacggtccctgtgagggtcagggaggcacatgccacagccccggcaggccccgtcccttgtcccatcccctttattccagcaggccccgttccccagtccccgtcccatccccttcatcccggcaggccacgtcccccaatccccgtcccatccccttcatcccggcaggtcctgtctcccatcccagcaggctccatccaactgccccagcaggccctgtcttccgtccccaggacagggcaagtgagtggcctgggctctggccacacagctggggccggagcagtttgtccccctgctgcccctgataattcagcatccccatctgaggccaaaataaaggctcccacaggctggtgccccccatctcccccattgctgcttcccacctcggggagctctacaagccagtgcaggagagcctgggaggtggggaggccggcagggggctgggcgttgcttgggcgcacccttggccaaacaagacgtgtgcctggccttgcagagcgggagttggcagaggagccgtggaacagaagcgacacctctgccgggggcacttgggccagcccagggcttccctccctgtgcccggatgctgccagctgagtctctgtgtccctgggtgttggggaaggcagtggacgaggagtctccagcccctcacctgccccccagccctcaccatggcttcacccccaaccttagggcctgcagtgggggtggggctgagcctgtttcccactcctgacccccaggtggctgacgggtccctgatcaaccagctggcgctgctgctcctgggcaggagcgactcgctctacccggccccagggtacgctgccggtgtgcacaggtaggtccctcctgcgctcctgccacagccctgggcgggtgcctcctggactcctccccctctcccctcccccctccccttcagtggcttcggcaccacccctagctgggccctcagca

SEQ ID NO: 37617 - DNA, 2300 bp, Homo sapien
caaaaaacaagcaaacaaacaaatgttttccctgcctcctgtcacctaaatgatgaatgtccctgccttccaggcaggtttttagccgacttgattgatttctttcacaccgttggaggcaggaatctgatttcactgttcatttcccagtagtggtttctctggttggcggccgcctgtgaggccggcccttgcttgagacgggggtgggttccctgggcagggggttcccgatggcactggccggcctctccctggagcagctgcccttggaagtgccaggggtgaactgctgctgtgacaccgtccccctcacagatggcccctggtgggagtgaggaccacagggcccctcagctggctacccccaggccacctgtggaggccatccctctttgggctggggtctgcacccagagacctgtgaccatgagctccttcttgtcacccagatgagctggacagccctgcgggctgcgttccccgcactgagcccagcacagctgcaccggctgctgactcactaccagctggcctcggccatgggccccatgagcacctgggagccaggggcccaggacagccccgaggccttcaggtcaggtaagccctgccccagggcaggagagggctggggactcagtgggagactcgccccgaggctggaggcagcatgctctcatcccaactgaagtggggtgtgggggacctctctcctggggacctccctggaggagcctccacccagaggacccccccgccccgccccatccccaacctggggatccggggacctcctcggcgggggagtcaaggagccgagagtccatgcccaagttccaaactccaggctcaggtccaaggccccctcgttccctcacggagccggaggatggggcctcccctgttgtatggctacccaggaagggagcaatggtggtacacagccgtggggacgcatccctgagccatgtatgtgcacacgcacacacacatgtccatacggaggggtctgtgtgcgcatacatgtgtacgtgcatacataggggtgcgttttattttatttttatttttgagacaagagtcttgctctgtcatccaggctggagtgcagtggtgcaatctcagctcactgcaacctccacctcccaggttcaagcgattctcctacctcagcctccctagtagctgggattacaggtgtccgccaccacgcccaactaatttttgaatctttagtagagacgggtttcaccatcttagccaggctggtctcgaactcctgacctaggtgattcgcccacctcagcctcccaaagtgctgggattacagacatgagccaccgtgcctggccgagggtgccttttattgattgattgactgagacagagtctcactctgtcaccaggctggagtgcagtggctcgatcttggctcactggaacctccacctcctgggttcaagcgattctcctgcctcagtctcccaagtagctgggattacaggtgtgtgccaccatgcctggctaatttttgtatttttggtagagacggggtttcaccatgttggccaggctgctctcgaattcctgacctcaggcgatctgcctgctcctgcctcccaaagtgctgggattacaggcgtgagccgccacccccggccaggggtgcattataatgtgtagattatacacacatctcccttcatctgcattatgtgttaacacctcaacaaaacagagtacgggatggcgggaggcgcagaggcgatggggccttggatgcccccccgcagccccgggtcaccgtggagaacatctctgaacaggaaccctggctccacctgacaccttctaagtccttcctccgcattgattcatttctgtggcctgaattctgtgctgggagctaggagctcagtatgcacgcactcttccgccgcctgaaaggtgctcctgttcctgggggcagagagcagcccgcacacaggccgtttgggtcccgtgattcctgcagggaggcagtcggctccagccctgggaggagcttgcgtccagctctgccgggctgggggagctccagttacccggagacaccatcagagaccagtggggcagagacaggcccagtgcagagcggctcagtggggctggagggttcctggctacaaggccttgttctcagtcctgaactgctcggatgtcacaccgggtggtcggcgggaattcagaagggatgagtcctagggtggggccagtcactgtggccaggatcccagcctcctgtgtccacagggcag

SEQ ID NO: 37618 - DNA, 2300 bp, Homo sapien
gcccagcactgtcacgtgccaggagtgagctgcccctgagcctgggcaccacgaggccgaggtgacattgatagctctcacaggcccctgcccaagagccccagaagcccctgtgtgtgccggcgccctgtgcttgctgccaggggccggttgagcacatacccgctggagccatccctgatccgagtttggaggtgcagggcccgtcaccttttgtgcgttgacgaactttcctccaggccagcctctctcatccccggccctgtggacactgtggcaggagagctccttgctgtgaggctggcctgtgcattgcagaggattcagcagcatccccggcctccacccctagatgccggtcaccctctgccgccccgccacacacacacacgcaatacacccatggctgcaggcattgccaatgtccccaggaatccagtgtggccgccagtgagcaggaccgccctgggcccatgagtgctggaacaggcatcacacagtcatggccccccgctgggccccaccccacagtgacttggctcccagggacccgaaggacaactcgtagttgttcaagttcgttcagagaccctcagatcctcgctagtctgggccccgcttatccccggcagacaggggaagggggaaccacttgactgtgtagaaaccttatcactttctcatatcgaaatccacattttaaatgtctgagacttttaaaaagtaaaagccagctcaggcttccctgtccagatgtcagtgggagccgtctctgtgcaccgtgggtgttgtaatctgggtgtccgtgcctcttcccctcgggttcccggcttgggatttgatgggagtgccactgcagcgtgcccgtgtcccctccgtgcagtcatggacacagggccaggtgatgtccctgtagtgtgtgtccacatcgtggccactgtgaccgagagttacctgctggccagaagtcatgggttttcgcacgatcattgtcatttcccgagtctcctctgcgccaggcacttacttgcaaaccaaacgctgtttaatttctttatcacaaccaccctgacgatgtagatgccacaccccatgtcacagccagggaaactgaagccagggggccgtaagtcacttgctgagggacccgggtcccagcctgtgtcccagccacctggggctcgctgtgtggctggcccactccctgcagcacaccagggctcaccctgcccctatgctacaggctctgaaacagaggctcccagaggtgaattgcctggtccagagattgagctgatagacatgagaccgagcctgagtccacctcttccccctgcacccactgtgggaatccgaagcctccgctgggtgctgtccagatcccatgcgaatatcatttgcgcgtttgtttcctgagaatgtgcaactgtgtcgccgctgccccgtcctcattccttaccaaatatacacgcttagtctacgcgcactcagccatcacggttacattcagccggataataacttactactaaggcaagaataattcttttttttttttttttttttttgctgagacggagtctcgctctgtcacccaggctgtagtgcggtggcgtgatctcgtctcactgcaacctctgcctcccaggttcaagggattctcctgcctcagcctcccaaatagctgggattataggcatgcgccaccacacccggctaatttttgtatttttagtagagatggggtttcaccatgttgtccaggctggtctcgaattcctgaccttaagtgatctgcctgcctcagcctcccaaagtgctgggattccaggtgtgagccaccttgcccagcctctactattttttaaatagccggttgttatgtaagctagagagttgtgagatactctattgtagcaaacttgtaggtcatagtcggtaatggaatgggaagatgttgaagtcacatggaaaatgtcctttccagcacagcttgaataaatagtcagcgtcacacaggatgcctggggcagcatggcttgttttcctgtcgatggtatcgtgtatttgaacgcgtccctgtgttagcctgttttgctcacttgctttttctcccgctttgtaattgtaggagaaaaccaaagaactagcagagaagcaggcgcaactgtgagtatgacccggttattgtgcccgcctctgggcagcaggtcctgggggctcacacttcccgggggagccaagtcccgaggggtctccccacgccttggggtcagctctgggctttgtccttccatcca

SEQ ID NO: 37619 - DNA, 2300 bp, Homo sapien
gtgggaaaacgtctgtggtttgaggcctgtgggccgtggtgctggctggtcgggcaggccgcggtgtgaccctgggctgctgcaggggaggcgtggtcccctcagcctgaggatttgacaggcaggctgcctgctctgagactgttctgtgggtgccacggtggtgccaaggcactgtctggtttttcgaggggcgtggctagagggcagagtccttgagtctccaccagacctgttttgacagaacagtaacggcattaggagacgtggcttagtgggatttgaactcagaaggacccgggacatgggcgctattagacttacctgttttttttggcgggggatggagtttcgctcttgtcacccaggctggagtgcagtggtgcaatctcagctcactgccacctccgcctcctgggtttaagccattctcgtgcctcagcctcctgagtagctgggattacagatgcgcaccaccacgcccaactcatttttgtatttttagtagaaatggggtttcactgtgttggccaggctggtctcgagctcctgacctcaggcgatccccccacctcggcctcccaaagtgctgggattacaggggtgagccaccgcgcccagtcctggtgctatgagacttctaactgttcaccttgtgttgcttctgttccagggataaacgcccaggcccggaggctgcagcggagtcgcgcgaagggaaccccgaccccggccctgggggatgcccggagctctcctccaccccggttgcgccgcacagtcagtgagaccagcctgagcccagtgaacgccctgcccgctgccgcccagggccccgaggagcccggccccgacgccatgcggtactcgctgtaccagtccccgcatctgctccttctgcagggctacagccagcagcacgtgagcctcccctcctgacacccactgcccggtgccactgcagggacagcaggcgggactcagaagtcaaggcctccgcctgcctttagcccagtcggccgcgagctctgtggctgcagcccctctggctgtgccgaggctgtggagtgggatggcgggggcacatgtggagtcatccacattttccctgtccaggccacggtgggcggcagtgggggctcctcacttccccaatcccagagtgggtgccctcagcaccaggcgccttcagggagaactcctcacgccttcccagccttggtctcccgcctggctctggggaagggcatgggcagttggccagggccagtctgcttcctgcttctggcgagggggctgctgagtcaccaattggtggccacattctctgaaggggcaccgagcaaaggcccatgccacccctatctgcccagagccgtttctcaccacttccatcagagcaggcaggctgtcgccccgagcaaatgccaggcgcagggccacctcgcctcaccttgccggacacttgccctgccagacaactgttttccccgccccctgctcaccctacccccgccctcctgtgcagccagctcctttgctgctcatttccatgagcactttacagccatagggctcctgtgcccaggttttaggtggcatcttccctcggggcagtgctctcacacaggcggcagtgctcccacactgggggtggtgctcccacacaggcggcagtgctcccacacagttttggggatgacttgggggaagttatgtagtccttggcccggtctgtagaaccagtgcctgtttcccggccagccctgacctggcctgtcgctgtctcaaagctgggtgtctcctgggtctctcgtgtgctcctccgggaaaccgacctcctctgggatgggcccggacatcgaggggcgggttcctgagagccgtcggggttctggtgtgggggtggccagggacatggagagcccgtggcgacagcatcccagccacgctgcttcagcaaccagtgactagacacgggacgcttttcccgtgtgctgctcgcgttacgcctgccctgagcggagtctctgtttcaggacagcctggtgtatgtgctcaaccgggaccggcacacggtgggccagcggaccccctccagcaagcccagcatcagcctctcagcccccgacatcctgcctctacactgcaccatccgccggcaaccgctcccggacagcggccaggccgcggggaggctggtcctggagcccatccccggggcgcacatctccgtcaacttctccgaggtggggcacaggaccgtggtgctgcaccacggggacctgctctccctgggg

SEQ ID NO: 37620 - DNA, 2300 bp, Homo sapien
tatttctggcaatatatgggattaattatcccagaaaatctttctatgtaaagtgcctggaaatgttggataaatataagaaatcatttttttgaatgcatagctgagtacccaggaaaataaaggaagtctctagggctggaagaaaaagggataccttgaaacctcaggattgtagctgattctgaaactagaaccgccctagaggcattggccagtcttggaaactgagaaacttaagtttagcagctgtccaagaagagacagaaagctcttgggaccttaaaaggtagggagttagaattgagacccctccaaatacaattggaatcctcaaagggtgacacattgagtgaaaaaatggagtaagaagaatctgctacctggtgaaaggagatggcaaaggaagttctctctcttgacttgggtgggaaaaactaaagactgttccttaaaaatgaaaaccacatgtcctcttacatgtatttggggttcaaagttgcaccatctagatgttgtggataatccctggataagaaattacactgactgcaattctatagtgtacaagaacatctactggaaacaaagcaaatcctctttggaaggacacagcgtctacacaggcattccaagcttcaccagaaatgagctcacaatccaaaattacaagacccaagaggtaataccactctgagttcttggataacaacaaactatacagtttctcaagagcattcggaattagaataattagttatagagtactaaataagtatgtttaacacgtttaaagaaataaaaggtagggggaaaaacatgaaagaacagaatgccatctaaaaggcagagaagcttggaaaagaacaaaatagtgaaatataagtatttaagtggatatttcaatgatgcttaaacagcagactaaatacaactgaagagaggacttggaggtaatctggcatcacccagaaagacacacggcttaagagacatggaggacagagtgagaaggttgacaacgtgtctagatgaagagaatcaggagacaagtgggagaacatattcccaggaagtgcccaagaagcttctggagatcataaaaagcatgacttctgattcgggaatcatagtgtatcctgggtaagattatattttttattttttatttttatttttaattttatttttttttttgagacagagtttcactcttgttgcccaggctggagtgcaatggtgtgatcttggctcaccgcaacctctgcctctcaggttcaagcaattctcctgcctcagcctcccgagtagctgggattacaggcatgcaccaccacgcccggctaattttgtatttttagtagtgacggggtttctccatgttgaggctggtctccaactcctgacctcaggtgatctgcccgcctcggcctcccatagtgctgggattacaggcgtgagccactgcgcccagcctgggtaagattattaaagagaaatctatgcctggacacacagtggtgggatcacagggcactagggacagacacttttatagctgccataagaaaagacagacgagcagtagttcacctagctgcggaattctcaacgggaaccagaggacagcagtatcgcgcccttaaagcatggccagaacacaaatgtcgacctcgaaatgctgccccagctaaaccaatgtccagcaacggcccaagaaacaagacagaagctgctttccaccgcgggttcccaccacgaaggggtctttggacttccaaagggtgcacgctagggtgaagagtgctgagggtgcccccaaaaaggatgcacatctgcgatgtcaagggacttggagagcaaagaattagatgggtaaagttgggcaaatatgtaaaatagtggcaataaagggttgagtttggccggtcatcaacaacgtgaatcctgcccacccccatgtatagccccccgcgcagcggtaggagccccagcccagaacgctgtggctcccgtgagccctcgcgctggcggcgggtgcgcaggcgcccgcgcgtgtacggtaggttctggaacgcagccgctgaggggtctggcgccatgttggggctgaggggaaggaggagaagctcctgaagcggcgggcgcgcagcgggagtgggagtggggtcggaccagggcagctagaagccctgcccttccgcctcagcggatcatgacccgggcggcggccgcgaaggtcgcggtggtgggggacgtgccctggcggggcgggcgctgaaagatgatgccgtttccgg

SEQ ID NO: 37621 - DNA, 2300 bp, Homo sapien
ataccaaaaagtcagcatttctagatcaagaagcaatctgaaaagtttctctataaagggccaggtcatattttagatatttggggctgtaaaatcctggttgcaggaaagcagtcgtagataatatctaaacaaatgagggtagctgtgtttgaataaaactttatttacaaaaacagaaggcagcccagatctggcccatgggttgtagttatccgacccctgtggaagaaggatgtggggactgtgggagatgggccaggagcagggtgaggaatatctcaggaggaaaacccaggcctgaacccaggctctccttcagctctgaccattgtctcttcatgcgcacctgaatgaaatattcaagcacgtcattcctttcaagcatcccttcctggggtaggcgaggaggttggtgtgtatacagagggtcctgtattcctggctcagttcttgtctctacctccagcagcctgacctctctgcgtctctattttctcatctgaaaaatgggagtattactgaacaaaagggttctgcgcttgctctgctagaagccaatcttgatcaggtgcagaggttcatgcctgtaattccagcactttgggagactgaggtgggtggatcacctgatgttaggatttcaaaaccagcctggtcaacatggcaaaaccccgtctctactaaaaatacaaaaattaggtgggcgtggtggtaggtgcctgttaaccttagctactcgggaggctgaggcaggagaatcgcttgaacctgggaggtggtggttgcagtgagctgagatcacaccactgcactccagctagggcaatagaataagactctgtctccaaaaaaaaaaaaaaaaaaaaaaaaaaaaaaagccaatcttactgcattaagtttttgagacaaaagctttttttgtccgtattgtgagttgatcaataaggagacaggagcctggctcaaatctgtctctctgtgttgactttgaggcactattttttattagaaaaggtttaggaggtggactttaggattagcaggtgataggtggaggaaaggggaggcctggaatgtctcagacatctctgtctcacaagaattgatgtgagcattaagtgaggtgacctaggtaaagttgcctagggcctggcacacaggtggtcaataaatgtctgttcccacactcatcaatgtctgctccgacctccatcgcgaatatggggtcatgactacggaaatcataccacgatagctgtccacaaaaaggttcactcccgaggcccacattctgcatattgatattccgaaccacctgaatctcccaggtctagcccacattcctcaaagggaaaaccccagccaaagtgccgaggtcacgagctgctttttaaacaagtccccagggagagcagttggggccagagccccagagctgacctggtcatttttttgcataattgtaagcaggaatgccatgacctgatttgtcttttaaaactctgggtgggagacagatggtaggggagaggaaattcctcccttgttccttttcgatgtcttagaagatgtttattaattgggggcacagctctaccctcccctacacccactcactgggctactagaaggtgctgtctcgaaatagcccacccaaccgcaggagcccagagcccacaagcagctcagggacttagaactggtcccacccttcctccggggaccccccctccttaagctgcagtctgtgggtgggctgcaagtcccgcctctccacaaccagccccacccctttcttcaaaaccccgcctctccggtgaggccccgccccctcgaggctgcatccccgtccattgggcggccggcaggaggcgccagagcacagcccgccttttctagcaggttggccccgcccctctcctggagaccccgcctcctcgaggctttctttctgcctattgggcgccgaggcccagctccagcccacctgttctcccccgccccaccctttgtggccccgtccccttgaggccccgccccgcccgttgcgccgccggcaggaggcgccgcggcacgcgcgggtctgggcgccggccccagccaacggcgggtgggagcagcgcgggaacgtggcggcgcggcgggttgtgccggaggtgagtgtggggtgcgcgaggagtgactgcggaaccgggggtggctcgtaaggggcgctgctcggccgctgccggggacctggggcgcggaggccgcggggcgcgctcggggacactcccggccgctggtcggggcgcgga

SEQ ID NO: 37622 - DNA, 2300 bp, Homo sapien
gtcttgaactcctgacctcaggtgatccacccaccttaggctcccaaagtgctgggattacaggtgtgagccactgcgcccggcccagggagctggtttatatggaagatatagaagagtcaaccctagcaggaagagcaaggtgtggagaggaggcggcaggaggagtcccacacttgttctgctgctgatctggtgggtggcagaagaggggatatgggttgtgggggggatgctgctggagggagagccatgagcactttacatgaggagggtataccatcccgtctcatgttgctccactgctggggtgggaggtgaggagtcatggaaggtatcagtgttcttacatccttagggcaccctggagacggacttacatattcaggccttcgcaagttattagaagactggtagggtgaaattaaccaaggtgtgagtgtttacaccatggtgatgggtgaatgctacagatcagagcttcctgtttttggagagctaatttacagacacaccatgacctgcaccccatgcacacatctctgcacaccatccctttttaccagtataacagataatatgcgcacttatgaacgtgcacacattcacatccctcttcttgtattttgctcttccaaaacctcacaagatgaaattactgttttctttttctttttttttgagacacagtctcgctctgtctcccaggctggagtgcagtggtgcactcagtgctgcctcagcctcctgagtagctgggattacaggcacctgccaccacgcctggctaatttttgcatttttagtagagatgggatttcaccagttggccaggctggtcttgaactcctgacctcaagtgatccgcccacctcggcctcccaaagtgcgaggattacagccatgagccatatgaggacaccaaggttgctcagacagtggagatctgtctgctcacataccttcagcttgtcctgacaactttctctttgcacatctggcttcctgatggactttcaatggatttttgcccctgttgcagtgttaaaagaggagggtgctacatcctggctggggccagcagcccttatgggttaggtgttaggtttacctgtgtatcatgtgacccgcccatttcatcacctggggtccaggtggcagaggtcagccgtcttctgtttactcccacagggcagtgtttttcaagcctttttgttgaagacccatactaagaaatacattttccacgctgggcgaggtggctcaagcctgtaatcccagcactttgggagacagaggtaggtggatcacctgaggtcaggcgttcgagaccagcctggccaacacagtgaagctccctcccactgtctctactaaaaatacaaaaattagctgggcacagtggcttatgcctgtaatcccaggtacgcgggaggctgaggcaagagaactgcttaacccaggaagcggaggctgcagtgagctgagatcatggtactgcactccagcctgggcgacaaagcaagacttcgtttcaaaaaaaaaaaaagaaaaatacattttacacagtgattgtagtttactgaaatgggactgactttggtgatatgctctgatacttgctatcctatcctatcctgtcctagcctttgtctattttggctgctataacaaaataccatagactgggtggattataaacaacaggaatttatttctcacggttctggaggctgagaagtccaagaacaaggaactggcaagttcagtgtctggtgagggctgtttcctggttcgtaggtggtgttttctcattgtgtcctcccatgactgacacatgggcaaagcagctctctcaggcctcttgtgtaagggtactaatcccattcgtgaagatgcagcctccctgacctaatcaccttccaaaccctcccttccttccttcctagcttccttccttccttcctagcttccttccttcctagcttgcttgcttgcttgcttccttccttccttcctctgtctctctttctttcttttttctgagacagagtctcactgtgttgcccaggctggagtgcgatagtgtgatcttggctcactgcaacctctgcctcctaggttcaagcaattatcctgtctcagcctcccaagtagctgggattacagatgcgtaccatggagcccagctaatttttgtatttttaatagagacagggtttcgccatgttggccagctggtcttgaactcctgacctcaagtgatctgcccaccttggccacctcctgaagtgctgcaa

SEQ ID NO: 37623 - DNA, 2300 bp, Homo sapien
gctggagtgcagtgttgtgatcatagctcactgcagcctccaactcctgggctcaagtgatcctcccacctcagcctcccaagtagctgggactgcaggtgcaagccaccatgcttggctaatatttttatttttgtagagatgggtctcagtatgtagcccaggctggtcttgaactcctggcctcaagccatcctcccgcctcagcctcccaaactgttgggagtacaggcgtgagccattgcaatggccacattttaaaagtatatatttattttgtttttattttttgttttgttttgtttatgtttttgagatggagtcttgttctgttgcccaggctggagtgcagtggcatgatctcggctcactgcaacctccacctcccgggtttgaatgattctcctgcctcagccccctgagtagctaggactacaggcacatgccaccataccctgctaatttttgtatttttagtagagatggggtttcaccatgttggccagggtggtctgaaactcctgacctcaggtgatctgcctgcctcggcctcccacagtgatgagattacaggtgcgagccaccgtgcccggcctgagtttctcttctttacctttacccctggttgtgattgactgggcactgccctgtgccaggccctgtgctggtatctgagggtattgtcacaaacaaaacccccagctccctctctttgttggggacaaaaacaaacaaaccgaaaaccaaataaatattgaaggttttacataaacagggagaatacattttcaaaaagtctaaattacagcaatcagagagaagctgatggaaatgaaagagacaaattctgcaggcattgagactgaaaaagtaaattatttgcaatgtgaaaaaaacaagctggcttctgaatgtggccacagcaccatttaatgctgacacacagtggagacacttctaataatttcccagagataaacttcagaataaactatcaaatggggttgtcatgcagacataaaaacaataggcaccatggtcacgcatgaaagaagtccaagaataccatatccatgaggagtttttgaaagaaactagtttgtgatggcatgtgcctgtgctcccagctactcaggaggctgagacaggaggaccgcttgagcccaggaagtcaaggctgcagtgagctatgattgtgccactgcactccagcctgggagagtgacacccggtctctaaaaaaacaaacaagaaactgaaacatgtaatttaaaaaatccacctgccaggcgcagtggctaacgcctgtaatcccagcactttgggaggctgtggtgggcagatcatgaggtcaggagatcgagaccatcctggctaacacggtgaaaccccgtctctactaaaaatacaaaaaattagtcgggcgtggtggcaggcacctgtggtcccaactactcgggaggctaaggcaggagaatggcttgaaaaaaaaatccacttttttttttttttttttttttttgccgagatagagtttcgctcttgttgcccaggctggaacgcaatggcgtgatcttggctcagtgcaaaccctgcctcccgggttcaagcaattctcctgcctgagcctcccaaatagctggaattataggcttccgccaccactcccaactaatttttgtatttttagtggagatggggtttcaccatttgggccaggctggtcttgaactcctgaccacaggtggatccacctgcctcggcctcccaaagtgctgggattacaggcgtgagacactgcgccaggcagaaaatccagttttcttgtgctttacataatttatcttaactttagagtccaagtgaattttatggtgaagaaacatttgtttgaagttcagcaaaatttgtaagtgtccattttcttcttttgaagtcaagttaaaattaaatgtaatacttttaattaaaaaagatgtgtataactttaattctcaccctttctcctttcccttcatcccgtcctatccttctacccagtgacctatttttaggtctacttggaaggatatctagaatgatgttcactgatggttattttgggtaatgagatgggttattattttttactcttaaacttttcggtgttacttaaattctttataatgacagactccaagcaggtcactttttttggcagaagttttacataacacattctcatttcagaaattcattccaggccaggcgcgtggctcacgcctgtaatcccagcactttggcaggccgaggagggcaga

SEQ ID NO: 37624 - DNA, 2300 bp, Homo sapien
ctccccagtggaagtggcgaaataaattagatggagtcagcaacacctgtaatctccccactttgggaggctgaggcgggcagatcacctgaggtcaaggagtttgagaccagcctggccaacatggtgaaaccccatctctactaaaaatacaaaaatcagctgggcatggtggtgcacgcgtgtagtcccagctacttgggaggctgaggcacgagaatcgtttgaacccgagaggcagaggttgtagtgagctgagatggcgccactgcactcaaacctgggcgacagagtaagaccccgtctcaaaaaaaaaagaaaaaaaggtgaagtcctttgtctttttcccacttctggtcctagctccctgggggcagagggagtgggtggggttatcttctgaatgttcagcaggatctcaaataaagcattactgtattaataaaaaggaataggggctggggcttgggaaggagggtgaagtgtgtgtgcaaacgaagggccttctcttggatctggggaccaatcctagggttcctcaggtgccgctggcatgtctttcacatggaagcctgtcttccctccatcagccccccggggttccaagcctcccatagggtggttggttttccaaagcccagaacctgggccaggtctcctacgggagaaagctggaatttgtactcgggaatccagccaccagatgcaaatgaccctgtcatggcggtcaggagggtcctcagagtcatgaagtcttgggggaagagggttttcccagaggccctgacccttcccgggcaggtcccataggggcccttgtgcctagcagggacgtggcagtagggagccaggcagtggggggagcaagcaagccacaggcaggcggtaggtgctgggcccagctacactggggacgacgggcacagtgtccgctgtccttccagccaagttggggccagcggggtcggtccagccctgtctagccctggagggcttttttctcctcactggaaaaagtactggtggaggatacctgggaaaaaggggctggattgggaagtcccctatccacttcctactccctccaccccccaccaacctcactttccagtccccctaccctcgggtcccccactccccaccaactcctccacttcccactccctccacccccaggtcccccgctccctccaacacccccacttcccactccccccacccccaggtcccccactccctccaagacccccatttcccacctccaccaacctcggagtccctctcttcccactaaccccctcactccccccccaacaccccgacttcccactccctccacctccagttccccttcttcccaccaaccccccacttcctccacccccaggtcccccactccccccaaccccccactttccactccctccaccccccaacacccccatttcccactccctccacccccaggtcccccactccccccaacttcccccactttccactccctccacccccaggtcccccactccccccaaccccccactttccgctcccccacccccaagtcccccactccccaccaacgcccccacttcccactcatcccacgtccattcccactctccttaccccccacttcccacttcccccaacccctccagcaccccctgttcccactcccgtccccttcccactccccgactccctcagccccgcaactttgcattccacccacctggcgcccccgccttcccaatccttcccactccccctactaccacttcccgctccccaccccaccaaccccccacctcctggcttccagggagggcaccgggaaaaggggccggggccagggccgccccaggcctgggcgatgggtggctcgcgcgcgcagccaggaccccccccgtcccgcccccactccttacgcccacttcctcacccccacctctcccacccccccatctccccacgaccctcctccacctcagcggaggcggcggggtcgcgggagggagggggccgggcttaggcgattggcagcgcgagcccgggagcccccccgtgcccccgcccgccccgcccccgccaccatctgctcgggatttggcgtcggcggctccgggcgcctccagctccggctcgggctccggctccggctccgggcgccgaccaggtccccttggcccccgccgcgcgccctccaacctgctgctgccgccgccgcgccccccaggctctgccagctacccgcgctctgagcccggggccagattcccatggaagcgccgcgatgt

SEQ ID NO: 37625 - DNA, 2300 bp, Homo sapien
tgcttcttcccaggaaaacagcaaaacatcacttgttgacaatagtttagtctgcaggtagctatcttgccctttctgattcttggtgctggttaacattaagacaaagaaaacaggccgggcgcggtggctcacgcctgtaatcccagcactttgggaggccgaggcgggtggaccacctgaggtcaggagtgcgagaccagcctgaccaacatggagaaaccttgtctctactaaaaatacaaaattagctgggtgtggtggcacatgcctgtaatcccagctactcaggaggctgaagcaggagaatcacttgaacctgggaggcaggggttgcggtgagccgagacggtgccattgcactccagcctgggtaacaagagtgaaactccgtctcaaaaaaacaaacaaaaacaggccaggtgcggtggctcaagcctataatctcagcactttgagaggccgaggcaggaggatcacttgaggccagcagtttcagaccaacctgagcaacatagaaagaccctatctatacaaaaaaacttaaaaaattagtcaggcatggtggcacacacctatagtcccagctactcaggaggctgggatgggagggtcccttgagcctgggaggtcaaggctgcagtgaactatgattgattgagtcactgcagtctagcctcactgacagagtgagaccccaaccctccgccccccgaaaaaaacagggccgggcacagtggctcacacctgtaatgccaacactttgggaggccgaatcaggcagatcacctgaggtcaggagttcgagactagcttggccaacatggtgaaatcctgcctctactaaaaatacaaaaattaggcggatgtcgtggcgggcgcctataatctcagctacatgggaggctgaggcacgagaatcacttgaatccgggaggcagaggttgcagtgagccaagatcatgccattgcactccagcatgggcacatgagtgaaacttcgtctcaaaaaaaaaaaaaaaaaaaaaaaagccagaggcttcaaaaataacctgaatgattccagactacctagaaggaaggagtagcttcctctcaccctcattgggagaaatgcagagataggataattgtctttatgactccaaaaatgcctgagacaagaacatgtcaacaaataactccaatgagagcctctcagttcacatatgaccccatttcatccttgcaagaacaccgggcaatagataatatcttaaaattcccattttactaataaaaaattcctagccagacgtggcagttcacacctgccataccaccactttaggagggcaagacggaaggataacttggacccaggagttcgagatcagcctgggcaacaaagcgagattctgtttcttttttttttttttttttttgagacagggccttgctctgtcgcgcaggctggagtgcagtggtgcgatctctgctcactgcaagctccgcctcctgggttcacgtcattctcctgcctcagcctccagagtagctgggactacaggcatccgccaccacgcccgggtaatttttttatttttggtagagaaggggtttcaccatgttggccaggctggtctggaactcctgacctcaagtgatccacccgccttggcctaccaaagtgctgggattacaggcgtgagccactgtgcccagccgtgagacccacttttctcttaatttccccaattcctagaatagtgcatggcccacaggaaatccgcagaatatatttgcagaatgaatgaatgacttgccaaaggaattagggcaaataagtagatatcgagtaaacatccacaaccacctgccccatacccttttcagctctggggagatggtggctcctgtggggtcggggattgggggtctccgttcctttcatcctccagcctcgtgggggagtcaagtctccgtaggcggagagcccggatgcaggcgcggctaggctgccctctctatggtgagccccccggtccctcctccgcagcacccggagtgcctctatggttcttcctgtcgttagtcgggagggggcgctgtacgcgcgctgtacgcttgcgcgaggtgacgccggggcagggccggaaggaatgcagcggctgccacggagctcgtagctgcagctttggaggagtaagcggcgtggtagcgaaggtcgccgaacccgcctggctagccggcgagttgagtggcgagtgagtgtcggctgcggggcgcgctcgagcttctgggcgggtctgtgaggcgag

SEQ ID NO: 37626 - DNA, 2300 bp, Homo sapien
acacagctagcgagtagccgagctgggaatctggcttcaaagcttactctctaaccatgtgcttttctgttcccataataccaaaaactggttttgttttttgtatttttttttttaattttgagagggagtctgcttcccaagctcaagcaattctcctgcctcagcctctcaagtagctgggtttaattacaggtgtgcgccatcacgcctgggggtttcaccatgttcaacaggttggtctcgaactcctgacctcagatgatgcaccctcctcggcctcccaaagtgctgggattacaggcatgagccacactgcgcctggccccaaaaacttgttttctgaagaaaaagtttgaatttaaaaatatgtgagaatgagcaagagaaaaggagaatcaaaataaaatgtattagtaaccagatagtaaatgttaagatcaagagattaccaagaacagacaagcccaccctgcctgcctgctcttcagtgtgttattgggtccttccaagggaagtgacagtacatgtctggtgaatgagcttgtgatgagtgaatgggattccctcccaataggcaactgagagcaaagttctgggtggagggtccttggtgcatcctccacttactcttcatgccaatgggtacctcaggcctgtctgtccaacctctggactttcttaactctgccccagtctccatccttaaccactcagggccagcctcttacatgggattccttcttccaatctaaccctcctccagcccctcccctgtgtggctggggtaaggcagagtctgatcccatctggcctggcctgtgcccagaagtgcccaagaggcaagtgtcctcttgcccacaggaccccaggagatgatgggcacactaaagtttgagaactactgcctcaggcaactttataacatgcctttccaattcaggtttggatccaaatcctcattccagtacttattagctgcttataattttttgtttgtttgttttaaagaggcagggtctggtcaggcttggtggcttatgcctgtaatcctagcagtctgggaggctgaggtgggcggatcacttgaggtcgggagttcgagaccagcctgctgaaaatggcaaaagctcatctctactaaaaatacaaaagttagccaggtgtggtggcgcatgtctgtgatcccagcatcccagctattccggaggctgaggcaggagaatcgcttgaagctgggaggtggaagttgcagtgagccaagtttgtgccactgcactctagcctgggcaacaggtcacagaagcagactctgtctcagaggaaaaaaaaaaaaaggcagggtctctgttgcctgggccagagtgcagtggcacaatcatggctaacagtggccttgaactgggctcaggcagtcctcctgcgtcagcctcatgagtagcttggactacaagctcgtaccaccaggcccagctaattttaaaaaattctttgtagagatggggcttgctgtgttgtccagggtggtctcaaactcctggcctccagtgatcctcttgccttggcctgtcaaagcgttggtattacaggcgtgagccactgcacccagaccttattagcttcttgatcctgtttctccatctgtaaaatgggctcttgtgagaagtaaacaggacaaggtttgtgatgagcttgggacagtgcttagccagcaggagtaggtgtatcgatccccccctttgtttttttttttttgagatggagtctcattctgtcgctaggctggagtgcagtggcaagatcttggctcactgtaacctccgcctcgcaggttcaagagatcctcctgactcagcctcctgagtagctgggactacaggcgtgcaccacaacagccagccagttttttgtatttttagtagagacggggcttcaccgtgttagccaggatggtctcgatctcctgaccttgtgatccacccgcctcggcctcccaaagtgctgggattacaggtgtgagccaccacacctggcctcgatccccgttttacagatcaaacaagttcagtgaggttaggacattgccgaaggccccataacatggatgtgaggagccaggttggacctgtgtgcattcattagatgggtgggaggctgaggaattcacaggacgctaacctggccctctggacatctgtgtgtgctgcttaggtgcatgcaggagcgggggcaggggctgctggtgtggcagcaggaggagccctctgagtttgacttggcctacgccaatttcctctccc

SEQ ID NO: 37627 - DNA, 2300 bp, Homo sapien
ctgactgaatggactcccctgtcggccagcaagatccaaaataaacatgaaaaactaattcaggtcatgatgggaaggagggggtcggacatgccttgtcatactctcctcccttcagagtttaggcacagctgaccaacattaacactagaatacagatcataagactgacagaacaggctctttgtatcagtaagatacccaactccatccagactctgatatagcatcacatgacagatagcagtccctgaaggaaatcatagtattttatcccataatatattttctttgacacactttaaaatagtcctgcaaagccatctctttgggggaaatttgcattctgtagagaatctccttcccttacagaaaagaagtcttttctggagattctgacaccttttaagatccaataagagatatttatcatctattctctctgaagcctgttctgaggcttcatctacataacaagaaccttggtttccacaatgccccttatcttaactcaagcttttcttttctttccctccctctttcttttccttccttccctccttcctctctctcttttcctccctctctttctctctttcttttcttctctgttgcccaagctggagtgcagtggcaccatcatggctcactgtagcctcaacttcccaggctcaagcaatcctcccatctcagcctcctgagtagctgggactacaggcatgcaccaccacacctggataatttttttttttgtagaggtgggggtctcgctgtgttgcccaggctgtccttcaactcctggcctcaagggatcctcccagctcaccctcccaaaatgctgggatcacaggcatgagccaccgcaatggcccatttcttcatgtcgttttccaactgttcagccaacgcttaactctgaaccaactgccaatctttgaatctgctagtgacctgaaagcctttccaggctgacccaatgtgtacctctcatgtattgatttatgtctttgcctgtaactgctgtctccctaagatgtataaaaccaagctgtaacccaaccactttgggctcacgttctcaggaccccctgaggctgtgtcaccagccatggtcactcaagtaggaggcccagaataaaactcttgacagactttgagtctttttggtcaacataacctaaccctaaacataatcctcctggggaaggtgagatcacaggtatctcttttcttcgttcgatctgtgtatttcctgatttctctacagtttttaggcattcgctgtgtgatctagaaaagctacagagtctcgctccgtcgccaggctggagtccaggggcgcgatctcggctcactgcaacctccacctcccgagttcaaactattctcctgcctcagcccccgagtagctgggattacaggcacacgccactactcccagctaatttttgtatttttggtagagaagggatttcaccatgttggccaggatggtctctatctcttgacctcgcgatccgcccgcctcggcctcccaaagtgctgggatttataggcgtgagccaccgcgcccagccacaaattctattttctttctcttccttggaaagcatcgctgggcatttatcctgtcctagtatttgagtgaaacttctcttagcatttcagcgcagtgaccacgatacaccctttcctttccttctctttatgggaaactcggttctaacccagaggccttgggctccaggacccagtcaggcagccctggacttgaccctaaaagggagtaaagacaaatgcgaagttcaatcaggggttcagagctcccaaagctcatagcctggagcttcttaacctttaggcagggtagagacatttaaaacggcccctaaacttggggggcgcgtaggctcatgggaaatagagtagggtgcttgtcctgggaccagctgtgggccccggaggctgacttccggtgcactcctgcgcgtgtgcacctctctctgtgtgcgtgttcgcgcatgcgcgccgccgctgcactgccctcgcttcctgtgcgtcctcaggtcaccgcttgctctagttcccaggctttggcctccagtggacgagaatcgcggagcctgcggggctggaggttgagcgcccgggccagcacctaggcgggcgcgggggtgtgcaggccagggttcgcgcgggccgggtggaggcttgagcggggacccccgagcttgagccccggagccggcggcgctggggccagaggggccggacgggaggtggcggaggtggcggcggag

SEQ ID NO: 37628 - DNA, 2300 bp, Homo sapien
gtctaatttttttatttttttcgtagagacagcgtcttgctgtgttgctggactcaaactcctgggcttaagtggtccacccaacttggccgcccaaagtcctgggattccaggagtgagccacctcgtccggccatgtgcttttcattccaccttactcattgagggttaagctgagctgaagtgtgaacaggtgactaatgctttgctgaaggagggggaatctgggagttggttgggacttgggggtgtgattcccccacaatggctccctttgctctgtcactcctttggccagaaccaccaggcagtatgtaagcaaggcaggggctcgcccttcacccccaccggaagtgcccatttcacagattttctccccccacgcccacatttgctggtgcttggcttggggttggcgaacttttcaatgttgtctctaaattatggcaaaagacacaaatgcaagactactactttatacctgaggccaaaaattcacccactgttccttattccatcccaaattatgtccagatatgaggatgctaggctcttcaaagaagggaagcagaccaggcacacctgtaatcccagcactttgggaggctgaggtgggaggatcttgagctgaggagttcaagagcagcctgggcaacacagccaggccccatctctatttatttcgtgtgtgtgtcttttgtttgtttttgttttttgagatggagttttgctctgtcgcccaggctggagtgcagtggctcaatctcggctcaccgcaagctccgcctcccgggttcatgccattctcctgcttcagtctcccgagtagctgggactacaggcgcccgccaccatgcccggcttattttttgtatttttagtagagacggagtttcaccgtgttagccaggatggtctcgatctcttgacctcgtgatccgcccgcctcggcctccctaagttctgggattacaggtatgagccactgctcccggctctaatttttgtatttttagtagagatggggtttcaccatgttgaccaggctggtctcaaactcctgacctcaggtgatccacccgccttggcctcccaaagtgctgggattacaggcgtgagccactgagcccagccaacatcctctataaaccccctctaaaaagcagaaatggggttaacctgtaccaggaagtagctatgtgattattttttctttccaggcaagattgcagcacttccctggagaaaatgagttctggcaaaaataaccagacatttgaggaactcagtcaccaaagaacaaactgcaccacctatgctaaagactctcaaagaaataagaatatattggtaatgtttgggagactgaggcaggaggatctcttgaggcccggagttcaagacctgcctgggcaacatagtgagactccgtctctacaaaagataattttaaaaattagctgggcatggctgcgtgtacctgtggttccagtactcaggaggccgagataggaggatcgcttgagcccaggaatttgaggcgacagtgagctatgatcatgccactccattccagctcgggcaacagtgagaccctgtctcaaaaacacaaaaacaaaaaaaaacaggcatgcaaagaagcagaaaaacagaacccataatgagtagaaaaataacaaagacccagaaatggcatagatgatggaattagtgatcaggacattaaaacagctactatgaatattccccgtatgttcaagaagaatggagaatgaacgagagtgagggaccggaaacgactgtgttccatgctgagggtggcagaggctggcctggatgctggatgaggctcaactcgggggcctgggctgttgcactggggctggactggggatcacggaagagggccaggcccgcgtgggtctccagggctgtgctcaggggcgtggtcttctgcagtgggggcttggctggtgagtggagactctgcgtgactctgggggcgtggccgagaatgggtgtagctctgtactagggcgtggtcatgcgtaggggtttgggtgaggcgttaacagtgggcgggcgtggctcgggctcgagggcgtggctcaggctcgtggaggcgtccgagctccagggcagctctggggcagaactgtccggatctaacaatccctggggagccggagaccggtgactggtccgtgggctaactcagggctgctcgggagacataggcgggccgtgggggcaggtgaagggtgctggacgtgcgagcctggcacgcagaagccagaggg

SEQ ID NO: 37629 - DNA, 2300 bp, Homo sapien
tggtggcacatgcctgtagtcccagctactcagggaggctgaggcaggagaattgcttcaacccaggaggttgaggttgcagtgagccaagatcatgccactgcactccagcctgggcgacagagggaaactccatctcaaaaaaaaaaaaaaaaaaaaaaaagaaggccaggcacggtggcttacgcctgtaatctcagcactttgggaggctgaagagggcagattgcctgaggtcaggagttcgagaccagtctggccaacatagtgaaaccccatgtctactaaaaatacaaaaaaattagccgggcatggtggcgtgtgcctgtaatcgcagctactccagaggctgaggcaggggaattgcttgaaccagggagatggaggttgcggtggagccaagatcgcactactgcaccccagcctgggtaacagagcaaactccatctcaaaaaataaaaataaataaaaataaaaataaatctactgtatctgaaatcatctcatcttccattctaaaaatagcttattttggccaggcacagtggctcacacctgtaatcccagcactttgggaggccgacacgggcagatcacaaggtcaggagatcgagaccatcgtggctaacacggtgaaaccccgtctctgctaaaaatacaaaaaattagccgggcgtggtggcaggtgcctgtagtcccagctactcgggaggctggggcaggagaatggcatgaacccaggaggtggaccttgcagtgagccgagatcgtgccactgcactccagcctgggtgatagagtgagactccatctcaaagaataaaaaataaaaaaataaatagcttatttctattctcccttcatcagtgcagactgaagtttgtctaatttattagttttaaatacaaatcaaatttttttttggaggggggaggtttaacaaatcctttccaataagtgattttattttatttatttatttatttatttatttattttttgagacggagtctcgctctcttgcccaggctgaagtgcagtggcacaatctcggctcactgcaagctccgcctcccgggttcacgccattctcctgcctcagccccccgagtagctgggactacaggcgcccaccaccacgcccggctaattttttgtatttttagtagagacggggtttcaccgtgttagccaggatggtctcgatatcctgaccttgtgatccacctgcctcggcctcccaaagtgctgggattacaggcatgagccaccacgcccggccccagtaagtgattttagctttttaactttttacttgagtgacttgagactcaaaggaaagtctcaagaatagtacaaagaatttccaaatacccttctcatctagatctcccaaatattaacattttaccacatttgcgcaggcggctgatgaaaaaggtcccaccacaaggtggcagagtaaacacgacagcacctgggcgaggctttgtgcaggcaggaaggccctcacaccagaggccgtcccagggctgtggcatgggggccattacccaggagagggcacagggccagctcctgggtatctctgagagccttagggtccttttgttgttgttgttttgatatggaatcttactctgtcacccagtctggagtgcaatggcacgatctccaacctccacctcccgggttcaagcgattctcctgcctcagcctcccgagtagctgggattacaggcccctgccattatgcctagctaatttttgtagagacagggtttccccatgttggccaggctggtcttcaactcctgacctcaggtgatccgcttgcctcagcctcccaatatgctggggttaaaggcatgagccaccgctcccagctagccttggggtcttaatagccacatggtttgtcttatacatggccggcagatgttgggtacagtttcccaggtatgcacaccaagagatctctaaatcactacaaatctgcatgtacttgggctatgattcaaacaactggggccaggcatggtgcctcacacctgtaatcccagcactcagggaggccaaggcgagaggatcccttgagcccaggagttcaaggccagcctgggaaacatagcgagacccgtctctattaaaaaataaaacaggccaggcgtggtgggtcacgcctgtaatcccagcactttggaaggccaaggcgggtggatcacgaggtcaggagatcaagaccatcatgctagctaacacggtgaaaccctgtctctactaaaaatacaaaaaattag

SEQ ID NO: 37630 - DNA, 2300 bp, Homo sapien
ggcaggcagattacctgaggtcggaagttcgagaccagcgtgaccaacatggagaaatcccgtctccactaaacatacaaaaattaactgggcgtgatggtgcacacctgtaatcccagctactcgggaggctgaggcaggagaatcacttgaacccggaaggtggacgttgcagtgagccgagattgcgccatcgcactccagcctggtcaagaaggtgaaattccgtctcaaaaaaaaaaaaaaaaaaaaaaaaaatatatatatatatatatatatatatatattcgctcattgtacccccgagtttctaattatatttatttattttattttttgagatggagtctcactgtgtcgcccaggctggagtgcagtggcatgatctcggctcactgcagccttcacctcctgggttcaagcaattctcccatctcagtctcctgagtagctgggattacagggccgtgccaccacaactggctaatattttacatttttcctagagacagggtttcaccatgttgggcaggctagtctcaaactcatgacctcaggtgatccacctgcctcagcctcccaaagtgctggggttacaggcgtgagtcaccatgcccagcctattttattttactttttagatggagtctcactctgtcgtccgtccaggctggagtgcagaggtgcaatctcggctcactgcaacctccacctgtggggctcaagcaattctcccacctcagcctccctagtagctgagattacaggtgcccaccaccatacccagctaacttttgtacttttagtagagacggggtttcaccatgttagccaggctggtctggaactcccgacctcaggtgatccacccgcctcagcctcccaaagtgctgggattacaggtaagagccaccacacctggccttctatttatatttaaatatctccccattataacttctctgagggaaaggaggaggcctatttagttcacatgagaggtgcgtcctaaatactgttgaatgaatgaataaatttaagggacgattctgtcccaggaacccagacagtatggaccttggagaaacaggacgtttccagtctcagatctagcacttggctaataattatttctgagcctcgattttcaaatctgtaaaattaagatatactattctctacttaggattgtaatgggcatcaaataagataatgtggctgggcacagtggctcacatctgtaatcccagtactttgggaggccgaggtgggagcatcacttgaggccaggagtgcgagaccagcctaggcaacagagtaagaccccccccgcccccaccccatctctacaaaaaacttaaaagttagcagggtgtggtggcatgcatttgtggtcccagctacttgggaggctaaggtgggaggatcgcttgagcctgagtttgaggctgcagtgagctgtgattgagcctctgcactccagcctaggcaacagagcgagaccttgtctttcaaaataataaaatgataaggtaatgcgcagaagcattcagcacagtgattggcacatggagggcccattggggtgtttttgtttttgtttttgttgttgtttgagacagagtctcgctctatggcccaggctggatggattgcagtggcatgatctcggctcactgcaatctccgcctcctgggttcaagcgattatcttgcctcagcctcccgagtagctgggattacaggcgtacaccaccaagcccggctaatttttcttgtatttttagtagagacggggtttcaccatgttggccaggctggtctcgaacttctgatcttaggtgatccgcccgccttggcctcccaaaatgctgggattacaggccaccgtgcctggccattgagtgttattaagaggagggtacgcagaaaacagactcccgccagctctgccccatgcgcatgagcggccgccgctcgccctcagccaggcccagcgcgccccgacgcgtccccacgcctgcgtgatccaccggaacccaagcccaggcaggcggtgagagggcggggcctccgcagtgcgactgcgccgctcgaggccgtgcgtcgcgggggcggggccgcgcaggcgtaccgggtgccccggctctggagcataaacaagagcggggacgggatgaggcggcggttgatcccagggtggcgagtggcggcgaccgaggcggcgagcggggcccggcgccgaccctgagtgcagcctgacccgccctcgcgcgcgcgccctccccggccgggcccact

SEQ ID NO: 37631 - DNA, 2300 bp, Homo sapien
accatttggggagtttggggaatatccaaaatctggtcataaggtccattccatccgttcagccagtgtggaaggagctcctcgtctatgacaggcgacattagacctgggggtggtgcagccgtgaatgggccaaacacggcacctgtcctcagaccatcagtccagcagggaactctgtctctcagccattgcctagattctcagtggtaagcgcggtgactactagaggcaacaggtacaggatgcaaccgggccagtgcgtgcagcccctaatactaccaagtactacctgagaatggggtgcctggagagtgagaggctagacagtggccggggaagggccttgtgcccctggatttgcacatctggctgccggatttgagaagtgagggtggcagcctcaggacaccagccatgatcatcattcagtcctaccctcctttttggggcaggactggtattacagacagggtctcgctcttttgcccaggctggcatgcaggaacgtgatcaccgctcattgcagcctcaacctcctgggatcaggcactcttcctacctcagctacacaggcatgcaccaccacgcccagctaatttttgtattttttgtagagataggacctcactatgttgcccaggctggtctcgaattcctgccctcaagcaatcctcccaccttggcctcccaaagtgcggggattacaggtgcgaagcaccgcatctggccccagccctctttctcgcccaccgcctagcaagcagggctgccgtgacttagtatccatgtcaatctcctgagggaaagaggggactggtcagagaaccagggtctgatctttagagaaattatttttactgcaaataattgacattctgggttatgcaccatctcttctgagttgggttggcctcgtgtctgagtggtgctgcatgccaggtgctagaggtgtatccgctgacaaagattcctgtgtccacgcactggcatgatccctcctgatcgtgcctttcgttgacagatcctggaagacggtggccgctagtctgagatgctgctgagcagagaagctgcagacagagcctgtcctccctggccccccgaccctgccaccatctccccatttgtggcagacgcttgcatctgttccttttgaatgaaggtcgcttgctgttgtcagaaagaaggtttatgacagctttctggtaaaagcaactgaaaagacactgaatggatgctgtgaagagcttaggatgatgtacttgtgtttatggcccgttccatttgaagtggtgtcgcactgcaggatggcgcgtaggtcagcgaggggccgcgggtgcgagggtggtcctgtgagaggagcaggccgtgtttttgctgcagctttcccatgtttcattcacacacacaagtacttgtcactgtgctgcagctggccacagtatccagttagtcacacgcagcgcaggtctgtagccaggagccacaggccacagcatacagcctaggggcatagtaggcctaccatctagatttgtgtttgcacgacacaattgcctacggggcttttctttgttttgttgttgttgttgttgttgttgttgttgttgtttttgagatggagtctcgctctgtggcccaggctggagtgcagtggcgcgattttggctcacttcaagctccgtcccccgggttcacaccgttctcctgcctcaggctcctgagtagctgggactacaggcgcccgccaccacgcctggctgattttttgtatttttagtagagatggggtttcaccatgttagccaggatggtcttaatctcccgaccttgtgatccacccacctcggcctcccaaagtgctgggattacaggcgtgagccaccgcgcccggccccttcagggcatttcttagaacgtatgtcagcgttttgtgacatgagtgtaatagcgacatctttttaataaatatgtgtcatgccactttggacatgtgtgattctttggccagcctcagtatgcgagcacgtaggctagcgctcagcacatgagtctatggaacccaggggaagcaattgcagtttcgtagtagtttgtgtcttaattaagggagcccctagaccttactctttcactttacctaggagtttggttcctaaactcaccattcaaatccagcaacagaactgactgaaaggaacctttgtctttcgtgtgaatgctcgtgaggggccatccttagagtggaaatgctcctgaggctccagcgaatcaagaccctcagacccccgggctgt

SEQ ID NO: 37632 - DNA, 2300 bp, Homo sapien
tccttccgcctgaatggtgcctccagggagctcccacctgtgggcccgccctgtgcctctcccgccacgccacctgatccaggctttgcctggtttctgctgttgccctggattcctgtcaggccgttcttcagactctcacccaggctgtttgaaaaatgtaaatataatccaatcacaccccacctgacatctcccaccacacctctgtcctgcaggattagccccaggcccctgccttggttcagcaggcctcccggcaccagcccttccgcccagcctgattctgtttcactgtccctgtcctggctccagcagtaccgcactttcagatcctcagaagagccgatctcttttatccaccagggtcttgcgtgagctggcagatctggtggcctggccggcttctgtaaccctgggagtccaagtcgagtgtcgccctcgaggaggcctttttttgatccttgggttaaatccctttctccatgcgtctctagtgccttccacgtatttttctcacattcctttgcctgtggcaaatggaatatttgggtgaccgcccaaggggttcaccttgcccgctgcctaggcagagccgattcatcaagatgggaattgcagtagagaaagtaattcatgcagagctggccatgcgggaggctggagttttactactactcaaatcagtctgtctgagcattcagggagcagagtttttaaggataacttgggtggggagaagccagtgagccaggagggctgactggtcagagatgaaatgttagggagtcggagctgtcttcttgcactcagtgagttcctggctgggggccacaagatcagatgagccagttcattgatctgtgtggggccgccggatccatcaagtgcagggtctgcaaaataccataagcaaactttctcccaaagttaattcagcctatgcccggggaggaacaaggacggcttggagatgacaagcaagatggagtcagcaaagctagatctcgttcaccgtctcagtcataattttgcaaaggcggtttcgtttgcacctccctgaccccacccccatcgctggatgctgcattaaggcgagaacattcctaattcatacacatggtcaacactgactccaggaaaaccccttgctattacggacagggctaaaagtatcttgtatttctagggttatgaagaaattcacatgaatttagtggctttgggatgccgattgatttttaagacacactggagccactttccctgttgaaagttttgctctgtctttttttttttttaaataattgagacagagtctcactctgtcgcccaggctggagtgcagtggtgcgatctcagctcactgcaacctctgcctcccaggttcaagcaattctcctgcctcagcctcccgagtagctgggactacaggcacccgccaccacgcccagctaatttttgtaattttagtagagacggggggtttcaccatgttggccaggatggtctcgatatcttgacctcatgatccgcccaccttggcctcccaaagtgctgggattacaagcttgagccaccgtgcccggccctttgctctgttcttaaactttactgaggttgccgatttaccctctggtgtggaaagaatggctgtaacttaaattactgagttttcttttactcaccttaggactataaatccatcctacttcagctaaaagtggtttagtgaaatcctactccttttgtcatgtggaagcttgcagctgtgttaacgaattgttcttagtatttccttttgaacattttcctctctcaaggaaaatgtttgagaaggtggctagaggggaataaaacttaccagcaggcccaagtgtgcccgtgacaggaactcttctccgccacttgagttgaacccctggggcagctgctggctccggtggcccgccccaacctgtgcgtctccccaggtgcgtgagcatctgctccctggccttcagcatggacggcatgttcctctccgcctccagcaacactgagaccgtgcacatcttcaaactcgagactgtgaaagaaaagtgagttgcaaatatacgtttctttaaaaatgatgcaaaaccctttgtccccacttgctgccgggatgagaggtaagcacggacccgcccaccctctgacatcgttagccagtgaagaccccggagctggccatggagcgagcacctccgcatccaggctcggcagtgaggaggatgggccccagcagatgagcttctcccacaggcagcacgcagggt

SEQ ID NO: 37633 - DNA, 2300 bp, Homo sapien
agccactgcgcccagccgtcatgaactttaagattaactagttggagcaatggactgggcccccctgcagcagcacccccaacctccgcccagacagcagcagaggaaggagaggggtgtcccgccctaagagtgcgtcagcagcccccgccaccaggtgattccattcacctgggagaaaacggaggctcccaggtgaatggagtcacctcactcaacacttccttattcagctcccaatgcagtctgcccttcaagcaaatatttggctcctgctgtatgccagcccctgtatgcctcactgcgcactgaggatccaaagagaacgaaagcaggtctctactttcagggggctcccagtcctttagaagggatgggcaaggcctggagcaaaggtgctgaccccattggtggcggggcagaagaaaccgtgggggctccctggagcgctgacaacggagatgttgcttaagggggagaaggagctgatctggtggaaagtgaaggaagggcctcaggtaggagcctggtgggggcctgggcaggcgcctgtatccatcccacctggtggctcagacccggagggtctctcctgattcccatagacaggcccccacagagacccaggacaggtgtgattcccacctggttcctgatttcacctcgaggctggacccttctcccagccagtaacactcccagtcccccagggctggctgatgtcctatacctgggtcccctgggctctgctcagtctgtcctagagccaggctacaggtgagtagagggagaatagggcggggtcatgattccattcacctgggagaaaaacggaggctcccaggcaaagggagtcatgggaagcaacctagccagttctgatcccaagctgggaggagaaagggagcgggtcgaggtaggaaccaagtgagggcagggcatgactgagggtcggccacagcccccactcctggctggacttgctctccgccccttctccagcaggtgaactcctacccgtccttcgaaactttcaatctggtcacccagtggcctcgtgactgaacctacccacccactggcggcgttgctggcctcccaggcgagtggatctgttgagggggagcagcctgggcaccaaggctgaggggtgggcagcgggggtggtgggctgggtcagccgcaggtcacccggccctcccggggccaccatgccgcaccctggtgtgttggggatcctgatttcagcctcagcctgggcctggcgcctgcacagcccagctggatggaagggtggggggagggagaaaggaagaaaggagatgggagcagaggggaggagggggaagatgggggagaggggagggaagaggaaggggaaggagagggagggaggagggggagaaaagaggaggatggaggaggagtggggatggtagaagggaggagggagggaagacagagggaggactgagtaggagaatggggaaagcggaggagggagggagagggaggaggggagagacaggaagggaggaagagtgaggaggagaaagggaggagggtggaggggaggggagaagggaggagagcaggaggagggtaatggaggactttggaggaggggaggggtgggaggagggaaggggagggaagagaaagggggaggagtgggagggaggaggagagaaagggaaggggaagagaggaggagtggggagaatggagaggaaggggagaggagagagaagaggtgggaggtggaggaagagggaggggaagaggaggaatggggaggagggagagaggaggtagaaggggagggaggaggagggagagggggaagagaggaggaggaatggggaggaggaagaaggggagggagagggaggagaagagaggaatggagagggagggaaagagaggaggaatggggaggagggggagggaggagaggagggtgaagggaggagggaagagggtgaggaagggggaggggagggggagggaggagagaggagcgagagggaagagggaggaggaggggggaggaggagggaggggcggggccgggcgcggggggcgggcagaggcggggcgtggtggcctgggctgtgctcgtcgccgcgctcgtggaccggggccgggcggactcggggaccggcggaggacgccgggcgcgcccggcccgaggctgggggagcggggcggcgtggcgggcgcgccgaggaccccaggccgggccgggccgaggtaagcggtggccgcgggacgcggggagacgccggcggggacctgtc

SEQ ID NO: 37634 - DNA, 2300 bp, Homo sapien
gccaccttggttgctccccgggacagcagtctctgagccattctcctcccctctgaccccttctccctagatagcagtgaggatgagcaccttgagacacaccaggtgagggctgggcgcagtggctcagtggcttacgcctgtaacccccgcactttgggaggccgaggcaggagttggagttggagaccagcctgggcaatgtagtgagacccccaactctacaaaagaaattttttaaaattagccaggcatggtgtttcgaacctgtggtcccagctacttgggaggctgaatcaggaggatcccttgagcccaggaggtcgtggctgaaatgagtgatggttgcaccaccatactccaacctgggtgacagagtgagaccctgtctgaaaaaaaaaaaaaaagaaaaaaaagacataccaggtgacattgcttatctgcttaaattaatgtcctctggatggatagaaaggacggtccccccaggggatacagtcccggccgcatggcatcaatgtggtgaaactgaggctcagagaggtttaggcccttgcctaaggtcacacagctgggctgaaaacccgggtctttgaacctcacatccagtcctgttcaggcactttcctggctcctttgcagtgaggcatagcttgctttggccaacgagtgtgaccaaagtgacatgtgtcactccaggtagaagctttatgggtcagtgcatgagccatggatccctcagccttcttccctcacctgctctctctgctttctccaaagcagaggctgccatgggctccgtggggagccagcgccttgaggagcccagcgtggcaggcacaccagacccgggcgtagtgatgagcttcaccttcgacagtcaccagctggaggaggcggcggaggcggctcagggccagggccttagggccaggggcgtcccagctttcacggatactagtaagtaggcgtgcgggcaaggtgcgggtcttgccccaaagcaggctgggctgtgtgacccccagtgaagccttgcggtatcggggagccatgggtggtcatggaggactggaggcagtgcctgtcagtgtggattagatctgctgcataacaaacacgcccaccttctcagtgtctccgccctgatgctgcatgtccctgctgggggccctgccgacagccccaggcagaggaggctctgtcttaacatgggcttttgtgctcactgggtgggtgaagggaccatggctcatgcgctgacccgtacagcttctttttttttttttttttttttttttgagacggagtctcactctgtcacccggctggagtgcactggtgcaatctcggctcactgcaagctccgcctcctgggttcacgccattctcctgcctcagcctcccaagtagctgggacggcaggtgcctgccaccgtgcccagctaattttgtgtatttttagtagagacggggtttcaccgtggtctcgatctcctgacctcatgatccgcccgcctcggcctcccaaagtgctaggattacaggcttgagccaccgcgcccgtccgctgacccataaagcttctatctggagtgacacatgtcactttggtcacactcgttggccaaagcaagctatgcctcactgcaaaggagccaggaaagtgcctgaataggactggatgtgaggttcaaagacctgggttttcagcccagctgtgtgacgttaggcaagggcctaaacctctctgagccttagtttcaccacattgaagaattgggccaactgactttgagatcagacttgcagagtggacagcccacaggcttggagtctgacaggctcgggttcaagcctacctcccatcctttacccaccaggagcccctggtcaagtcagtgttgttctgtgaccctcggtgtcttcttctggaaaagggagatgatactgtgtcagtgtggttgcatcagaatccacagaatcttgcttgggcctgtccctggcactcaggaggcaccctgtaagctatagttcttttctggagagctgctgtttatgctagtactttaggctcagaaacctgggctaaggctcggcacggtggctcatgcctataatcccagcactttgggaggctgaggccggaggaacacttgagcccaggagtttgaggccggcctgaacaacctggcaaaatctcgtctgtacaaaaaatacaaaaattagccgggtgtggtggcacacgcctgtaatcccagctacttcagaggctgagacaggagaatcacttgagcccagga

SEQ ID NO: 37635 - DNA, 2300 bp, Homo sapien
tgggttttcagcccagctgtgtgacgttaggcaagggcctaaacctctctgagccttagtttcaccacattgaagaattgggccaactgactttgagatcagacttgcagagtggacagcccacaggcttggagtctgacaggctcgggttcaagcctacctcccatcctttacccaccaggagcccctggtcaagtcagtgttgttctgtgaccctcggtgtcttcttctggaaaagggagatgatactgtgtcagtgtggttgcatcagaatccacagaatcttgcttgggcctgtccctggcactcaggaggcaccctgtaagctatagttcttttctggagagctgctgtttatgctagtactttaggctcagaaacctgggctaaggctcggcacggtggctcatgcctataatcccagcactttgggaggctgaggccggaggaacacttgagcccaggagtttgaggccggcctgaacaacctggcaaaatctcgtctgtacaaaaaatacaaaaattagccgggtgtggtggcacacgcctgtaatcccagctacttcagaggctgagacaggagaatcacttgagcccaggagggggtggtcgtagtgagccaaggtcatgccactgcactccagcctgagcaacggcgagactctgaaaaaaaagaaagaaaaaagcaattggctgactaaagtgggagctagttaagccaggcaggcagtcaggaaggtcatggacagtctggaacccacgggcaggagcttcttggagtctctgagctccaggaagtccccaaggtctcacctgattaggtcagacccacccagggtaatttcccttttgataaagttaatggagaagggactttaatcgcaaaacgccttcacagcagcaccagggctagggttggaactggggactgtacttcagcttgtcaaggtgaccataaacagaccatcacggtcccccccttgccggtgtggctcccatagacagctccctaaaccatgcctcctctccagataaaggcagtgacaaggtcataccgccaccgagcatgatacaagaacccggtacaaccccagacatgctgaccccttccccagaaggacaggcaaagggtgttcactcttctccttccatatcctataattttattttttatttttttgaaaacagtctcgtgctcttgcccaggctggagtgcagtggcccaaccttggctcactgcaacctccacctcctggggtcaaatgattctcctgcctcagcctcctgagtagctggaaatataggcgtgcaccaccatgcccagctaatttttttttttttttttttgagacggagtctcactctgtcgcccaggttggagtgcagtggcgcgatctcggctcactgcaagctccgcttcctgggttcacgccattctcctgcctcagcctcccgagtagctgggactacaggcgcccactaccatgcctggctaattttttgggtttttttgtatttttagtagagatggggtttcaccgtgttagccaggatagtctcgatctcctgacctcgtgatccgcccgtcttggcctcccaaagtgctgggattacagttgtgagccacggcgcctggccattttttgtattttagtagagatggggtttcaccatgttggccaggctggtctcgaactcctgagttcaggtgatctgcccgccttggcctcccagagtgctgggattacagacgtgagctggtttcctgtccatcaagctggcagctgcagtggctgtgagggcgtgggtgtggtggctgtagccacagtatttggtggcttttgataatggccagatgacagaggtatctggaacagaggggagcaggggtcacggtgatggacagtggctatggtgatggcggccggggtggtggacatcgccctgtgcggtgactgtagccatgcgtggagcgtgccccgtctcacctggtgtctctggctttagcattggacgagccagtgcccgatgaccgttatcacgccatctactttgcgatgctgctggctggcgtgggcttcctgctgccatacaacagcttcatcacggacgtggactacctgcatcacaagtacccaggtgggtccctccacggtcacgcccagccactcagcatcctccatcatggcctggggcctcccagaaacccccggcggggagggtcctacacggggacctgttttattcagatctcggctccactgtgagctgctgagtgacctcagggcagccactcaccc

SEQ ID NO: 37636 - DNA, 2300 bp, Homo sapien
tcccgagtagctgggattacaggcatgtgccaccatgcccggctaattttgtgcttttagtagagacgaggtttctccatgttggtcaggctggtcttgaactcccgacctcaggtgatccacctgcctcagcctcccaaagtgctgggattacaggcatgagccaccatgcctggcactggttttttgagatggaatctcgttatgtcaccccagctggagggcagtggcacgatctcagctcactgtaacctttgccgtgggttcaagcgattctcctgcctcagcctcccaagtagctgggattacaggcacgctccaccacacccggctaatttttttgtatttttagtagagatggggtttcaccatattggccaggctggtcttgaactcctgacctcaagtgatccgcctcccttggcctcccaaagtgctgggattacaggcgtgagccaccgtgcccatccaacttaacttttaattttttctcatgtaaatttgttcaatttctttttttttttttttttttttttttgagacaatctctgtcacccccaggccagagtgcagtggtgcgatctcaactcactgcaacctccacccgccgggtccctgtgattttcccacctcagcctcccgagtagctgggattacaggtgtgggccaccacacccggctaatttttgtatttttagtagagacggggtttcaccacattgctcaggctggtctgaaactcctggcctgaagtgatcctcccgcctcggcctcctaaagtgctgggattacaggcacgctctaccacacctggctaatttttttttgtatttttagtagagatggggtttcaccatattggccaggctggtctcgaactcctgacttcaagtgatccgcctgccttggcctcccaaagtgctggcattacaggcgtgagccactgtgcccagccgatgagctcatttagatggctgcatggggtcaccgcccctgcacgcgtggcacccaacttcttccagtcgaatcctgcttcttggtgccctgatatggcagaatgcccccagacaccacccctactccagcccctgaaataaaccactccagacaattttatttttccaattaaatcttttctttttttttatgaaaaaagatcacacagaatttgccaacaaacaaaattccaaaagaaacataaaaaaaaaaaccaataattcccccaaaaaacaaacccaaagtctggcttttccttccctcaagattgtctggttgaggccttggtttcccttgaaggcttggggcctggttaagtgctttctggggcccaagcagggaccctgggcttgggccggctcctgcctctccctcttctctccctaacaaacacttctctatcctggggggtgagtacagtacacttggtggggtgggcggggggtgtgctggggactgggaggccggtgaagccggtgctagacactataatctaacaggaaataaaaaataatattctgcacgtcagaatgtttttttttataatttcatagctatttttcacagttttaaaaagtttatatatatatttatatatatttatctttatatatataattaaaaagttgactccatttaaaggcttatgatacaggggcggggcgagtctcttggtacaataaaactgtacaggttaagaagtgccacctccctcctgggtggggaggggccaggcgtggccgggcgacagtttcagcaccattggggttttctgtagtgtgagggtttggaccagggtgggcctgtgccgggccctctccacctggtgcctttgacagacactccgggctgcaaccccacccggctctgttccccaagtctaggccatcctgagagggtgggggcagggcccctggcacagtcaggtaggccagctggcatcgggctgccctgtcccatgcacggtgggaggccttggggtgggctccatgctaagggtgcttgggaagcccagagtgagcgtcagtttggttccttagaagcgcccctccccaccgaatccccagtctgcatggacctgggggcacccgggcccccacgcagcagcagcctggagggccggcctggccaagtgcttgcaacgtgctgggcaggaagggccggtccggccataccctgatagctaagaggggcccctgtcctgggggcactgaggggttggaaggtggggctggaggcatgtgcacatgcgtgcacacacgtgcatgcacacacactcacccgggcatccacgtgcacacctg

SEQ ID NO: 37637 - DNA, 2300 bp, Homo sapien
gtacatgctcactggtacacacaggtctgcacgggtacacacacaggcagacgaagaagtgcacacgtctcagccccacaggcccacccggtaccagggcctccattccaaggggatgacttgggggtaacgggaggagggagaggtgtcgcagacgcccccggctccagcctcgcctcacgatccaacccctgcagcccctcgctcctgcatcatcgacaaggatgagctgaaggacggcctgcgtgtgctcatccccatggatgacaagctgctgtacgccgggcacgtgcagaccgtgcactcgccagacatgtgagtggggtgggaggtccggcacagagccccgtgtcccatacccgccccgtgtcccggccgcctctgtgcctggctgcttctcctttctgggctgtggtttcccccgatggcacagggcaggggcatgagtgggctcagagctgacggggaggccctgggcactttgagggagtactgggtgaaccctcccaggggctgggcgcggctgctccgcagcgggaaggggtgagagagcgtgctggcctctctcaggatctggactgtgccttgcaacccctagtcctacagatgaggaaaatgaacccagaaaagggggagaattcccaaattcagcaagtcagcaaacctctgagtcctggtgttacctcccagtggtctaggaggcagtgctgtgctggtgggattgaggccctctggggaggtctcggcctctgccacctcacgcctcgtttgctcctacagataccgcgtggtggtggagggtgagcggggcaaccggccccacatctactgtctggagcagttgctgcaggaggcggtgaggggggaggggcggggcctcgggaggctcggggtgggctgggtgtccaaggccatggccataactgtgtccacaccttgcactcatcccatgcccttctagatcatcgatgtgaggccagcctccactcgcttcttgccacaagggaccaggattgcagcctactggagccagcagtaccgctgtctctacccaggcactgtggtccgaggtgagatgcctcctccccagctctcccctgccgcctaacatctcagtatggacttgtttggctactaaaacccaactctaactggcttaagaataaagacttgtgggctcacataactgaaaactgtatggccttcaggcatgattggatccaggcaccatttaaacgatgtcatcaggactccagctctgagtatctgtcagcagtgctgtcatctgtgctggcttcacactagctccttggagattgtattttaccatcttaagaactcttatcattggaggatttctcagtctcggttttcccacacaagttctagtgtgaactgacttgggccacatggttttcattgatcctactgccgtgagtctgatcgaccgggcctgggtcagattctcatccctggggctaaggagtgaggtcacctcccttttattcgtgggctgagaaagatgggagggtggcttcccctgcaaagtggacatgttgttagaataagagagaatgaggctggatgtggtggctcatgcctgtaatcccagcactttgggaggccgaggtgggtggaatcacttgaggtcaggagttcaagaccagcttggccaacgtggtaaaaccccgtctctactaaaaatacaaaaattagccgggcgtggtggcaggtgcctgtaatcccagctacttgggaggctgaggcaggagaatcactcaaacctgggaagtggaggttgcagtgagccaggattgcaccactgcactctagcctgggtgacagagtgagactacgtctcaaaaaaagaaaaaagaatggaggctggatggagaaaaacaacaggtaccctaggaaatgtaggtgtggatatcagacaggcaagaaagacagtcaaatggtccaacccttagcttttgcaaaagcagtgtatcctagagagggggtatggatgtggattagacaaaccccgcccgtgcaaaaaaaaagcccactcacatgccaaatacagtccactgcttggcctaccatccattcatacccagaagatggaagccaatgccagctcagcaaaacaacagatgagtggtccagcctgagtagaggatctcaggccaggaagacttagttttttccatcatattagtcactcatttatcatccaaattctgaaagtgctgttaataaggcagaagttggccttagattcggatttcctagcacatgctgtccccctgtac

SEQ ID NO: 37638 - DNA, 2300 bp, Homo sapien
gaaggagtcggccgccccaaggctgcattggtcacctgccgctatgtgacaaccagccgccgcctgtgtgcgtctcaggggcatgtagggctgctgggtggccatgcagacccccagtggccttgctcctgcggtgatgggctggccaggggtcagctgctccaggtctgtggtcctctctgcgtgtgttgtttatcctgccagacccgtggcttaagaggaaaagttgggcttaagagctctctcgaggcctaggctcagcattgggccccggccacttctgagagccacatggccaagcccaacgtcagggtgtgggaagtcgactctgccagtgacaaggccacaggcaggcacagcagggatacggccgtcccacccatccctctcccagcgagccatctgggtaatgagaatgtcggggacagaccaggtgaaaggtcccactgaggaggaagggcaggcccaagtgtcttggcaggggcagggagagggagggagcagagggttggggcaatgagaggtgaccgccgtcggcaagtttgcccccgggcattcatttccgccagaaagaaaaagtggatggaaagtctcagaggtaggtggggtgtggtcacatgcacctgtaatcccagtgctttggggggccgaggtgggaggatcacttgagaccaggagttcgagatcagttgggcaacatagtggaccctgtctctacaaaaaataattagccaggcatggtggtgtgcacctatagtcccagctactcaggaggctaaggtgggaggatggcttgaacccaggagttccaggctgcagtgagctatgatcttgccactgcactgtaggctggatgacaaagcaagaccttgtctctgacatcatgatgatgatgatgatgatgatgattattgagacggaatctgactctctgtcacccgggctggagtgcagtggcgtgatctcggctcactgcagcctctgcctcccaggttcaagcaattcttttgcctcagcctcccaagtagctgggactacaggcgtgcactgccacacctgggtaatatttgtgtttttagtagagacagggtttcaccatgttagctaggatggtcttgatcttctgaccttgtgatctgcccgcctcagcctcccaaagtgctgggattacaggtgtgagccatcgcgcctggcttgaaaaaattattaaaaaaaagaaagaggccgggcacggtggctcacaccggtaatcccagtacttgggaggctgaggagggtggatcaccggaggtcaggggctcgggatcagcctggccaacatggtggaaccccgtctctactaaaaatacaaaaattagccgggcctggtggcaggcacctgtaattccagctgcttgggaggctgaggcaggagaatcgcttgaacctgggaggcagaggttgcagtgagccgagatcatgccattgcactccagcctgggcaacaagattgaaactccatctcaaaaataaataaataaataaataaataaataaataaataaataaataaagtcctagaagtttggctgtgggcagcagtaagagggggcggacatcatgatggaggatcgtcgctgtgagtgtccggtgatggctggcacccagagcttcatgccaggcccagaggctgctggtcttgaggtgggaagaggcagcaggtgcaggctttcatctctgggttcacacccacctggggtctttgcagacatctggggccaggcaggggagggggctaggaggagaggggctggccacggcaccctgtacatgctcactggtacacacaggtctgcacgggtacacacacaggcagacgaagaagtgcacacgtctcagccccacaggcccacccggtaccagggcctccattccaaggggatgacttgggggtaacgggaggagggagaggtgtcgcagacgcccccggctccagcctcgcctcacgatccaacccctgcagcccctcgctcctgcatcatcgacaaggatgagctgaaggacggcctgcgtgtgctcatccccatggatgacaagctgctgtacgccgggcacgtgcagaccgtgcactcgccagacatgtgagtggggtgggaggtccggcacagagccccgtgtcccatacccgccccgtgtcccggccgcctctgtgcctggctgcttctcctttctgggctgtggtttcccccgatggcacagggcaggggcatgagtgggctcagagctgacggggaggccctgggcactttgagggagtactg

SEQ ID NO: 37639 - DNA, 2300 bp, Homo sapien
cccagaggaggtcagagacctaccgacgtaacacagcctcagagacaggaggcctaaaagctatctccctctgtgtgctgcatgaccctttgctaaagccaaggagagacacaagttcttaaccaagtaatacaattgctctgttgtttaatggtgtaatagtttaatgagcagctctgccattctgtagttctaagaaacaagggcttggtgccatggtaatttcctctctgaactctccaggggtaatgggctgagagccaactccttgattcttcttatttcttcagaacattgaaatcatccacttaaggtgcctttttgtaaatactaatgtaccttgccatccctccccataaagtccagtgcaaaggggtagtttttttttgtttgtttgtttttttgagacagagtcactcagtcacccaggctggagtgccgtggcacgatctcggctcactgcaacatccgcctcccaggttcaagcgattctcctgcctcagcctcccaagtagctgggattacaggtgcccaccactatgtccagctgatttttgtatttttagtagagatggggtttcaccatcttggccaggctggcctcgaactcctgacctcaggtgatctgcctacctcagcctcccaaagtgctggaattccaggtgtgagccactgcacccagctgaggggtattttggttgacttggctgagaggggcaggctcatggagggagacggggtctaagagaagaaagattgccagtgttaacaccagatcgtttttactttcaaattgtggtgagggatgcttttgttttaattgacaccatcccagcttttttcttccttaagaaatgtcacctgattaaagaaaatagagataaaatgttcaaacctggggcattaatggctttgaaactgcgtgtttcgcttcaacaaatgactacagctgacgatagacatgcaggcaggaatttaatctgtgaaatctctaatcgttctttctgcttcaggcatccaaggaacacttgaggcattttttttggcagcttcggcccctttagttggatgaactggtttggagtgtgcactagtactttgtcagctgctgtaggtggctgagataggcatatcagctgcgcttcaatctgggtttttgatcttgattcctttcctcctcccttaatccggctgccttcttcaggccatcggcagcagcacttggtcgaagtacttccttaggaggcaccaagcagtgccacggaaagccagggccagcgatcagtgtaaccacagcaccagctatttaataagtggttaccttgtaccagacgttgtggtcactgcataccttatctgagttcatcttcagaagcaccttgcgatacccagacacaagtacccccattttacagagttacacattgaagctggccagtcgtggtcagcctggaatcccaacagtttgggaggctgaggtgggagaatggcttgagcctaaaagtttgagaccagcctgggcaacatgatgaaaccccagctctacaaaaataaaaataataaaaattagccaggagtggtggcgcacgcctgtattcccagctaccagaaaagctgaggcgggagggtcacagagcccagaggtcgaggctgcagtgacttgcgactcccagctagtcgggagcctgaggcaggagaaatgcttggacctgggaggtggaggttgcagtgagccgagatcgcgccactgaaccccaggctgggcgacagagcgagactccgtctctaaaaaaaaaataaatatatatgcgtgctaagaggagttaaatcacagaggcaggtgaaggattggagcccaggctgggcagagcatgtgcactgaaacccactatactgttttgtcagatcttttaacccatgacccaccttccctctccagctaaagattaagaagaagaagatggccagcgaccaggagcagttggcaagcaagctcgacaaggccctctccctcaccaagcaggacaagttgaagtcgcccttcaagttttcggacagtgctggggggaaatcgaaaactagcgggggctgcggcaggtacttgactccttacgacagcctgctggggaagaacaggaaggcgctggccaagggcctcggcctgtctctgaaatcctccagagaaggtaaacacaaaagggcagccaaaaccaggaagatggaggtggggttcaaggccagaggccagcccaagtcggcccattccccgtttgcctcggaagtgagcagctactcttaca

SEQ ID NO: 37640 - DNA, 2300 bp, Homo sapien
ctctggcccgccctgtacccgccgggccgcagccccctgcaccacgcccagcagctgcagctcttctcacagcagcacttcctgcggcagcaggagttcctgtacctgcagcagcaggcggcccaggccttggaactgcagaggagcgcccagctcgtggtaagtcggggaggatgaggcgcagctccctctgggggcccccatgggtgacgaggcagacgagtcagccagcagaatctccagacagttacagggagggagaaaacagcagaggggcaggtggtcagggagggcttctggaggaggcagcagtggaaccgagacctggagccatctgtagaagagttctccaggcggagggagctgtgagcagaggcagatggagattggcagggcagggtgcaggagcgaggaggaaaccaaggcagagaggtggccttggggactggggaagggtgattggacactgaaggagtccagtgggctcccgctgttgcctgagcccagcctggcctcttctctccaggtggcctctcggagaggcacaaggaggcctggccagctgcctcctgacggcatggtcccataagataggggacacaaagggtctgctctggaggagtcggcccaggtagtgcatacagcaagaagctctcagagcctgagccctgggtctgaatcttagctctgccaggcctggctgtgtgctcgtgggcaagtgcctttacttctctgggcttcaggtttcctctcccagaaacagatgctagcgttgcctagtccttgggttgctaaatgtgactgtttagtaatcgggagagcggcctgtccttggagcgctttgttctggtgtttgtttgtttgtttgtttttgttgtttttttgaggtggagtcttgctctgtcgcccaggctggagtgcagtggtactatctcgggtcactgcaacctccgcctcctgggttcaaacgattctcctgcctcagcctcccgagtagctggaattacaggcacatgctgtcatgcacggctaatttttttctctatttttagtagagatggggtttcgccatgttggccaggctggtcttcctggcctcaggtgatccacccgccttggcctcccaaagtgctgggattccaggcgggagcactgtgcccggcccctagtgtgttttgtgtattgactgaccggcccaggtaggcattggtggtcgccgagctgactccctcccatttcctcataaaagacatgcctggcttcctcctgccctctttggggccttttgagaccctaaaatgatgacgcagtgaagcaggaaggtttagcaggtagtgagtgcgcccaatgccatcgaggtgtggggccttgtgccccccatctggccccccttgtcctgactgtgagggtccgtgcagggccggggtcctggtggaggtcccccatcagccctggttcgaaggggctcaccagagctcctcacccccagcgctgccttttggggttctgcgtggaacgctgtgcttatgacacatgggctgggatggaatgtctgtctctggcctgggacggggtgggcagcctggaccccaggccctgcatgaggttctcctcggactcggggacccttggggggacagggcaggtgcgggcgtcggggagggggaaactcgtgccgtgctgaccctgcctgccggccccttcccagcaggagcggttgaaggcgcaggagcaccgggcggagatggaagagaaggggagcaagcggggcctggaggctgcgggcaaggctggcctggccaccgccggccccgggctgctgccgcggaagccccctggcctggccgccggccccgcgggcacctacggcaaggccgtgagcccgccaccatcaccccgcgcatcccctgtggctgccctgaaggccaaggtcatccagaagctggaggacgtgtccaagccacccgcctacgcctaccccgccacccccagctcccaccccaccagcccgccgcccgcctccccaccgcccaccccgggtatcacccgcaaggaggaggctcccgagaatgtggtcgagaagaaagacttggagttggagaaggaagcccccagccccttccaggccctgttctcaggtaggatgcagctgagaccctcagggtctcactctgcccctggagcggtaaaactgctcatccatcttttcattgacccgttcgatcgttcgttcattccacctccacggagcacctcctgcgtcccaggcctgccgccagacactgagacaaacacaggag

SEQ ID NO: 37641 - DNA, 2300 bp, Homo sapien
acctgagtttgcttttttttttaatagcatcctgttcttgtttcatgcatacattaattcccattactaggatattaattgtatttttttcccctggcgttttcttctttcatgcattgtctttgttttctctgagtcttttttctcttttctctttcaccttggagacttcccgtgggcacctgctgataatcattctcaggtgccccttctttaagaaaaagcagatgggattcagatgtaagggtggggcttgttggccattgaggagcttcttgaatgccctctgtaaaaagatctttccttgttgaccttgtatatctcacaggcaagaattcagcggtttcttgtctgttgacgttgaagccaggctgttcctgtcccaagagctgagtgtgcatgttaaggttgatgattcgcactctgattcctgttttccctttggtccacaccctagtcctgagaatgcataccctcagtggttccatctttccctagtaaacagaggggtcagtgcttctgtggtgaaaccaactctcttgtcctcagcttttccgtgatccctggctttacaggtactagggtctctggattcagtctccagaattgctggtttcctggttgtctgctccaagcctaagtgtttcttttccccactctccactgtgccaggccgcacatctcttgtctctctgctttcttgcttccaaatggtttttttttctttctgttttttgagacggagtctcattctgtcactcaggctggagtgcagtggcgtgatcttggctcactgcaacctacctccacctcctaggttcaagcgattctcctgcctcagcctcccgagtagctgcacgcgctgccacacccggctaatttttatatttttagtagagacagggtttcatcatgttggcccggctggtctcaaactcctgacctcaggtgatctacccgccgtgggctccctaagtgctgggattacaggcgtgagctatgcgcctggccagggggatgtttcctcctttccacttctctcctattttgctttcgttccattttttttttttttttttgagacggaagtcttgttctgtcgccaggctggagtgcagtggcacgatctcagctcgctgcaacctccgcttcccgggttcaagagattcccctgcctcagcctcctgagtagtggggactagaggcgcgcgccaccacgcccagctaatttttgtattttagcagagacggcgtttcaccatgttggccaggatggtctcgatctcctaacctcgtgatccacccctactgcgcccggccacttttgttcctttttgtattactgtcatttttgtgaggttctggtgtttgggaaaggatttgtaaagatcaaatactgtgcagtctcttgtaggctcacactccttctcttgctactttgcctgggagatctggttcttttgtctctgctaagaggcatctgatgtcttctagctttttctggagcagttcctagaaggccctccacccctacctctttttccaccctgggaggtggagtctcggtaggggggaaaccagtcactggggaaatcctttgtgattgcatgagaattgacaaagtctggagccctaggggcaaggctgagatggacgtatttgcatatcattggctggcctgaggccttgacctctccttggccgcctttgggattccctttatttaaattcgaacacttattttgtgggctgggtacctgattggagcaagacaaagtccctgcccatatttgaggatgggagagggactggaattaagccagaattgccggctggtgctgtgatcccaggtggggagtaactgggagcccagcttgatggatctttgggaatctgctcacctggtggggaagtcagggatggctttccgctggagcggaggctggaggtgtaggaggggcaggatggggtgaagaggttggggtgggcctccctcctccctggggccagcccccaggctctcctgccccaggtggggcagggctgaagcgggttgatctgggctggtggctactgcagtcttggtcctggttctggtcccagcatagcttggaggagactgcagcctcggactctcacctgcctcttttctgcgccgatgggagttccagaacggcggcggtggccacaggtctgatagcccagccgcagtgccaaggacgtgcagggtgagccccctgtcccaccaccccagcctcgagctctatcaccggagtgtgggggtgccccagacgtccctg

SEQ ID NO: 37642 - DNA, 2300 bp, Homo sapien
gcggcgcgcgcggccaatgcgcggcggccgggggccgggctgggggggggggcgggcacccgggaacaatgcgtgtttctttgccggagagggctccccctcccccaaccccctccaaccacccccctccgctgcctttttttttttttttttagatcctgcgagaggaacttgaaaggggggttgtgtaatgtaccttttccaatcccgggctgtatatggagatttgggattctttaaaccggcgctacctggattttattaaaaagcggggagctcggcgggaggaaagctggcttttccgggggctgcgggagccgggccgcgggagggcggaggagttggcgcgccgagcgctcggcccggggagcggttttctaccaaaaaaaggaaaggcgggcaaaaagtgtgaggcggctgcgggtggcggaggggagcggcggccgcgggatggcgggcagcaggggcgcctagctgcgccgggagccggggccgccgccggagtcgttgtcgccggagcctggagccgtgaacccagccgcgccaggtacgccgccggtcagcctgccggcccccggccgggcgcgatggtctccaaacttctccagctcgccccccaaccacgcctgcccctcggggtgcgcggggggggatccccgctactgtctggctccggattgcagaatcggggaccagggccggcggggagggggcgccccgggaggggtgggggtgggctgctgggccccgggcacccacgcgagcccccagccccgctccggccctcctggcccggccgaggggcggcggttcctctctcggttcccagcaggcggcgggggagcccgggacgccgagacgttttcgattataggctgtttttaattaaaagccggaattcagccattttaactccatttaagagggggagaaaagtaaggagaacgcagcggagcccgcagatagccgaggcagcttctttgccagtgtgagggtgttccagggggcttcaccccgacttccccaaactggggcgcctgggcatactacgaggcgctggcttttaaagaaagctacccaaagaatctcttacaaaaaaaaatcacgggaagctcatcgcctccttaagacatgtatcctcggatgtggcgatcttagatttttccaaagtaaacgcgaatctggtaaccagagcctgatgggagagagggagggagggggtgtttgtaaccaaaaccgggttaaaataggcacccttagcaaagttggggagggaggctggagaggaaggccggcgggtttggctaggggttttgcagccgagggggtctcctgctcggggggctgggcgcggagtgcagggcgccgggcgggcacccgggagccggtggctttggcgtgatcggcttctcttaagagagcccaggcctcccggaatcaggaatgtgagctgctgcagacagagatcgagggaagggtgggctccaagaccccctcccatcctcacgagaatcggcaaaggacaaatcttttaaacaaacagctttaacctggaactacagggggatttacccaaaggtgggggaggcgccccttggcaggcccgcgttgcaaaggctttctttgtaggttattttggggggtggttgtggggggggaagctagagtaggagcgagacccttgatccctttccttcccctcttgacatcccccaaatcccccacgccaggccaggtcctcgggctgcaggagctcaggccagggcgttggaaaatgaaaccaaagcttgttttgtaggattctttccagtccttaggcgagaatgccacgtctcgggtcctcggactcgagctctgggactcacagtgccccccggggggagaaaggggggggaccacgagcctctttaaaaataataaacccgctttggaccctccctcctcccacccccagaaaaacaccattccgtcggcggttcaaggcgagctcaggaaaaaccaaactcggaaaagggaggcgaggtctccaaaaggttaaatattaaactttgcggatcagatagtgccagagtgttttgggagacacttcggaccgtttgtggcaaggcttcacggttttaaaccccggagcatttgacgcctaggaataaaataggaggtttgtatttacgccgtctgggcgcagccgaggagccctccccggtttcgggaggacccggcagccgccgaggcagagtccgggctggggcgcagcgcgccaccgccgccggtcacttttccgagccaggtcccgggagcct

SEQ ID NO: 37643 - DNA, 2300 bp, Homo sapien
gcgacaggggtgacggccgggctcaaggttggcctgtcctttggttttaaaacaaagacggagaattttgtcagtcgggaggcgtccagggagcggaggccggagccagcggcctaggaacacagggaaggcctcggctccggtggcccaggctggccgcggagaagcacgctgggccgggcctcggctagccagggcagcttctcccgcagctgcggcttagggctacaaggaagacccccccagcccccagccgattttctacccagtcaaacacacacacacacagacacgcgcgcgcgcgcgcgcacacacacacacacacacacacacacgcactttcactcaattgcgtccacagtttttggccacctatcccgctgggtaaacaaaagtatgagggggtggggagggggaggggatggaatgggggtggggcgcggaagatggcggctggacctggtggcctatggcctgtgccctatggccacagcgcccaggcctggtttttacatttcaatgtggcccgccatactggggagggcgtttccctggaccctgaagcctagttagggatgtcctagaggctcccctttacgaatgggggcacccgggctgcagccactactacttcgcttgggatcggtcctccgccccaagatggctcccagtcgctgtttactcagcgactgcagggacaccagggcgcggggccggggagcgggcgaagatcacggagcgtacagattggcccgggcaggtggcctctccgcgtggcccgcccgcgcccccaagcacgcggcagccctggaaaaccgcgtgggcaggatgcgtcctggccgccccgcctggtggccaggaactgggagccaccaccaccaccgcgtccccaggccctgctccccggccggactccggtggctgcagggccgcgcaaatatggagtgggtgccgggggcaggtatggaagggccggtgcaagggggctgggcgcacaaagcccaggcggggaggggacctcctctgccccgaaccgcggccctaatgaaataccggctgggttcgtcacaccgccgaggcgcacacttgaaaaatgcaaacgccattggcaaatccagggcaaacaggcagaatttttattagcaactaaatgatttatggcacacgtaccccgccgtcacaattacggcgtctcggagcatccagggggtgaaaacattaaacatttataaaaataagcctttgttttttctactccgcaaggcttttgttttccccaccccaaatctctcaagatatacgtattttttccttgagctatattaaaataaagaaaaacattccccaaatccagggcggggtaatgcggtggggaattaggatctgggcttggaatattggtgggtaaagagggtggagaggaagcgatggggcctcgggcgtgggagggcttaactaggaacacacaagacctctgcgtaaggctcaagggcgctctgcgcccccacacacggcccccttcccccgcctgggcttccagcagccccgcgcagctcgactgcgtttattcgattcctgcagtcccctcctcccctaaggcacacagacacaatacctcctttctctaacccccctctcctctccgtctttgctcctggccgtcccggggatgcaccgggcgcctcccgccgccccgaatgccgaggccgccactgagacccgcacgcccagctccaaacgcggacaccgtggcttgttcccctcggctccggctatttttgttcctttctttccttctcactcctccctcctccccagcggagctacagcttccaaaagagggcagcctagaaactaacgcaggaagctccaggaagggcaacttgaaactgccctcaagaggctgaacttttttcctcaaatttatcctggaattaaattagacacccccccgttcgttctcgaagcctccccccacttttttctaaaagtggagaaaagaaaatagaacgaatgggcactaactcgctcatttttcccccctcccaaaaagttgccttaaaaattgatttaaaaaaaacagaacgggcaatgcgaaaacgctgagtccgcagcgcggggcgaaagagcgggcttctcttgttttaattaaaatcttatcactgcagttgctcttcgaggcagcattggaaggatttctgcccctccaagcttcctttccagggtacgtaatgcctagccgggctcggggggctgcagagagagggtgcgggggcccccaggacagtcctgctggcgtg

SEQ ID NO: 37644 - DNA, 2300 bp, Homo sapien
cgttaaacgtcgtcatcttccctctgctccacgagggcctgaccgacgtcatccgggacgtccccctggtgcacctggatgagatcaccttatttaagagcagagtggccgaggaaccgccgaacctgtggtggtgagaggcggagccgccgcccatcggtctcagtcacctcgagaagctgcaggagcctgggacgccagggacccttggtttgtcacaagaggaagggggcctctctcccggccagccacgccccacctggctcctggggctcccggcgtctccacggctctctcatggggactgttgctctgtgaagtttaggtcgaggggatgcgttctgggtgacatgagggggctcgggggacggtcgatgtggggggctggctgaaccaggctgacccttggggcctggctggggggtttgtatactgagccgcaatccctgggggccctgtccacgggcctggagggcccgaaccccctgccacttccgaccgggaagcgtgtcccttggctgttgtgtttgtggtcacctgccaccggggccccgtggatgggcggccacatgctgtccccctgaagtccagtcggccgggctggtcaccgtgtatctgagtgtccccttgcatggtcaagtgtgacatggggaagggcctgccagtttagtggctgcagacttgggactctccatcccattaggacacacttgagcccactcatgtctctggggcttttctagccagatgatgcctgtggccccagagaggtcccctgaggttgggactgctggttggagcctctcctgtgacttttcagcccaaccagcagggcccgtttctaacgagagaggcctcctccccctcccacccaccccacggccttcagcttccctgggaaggtccatgcgcgttcctggggaaatcgatacacattcggctttgttagaataacgcgaaacattaaaacccagaaaggattcttaaggctggagtagcaatcacatgaccccatttcaaatgacttcatttaagactttaaaaatactcagctgggcgcgatggctcacgcctgtaatcccggcactttgggaggctgaggtgggtggatcacgaggtcaggagttcaagaccagcctggccaacatggtgaaaccccatctctactaaaaatacaaaaattagctgggcgtggtggcgggcgcctgtaatcctagctactcaggaggctgaggcaggagaatcgtttgaacctgggaggcggaggttgcagtgagccgagatcacaccattgcactccagcctggacaacagggtgagactccgcctcaaaaaaaaaaaaaaaaaaaaaaaaaaaaaaaaatatatatatatatatatatattcaacacactttgggaggatcacttgagcccaggagtttgagatcagcctgggcaacacagggataccccatctctgaaaaagaaagagaaaaaaacaaagttattccaaaaatgaggacatcctcctggcatctgagtcctcaccccatgtgccacggtggccgcttctgccgtcctccacctccaggcgctcctagagctgtccctgggccagtggcttccaaagggggctgtagttgggccctgctagcctggaccgccgccctggccgctcttggtgaagggccccttgtccagcccgccttcctcctcctgggtttccgtgtgacagatgccccgtcctgtggggtggtgtctcacatttgctttgctgttaaaaaatggggtacaccatccccaggcctccaatcaccggccctgcccctgagtggggatggttttcagcagctccttgctctgggggccaagctccttgtccaggaggcctttggagaactggggtcagagctgtggggaggtacagccctcctgtgcaggctgcctcccagctctccacctggcagtcttgaccccaccctggcgcctctgctcactggcacaggtggatctggggtttgaggtctcctcccacttcaccctgactttcttgtatgtatggggtcatcgcctcctctctgaagcccacgggtcctctcccagccccaggctgcacccagtgcagaacctttgcctcctggccagagggacccttctgcaggctgattccagcagtgcccgatggtgggacccacaccagaccaagccttcgcctcccagaggcctcctggccctcctgtcatggcctgtgagagccacacccctaggccccgtctcctagtctgcaggccgcaggaccagctgcccacggccccaggg

SEQ ID NO: 37645 - DNA, 2300 bp, Homo sapien
ggttgtggggaaggcaaaatgaggtcatgtctgtcgagctcaatgcagcgtctggcactcggtgggcaccccgtggcaattgtgcatgagttttcgtgcacagcgtggcgggggctggtcgcctgggggtgggggcattgggggggggtcgcctacctgccatttgtcatgcggtcaaacgtgtgcttttcctgagtggccacctgggtatctgctcctcccagcgactgctgctgcctcactgacttggcagtcgcacccccttgaggtggcccacctgcggctgtggggtgtgggcacctgtcccttctctctgtcctggccgtggggcttccgtgggccaggggcctcggatctgccactcctgcagtggggtccctctgctgccctggggcccagcagcacgtctgcagagcagggttggcctccggggcctctgatcctcgtggctggcatggagcgggtgccccctgagcctggagagaagcgtgtggcctgttcccggctgccgtgctcctccccagctctgtctgccacgtacagggcccttgaggcacttagagggtgactctggcaggcatggtctgtctgggagccccaggtgagcccgggacggggaggcaggtgtgagtgcctcctgggcttccccagcaggctccgccccctccgtggccacccatgtaatccgctgaccgcctgtctctggttcagcttccaggccgagcggcccgcgttaaacgtcgtcatcttccctctgctccacgagggcctgaccgacgtcatccgggacgtccccctggtgcacctggatgagatcaccttatttaagagcagagtggccgaggaaccgccgaacctgtggtggtgagaggcggagccgccgcccatcggtctcagtcacctcgagaagctgcaggagcctgggacgccagggacccttggtttgtcacaagaggaagggggcctctctcccggccagccacgccccacctggctcctggggctcccggcgtctccacggctctctcatggggactgttgctctgtgaagtttaggtcgaggggatgcgttctgggtgacatgagggggctcgggggacggtcgatgtggggggctggctgaaccaggctgacccttggggcctggctggggggtttgtatactgagccgcaatccctgggggccctgtccacgggcctggagggcccgaaccccctgccacttccgaccgggaagcgtgtcccttggctgttgtgtttgtggtcacctgccaccggggccccgtggatgggcggccacatgctgtccccctgaagtccagtcggccgggctggtcaccgtgtatctgagtgtccccttgcatggtcaagtgtgacatggggaagggcctgccagtttagtggctgcagacttgggactctccatcccattaggacacacttgagcccactcatgtctctggggcttttctagccagatgatgcctgtggccccagagaggtcccctgaggttgggactgctggttggagcctctcctgtgacttttcagcccaaccagcagggcccgtttctaacgagagaggcctcctccccctcccacccaccccacggccttcagcttccctgggaaggtccatgcgcgttcctggggaaatcgatacacattcggctttgttagaataacgcgaaacattaaaacccagaaaggattcttaaggctggagtagcaatcacatgaccccatttcaaatgacttcatttaagactttaaaaatactcagctgggcgcgatggctcacgcctgtaatcccggcactttgggaggctgaggtgggtggatcacgaggtcaggagttcaagaccagcctggccaacatggtgaaaccccatctctactaaaaatacaaaaattagctgggcgtggtggcgggcgcctgtaatcctagctactcaggaggctgaggcaggagaatcgtttgaacctgggaggcggaggttgcagtgagccgagatcacaccattgcactccagcctggacaacagggtgagactccgcctcaaaaaaaaaaaaaaaaaaaaaaaaaaaaaaaaatatatatatatatatatatattcaacacactttgggaggatcacttgagcccaggagtttgagatcagcctgggcaacacagggataccccatctctgaaaaagaaagagaaaaaaacaaagttattccaaaaatgaggacatcctcctggcatctgagtcctcaccccatgtgccacggtggccgcttctgccgtcctccacctc

SEQ ID NO: 37646 - DNA, 2300 bp, Homo sapien
tcccttcccctttgtggctggatcacatttccccgtgtggacagttggcatctgattcatccatccacctgttgatggacactggggctgtttgtacctgtggcttcttgtgaatctgttgcagtgaacaggcacagagtagggaggctgagtctcagttttcagttcctttgggtctgtccctaggagtgaagttgctggctcatgtggtagccctatgtttagctttttgaggaaccaccaccaaaccgtttttttttttttttcttttttgagatggagtcttgctctgtcaccaggttggagtgcaatggtgccatcttggctcactgcaacctctgcctcccaggttcaagcgattctcctgcctcctccccagtagcttggcttacaggtgcctgccaccacacccagctaatttttgtatttttagtagagatgaggtttcaccatgttggccaggatggtctcgacctcctgacctcaggtgatctgccttcgttggcctcccaaagtgctgggattccaggcgtgagccaccgggcccggccttttttttctttttgagacagagtctctttctgttgcccaggctggagtgtagtggcaagatcttggctaattgcaacctccacctcccaggttcaagcgattcttctgccttcgcctctggagtagctgggataaaaggcgcacaccaccatgcctgactagtttttgtattttcagttgagatcgggcttcaccatgttggccaggctggtctcgaactcctgacctcaggtgatccatctgccttggcttccccaagtgctgggatgacaggcatgagccaccgtgcccacctgccaaaccgttttctaccgtggctgcacccctctaccagtcccacttagctggggactcttggctccaggtcagagtgcgggcaggtaggcagcgagaggtggggagcttccctcccggtggagcagctgctgcaagggggagtgtgcgcactgagggttggagacccgtaggtgccttcagccctttccttcctctccccaccctgcctctgtcccgcaggcgagcgaggacaaagtgaggcagctggtgaaggagatcggccgggagatccagcagctgagcatggctggctgctactggctgcctggctccaccgtggaacacgtggcccgctgccgcagcctggtgaaggtgaacctctcgggctgccacctcacttccctgcgcctctccaagatgctctcggccctgcagcacctgcgctcgctggccatcgacgtgagccccggcttcgacgccagccagctgagcagcgagtgcaaggccaccctgagccgcgtgcgggagctcaagcagacgctgttcactccctcctacggcgtggtgccctgctgcaccagcctagagaagctgctgctctacttcgagattctggaccgcacgcgcgagggcgccatcctctcgggccagcttatggtgggccagagcaacgtgccgcactaccagaacctgcgggtcttctatgcgcgcctggcccccggctacatcaaccaggaggtggtgcggctctacctggctgtgcttagcgaccgcactcctcagaacctccacgccttcctcatctccgtccctggcagcttcgcggagagcggcgccaccaagaacctcctggactccatggcgcgcaatgtcgtgctggatgccctgcagctgcccaagtcctggctgaacggctcttccctcctgcagcacatgaaattcaacaacccgttctacttcagtttcagccgctgtaccctgtcaggcggccatctgatccagcaggtcatcaacggcgggaaggacctgcggagcctggccagcttgaacctcagcggctgcgtccactgcctgtccccagactcgctgctccgcaaggcggaggacgacatcgacagcagcatcctggagactctggtggcgtcctgctgcaacctgcgccacctgaacctctcggccgcccaccaccacagctcggagggcctgggccgccacctctgccagctcctggcccggctgcgtcacctgcgctccctctccctgcctgtctgctctgtcgctgactccgcgccgcgcgccgaccgcgcgcccgcccagccggccatgcacgcagtgccgcgcggctttggcaagaaagtgcgtgtgggcgtgcagtcctgtcccagccccttctcgggccaggcgtgcccccagccctcctccgtgttctggtctctgctgaagaacctgcccttcctggaacacctcgagct

SEQ ID NO: 37647 - DNA, 2300 bp, Homo sapien
cgcctctagccagtgcctctcggtgtacatccagagcatttttttttttttttgaaacgaggtctcactctgttgcccaggctagagtgcagtggtactatctcagctcactgcaacctccacctcctgggttcaagcgtttttcctgccccagccttctgagtagctgggattacaggcgcctgccaccacatctggctaatttttgtatttctagtagagacgaggtttcaccatgttgatcaggctggtctcaaactcctgacctcgtgatccgcccatttcagcctcccaaagtgctgggattacaggcatgagccactgtgcctggcctggagcatttttttaatttaattttttggccgggtctggtggctcatgcctataatgccagcattttgggaggctgaggcaggtggatcacatgaactcaggatttcaagacccgcctggacaacttggtgaaactccatctgtacaaaaaaaaaaaagagaaaaatgagcatggcatggtggcacatgtctgtagttccagctactcaggaggctgaggtgggaggatctcttgaaccccgggacatcaaggctgcagtaagctattgttgtaccactgtgctccagcctggacaacagaatgagaccttgtctcaaaaaacagaaacaggctgggcgtggtggctcgatgatagctcactgcaacgtccacctcccaggctcaagccatcctcctgcctcagcctcccaagtagatgggaccacaggtgtgcgccactacgcctggctaatatattttttctttttggtagatatggggtctcgctatgtttcccaagctggtctccatcccttgagattaactgatctgtctgccttggccttccaaagtgcgggattacaggcatgcgctgaagcgcccggcctcccttcccctttgtggctggatcacatttccccgtgtggacagttggcatctgattcatccatccacctgttgatggacactggggctgtttgtacctgtggcttcttgtgaatctgttgcagtgaacaggcacagagtagggaggctgagtctcagttttcagttcctttgggtctgtccctaggagtgaagttgctggctcatgtggtagccctatgtttagctttttgaggaaccaccaccaaaccgtttttttttttttttcttttttgagatggagtcttgctctgtcaccaggttggagtgcaatggtgccatcttggctcactgcaacctctgcctcccaggttcaagcgattctcctgcctcctccccagtagcttggcttacaggtgcctgccaccacacccagctaatttttgtatttttagtagagatgaggtttcaccatgttggccaggatggtctcgacctcctgacctcaggtgatctgccttcgttggcctcccaaagtgctgggattccaggcgtgagccaccgggcccggccttttttttctttttgagacagagtctctttctgttgcccaggctggagtgtagtggcaagatcttggctaattgcaacctccacctcccaggttcaagcgattcttctgccttcgcctctggagtagctgggataaaaggcgcacaccaccatgcctgactagtttttgtattttcagttgagatcgggcttcaccatgttggccaggctggtctcgaactcctgacctcaggtgatccatctgccttggcttccccaagtgctgggatgacaggcatgagccaccgtgcccacctgccaaaccgttttctaccgtggctgcacccctctaccagtcccacttagctggggactcttggctccaggtcagagtgcgggcaggtaggcagcgagaggtggggagcttccctcccggtggagcagctgctgcaagggggagtgtgcgcactgagggttggagacccgtaggtgccttcagccctttccttcctctccccaccctgcctctgtcccgcaggcgagcgaggacaaagtgaggcagctggtgaaggagatcggccgggagatccagcagctgagcatggctggctgctactggctgcctggctccaccgtggaacacgtggcccgctgccgcagcctggtgaaggtgaacctctcgggctgccacctcacttccctgcgcctctccaagatgctctcggccctgcagcacctgcgctcgctggccatcgacgtgagccccggcttcgacgccagccagctgagcagcgagtgcaaggccaccctgagccgcgtgcgggagctcaagcagacgctgttcactccc

SEQ ID NO: 37648 - DNA, 2300 bp, Homo sapien
cgagactccatctcaaaaaaaaaaaaaaggatctgaaatcttattacctgccaaaaaacatctcctacctagaaccctaacctgggctgggcgcaggggctcacacctgtaatcccagcaatttgggaggccagcctgagcaacacagtcacacctcatctctaaaaaaattttaaaaagagaaataaaaataaagaatgggccgggcacagtggctcacgcctgtaatctcagcactttgggaggccgaagagggtggatcacgaggtcaggagattgagaccatcctggctaacacggtgaaaccccgtctctagtaaaaaaaaaaaaaaaaccaaaaaattagctgggcgtggtggcgggcgcccgtagtcccagctactcgggaggctgaggcagaagaatggcatgaacccgggaggcggagcttgcaatgagccgagatcacgccactgcactccaccctgggcaacagagcgagactccgtctcaaaaaaaaaaaagaaaaagaaaaagaggcactgaaccatgtgaagtgttatttaaaaaaaaaaaaaaaaaaaaaaaaaagcagagtccagctgggtgctgtggctcacgcctgtaatcccaacactttgggaagccaaggcgggtggatcacctgaggtcaggagttcgagaacagcctggccaacatggcgaaaccctgtctctactgaaaatacaaaaattagccaggtgtggtgatgcacacgtgtaaccccagctacttggaaggctgagaaggggaatcgcttgagcaggggaggcggaggttgcagatcacaccgctgcactacagcctgggcgacagagcgagactctgtctcaaaaacaaagaacaaacaaacaaggaacagagggggctttaagctgtaattctgtaagaccaaggtaccaggaccccccttcttccctgaccccaagcacacacagctaactggaatcttcatttcaatcttatcaatctgcagttgagccacacaccgttccttgtcaatcaagaagccactggggtcatttctaggccgcattcacttcaaatgtagaagggcggtgagcacagcgacccccagccatctccagagaccctgccccatcactctgaggaagacacttgagcctctcactcttgctccctagaacccaggcaagctcctaaatctgcgaagtgcacccaacgatctgagacctgaaaggtgacagataccaacccaggtgcccatacagataggcaggaagcatcaacgggaagccactagtcagagtctagagtccccgctgcacccctttctgcagagacaatactttgcaccacattacagggacgcggcgggcttctccatcggacccagatttggggagtgttgggaaagaattccagggtacgtcgtaagtccctcaggtgaaatggcttttcctccatcacccaccccccacgtcattcagcaagcaggctccagggagaagtgggctggggctgaaactgagcatccagagatagaagatggagtgggacgtgggcacggagggggaatgtcccagggctgcaggggcccagccaaggaaccggggcactgagaaaggggtctcggaggagcctggaccctcaggggacggagagacggggacaactctggcgatcaggaatgcacgagcgaagggggagacagcttgtgccttccgagacagggtaggagtcttggggacaggatgcgggaaggacgggagcaggggcaaggccagggtcaggatgggaaggacggggcggggtaggggtcgggatagaaaggatgcaagggaacccgggtcgggatggaagaacccagggagaccgaggccgccgaggcagaagcagagcggagacagtcgcggacagtacctctccggagctggccatgtcgccggcgggtccgaaccgcggccgcgggatccgcaaccccgtgcctcccacctgcccggctagggatgctcgaagccggcgcgtccaccgctcaaccgagaccccggcaaggagcgggctctcgtcacttccggcgcccgcctacacgcacttccgttcgtccgcaggcgggccctaggcggccgccatgttgaatgtggctccgcccggggagctgctggagtacgagggagccaagaagggctccaaggacctctgcctcttctctgagctcgttcttaggcccctctgccgtctgcacgctcctttccagccacccggcctcccgatgccggcctagcacgttcctcgcgccaggcttttgcatctgcccttc

SEQ ID NO: 37649 - DNA, 2300 bp, Homo sapien
aggctgaggcaggagaatggcgtgaatccgggaggtggagcttgcagtgagctgagatcacgccactgtactccagcctgggcgacagagcgagactccatctcaacaaaaaaatatgtatatatgtatatttatatatgtgtatatatatataaaattaaaaggaaaaagcaagggaggatcctctagagcctttgaagggagcatgatccactatcatctttatttacgatttctggcctctggaactgtgagagaagacatttctgctgtttacgctaccccgtttgtgaaactttgttaggccagccctagaaaatgaatacacttgcttagggtcacccagaattagttccagtattcaaacccagttcttttttctttctttcttcttctttttttttttcatgattttaagattttatttttttgaaatggagtctcgctctgttgcccaggttggaggtaccatcttggctcactgcaacctccatctcctgggttcaagcaattctgctgcctgagcctcccaagtagctgggattacaggtgcacaccaccacgcctggctaatttttgtatttatttttttagtagagacggggtcaggctagtctcgaactcctgacctcaggtgattcacctgcctcggcctcccaaagtgctgggattacaggcatgagccactgcgcctggccttttttttttttctttcttcgtcttatttttttgtagaaagaagtcttgctgtgttgcccaggctggtctcaaactcctgggctcaagcgatcctcctgcctcagcctcccaaagtgctgggattacaggcgtgagccactgtgcttggcctcaaacccagttcttttgattccagagaatgaactttccccagggatttttattagtaaaatatttttatgtatttatttgttgaggagacaagagtcttgctctgtcatccaggctggagtggagtggcgcaatctcagctcactgcagcctggaactcctgggctcaagcgatcctccccctcagtctccaggaaatgtttattttttgtagagggcctgggggttcttgctgtgttgcccaggctggtctggaacgactggcctcaagggatcctcccgcttgggcctcctgaaatgctggaattacaggcgtgagccatcctgtcggctctaagtatgtatgtatgtatgtatgtatgtatgtatgtatgtatgtatttattttgagacggagtctcactctgttgctccatctggagtgcagtggccagatctcagctactgcaacctccgtctcccgggttcaagcacttctcctgcctcagcctcccgaatagctgggactacaggcgtgcgccaccacgcccagcaatttttgtatttttagtagagacggggttttaccatgttggccgggctagtctcaaactcctgacctcaggcgatccgcccgcctcggcctcccaaagtgctggggttactggcatgagccaccaagcccggccgggtctaattattttaaaacgcaaacgcttaagtatgagggtgcatacattcatgtttacttagcaaatatgtattcagtcagtgtctatcacattccagggatagtttcaggtattgggaaatcctgtccctgcttacagtttattagaggaggataaaaaaaaaaagataccgtcggtcagatggtgcaaaaatctatagagacacaggatgagaggcaagtttcggggcgtgtgtgaaggtagagaggaggcgacgctattccatgaggggtgcggtgcgcaggacctgtggcgtttgcacacgaaagacagtgggaagggcagatgcaaaagcctggcgcgaggaacgtgctaggccggcatcgggaggccgggtggctggaaaggagcgtgcagacggcagaggggcctaagaacgagctcagagaagaggcagaggtccttggagcccttcttggctccctcgtactccagcagctccccgggcggagccacattcaacatggcggccgcctagggcccgcctgcggacgaacggaagtgcgtgtaggcgggcgccggaagtgacgagagcccgctccttgccggggtctcggttgagcggtggacgcgccggcttcgagcatccctagccgggcaggtgggaggcacggggttgcggatcccgcggccgcggttcggacccgccggcgacatggccagctccggagaggtactgtccgcgactgtctccgctctgcttctgcctcggcggcctcggtctccctgggttcttccatc

SEQ ID NO: 37650 - DNA, 2300 bp, Homo sapien
tgtgctactcagtggacagacccaaggcaagaaagggtgacaaggacagggtcttcccaggctggctttgagttcctagcaccgccccgcccccaatcctctgtggcacatggagtcttggtccccagagtcccccagcggcctccagatggtctgggagggcagttcagctgtggctgcgcatagcagacatacaacggacggtgggcccagacccaggctgtgtagacccagcccccccgccccgcagtgcctaggtcacccactaacgccccaggccttgtcttggctgggcgtgactgttaccctcaaaagcaggcagctccagggtaaaaggtgccctgccctgtagagcccaccttccttcccagggctgcggctgggtaggtttgtagccttcatcacgggccacctccagccactggaccgctggcccctgccctgtcctggggagtgtggtcctgcgacttctaagtggccgcaagccacctgactcccccaacaccacactctacctctcaagcccaggtctctccctagtgacccacccagcacatttagctagctgagccccacagccagaggtcctcaggccctgctttcagggcagttgctctgaagtcggcaagggggagtgactgcctggccactccatgccctccaagagctccttctgcaggagcgtacagaacccagggccctggcacccgtgcagaccctggcccaccccacctgggcgctcagtgcccaagagatgtccacacctaggatgtcccgcggtgggtggggggcccgagagacgggcaggccgggggcaggcctggccatgcggggccgaaccgggcactgcccagcgtggggcgcgggggccacggcgcgcgcccccagcccccgggcccagcaccccaaggcggccaacgccaaaactctccctcctcctcttcctcaatctcgctctcgctctttttttttttcgcaaaaggaggggagagggggtaaaaaaatgctgcactgtgcggcgaagccggtgagtgagcggcgcggggccaatcagcgtgcgccgttccgaaagttgccttttatggctcgagcggccgcggcggcgccctataaaacccagcggcgcgacgcgccaccaccgccgagaccgcgtccgccccgcgagcacagagcctcgcctttgccgatccgccgcccgtccacacccgccgccaggtaagcccggccagccgaccggggcaggcggctcacggcccggccgcaggcggccgcggccccttcgcccgtgcagagccgccgtctgggccgcagcggggggcgcatggggggggaaccggaccgccgtggggggcgcgggagaagcccctgggcctccggagatgggggacaccccacgccagttcggaggcgcgaggccgcgctcgggaggcgcgctccgggggtgccgctctcggggcgggggcaaccggcggggtctttgtctgagccgggctcttgccaatggggatcgcagggtgggcgcggcggagcccccgccaggcccggtgggggctggggcgccattgcgcgtgcgcgctggtcctttgggcgctaactgcgtgcgcgctgggaattggcgctaattgcgcgtgcgcgctgggactcaaggcgctaactgcgcgtgcgttctggggcccggggtgccgcggcctgggctggggcgaaggcgggctcggccggaaggggtggggtcgccgcggctcccgggcgcttgcgcgcacttcctgcccgagccgctggccgcccgagggtgtggccgctgcgtgcgcgcgcgccgacccggcgctgtttgaaccgggcggaggcggggctggcgcccggttgggagggggttggggcctggcttcctgccgcgcgccgcggggacgcctccgaccagtgtttgccttttatggtaataacgcggccggcccggcttcctttgtccccaatctgggcgcgcgccggcgccccctggcggcctaaggactcggcgcgccggaagtggccagggcgggggcgacctcggctcacagcgcgcccggctattctcgcagctcaccatggatgatgatatcgccgcgctcgtcgtcgacaacggctccggcatgtgcaaggccggcttcgcgggcgacgatgccccccgggccgtcttcccctccatcgtggggcgccccaggcaccaggtaggggagctggctgggtggggcagccccgggagcgggcgggaggcaagggcgctttctctgcacaggagcctcccggtttccggggtgggggct

SEQ ID NO: 37651 - DNA, 2300 bp, Homo sapien
gcagacagagggaaccacaagccaggaggacaggccaggaatgctgcagcccggggcggggtggggctggagctcctgtctcttggccagctgaatggaggcccagtggcaacacaggtcctgcctggggatcaggtctgctctgcaccccaccttgctgcctggagccgcccacctgacaacctctcatccctgctctgcagatccggtcccatccccactgcccaccccacccccccagcactccacccagttcaacgttccacgaacccccagaaccagccctcatcaacaggcagcaagaagggccccccgcccatcgccccacaacgccagccgggtgaacgttggcaggtcctgaggcagctggcaagacgcctgcagctgaaagatacaaggccagggacaggacagtcccatccccaggaggcagggagtatacaggctggggaagtttgcccttgcgtggggtggtgatggaggaggctcagcaagtcttctggactgtgaacctgtgtctgccactgtgtgctgggtggtggtcatctttcccaccaggctgtggcctctgcaaccttcaagggaggagcaggtcccattggctgagcacagccttgtaccgtgaactggaacaagcagcctccttcctggccacaggttccatgtccttatatggactcatctttgcctattgcgacacacactcagtgaacacctactacgcgctgcaaagagccccgcaggcctgaggtgcccccacctcaccactcttcctatttttgtgtaaaaatccagcttcttgtcaccacctccaaggagggggaggaggaggaaggcaggttcctctaggctgagccgaatgcccctctgtggtcccacgccactgatcgctgcatgcccaccacctgggtacacacagtctgtgattcccggagcagaacggaccctgcccacccggtcttgtgtgctactcagtggacagacccaaggcaagaaagggtgacaaggacagggtcttcccaggctggctttgagttcctagcaccgccccgcccccaatcctctgtggcacatggagtcttggtccccagagtcccccagcggcctccagatggtctgggagggcagttcagctgtggctgcgcatagcagacatacaacggacggtgggcccagacccaggctgtgtagacccagcccccccgccccgcagtgcctaggtcacccactaacgccccaggccttgtcttggctgggcgtgactgttaccctcaaaagcaggcagctccagggtaaaaggtgccctgccctgtagagcccaccttccttcccagggctgcggctgggtaggtttgtagccttcatcacgggccacctccagccactggaccgctggcccctgccctgtcctggggagtgtggtcctgcgacttctaagtggccgcaagccacctgactcccccaacaccacactctacctctcaagcccaggtctctccctagtgacccacccagcacatttagctagctgagccccacagccagaggtcctcaggccctgctttcagggcagttgctctgaagtcggcaagggggagtgactgcctggccactccatgccctccaagagctccttctgcaggagcgtacagaacccagggccctggcacccgtgcagaccctggcccaccccacctgggcgctcagtgcccaagagatgtccacacctaggatgtcccgcggtgggtggggggcccgagagacgggcaggccgggggcaggcctggccatgcggggccgaaccgggcactgcccagcgtggggcgcgggggccacggcgcgcgcccccagcccccgggcccagcaccccaaggcggccaacgccaaaactctccctcctcctcttcctcaatctcgctctcgctctttttttttttcgcaaaaggaggggagagggggtaaaaaaatgctgcactgtgcggcgaagccggtgagtgagcggcgcggggccaatcagcgtgcgccgttccgaaagttgccttttatggctcgagcggccgcggcggcgccctataaaacccagcggcgcgacgcgccaccaccgccgagaccgcgtccgccccgcgagcacagagcctcgcctttgccgatccgccgcccgtccacacccgccgccaggtaagcccggccagccgaccggggcaggcggctcacggcccggccgcaggcggccgcggccccttcgcccgtgcagagccgccgtctgggccgcagcggggggcgcatggggggggaaccgg

SEQ ID NO: 37652 - DNA, 2300 bp, Homo sapien
tcaagcgattctcctgccccagcctcccgagtagctgggactataggtgtgcaccaccatactcggttaatttttgtacttttagtagaggtggggtttcattatgttggccaggctggtcttaaactcttgacctcgtgatctgcctgcctcagcctcccaaagtgctgggattacaggcatgagccactacacccagcaccccctaatacctcattctgaaggaaacctgttgcttttcctcctgatgccattaaacttgttgttctcttgctctctctctcatttaagatctgtcttaggaattgtgcttgctttcttcagggtgcttttctcatttctcaaaacagtgccagttaactctggaagcatgtccggctggtcagtgacggtgtgctgcatgcaggagcagtgtgatccaggagctgctccaggcaaaaggcccttcagctcctggctgtgcccttactgggtgatcctggctgggtcactgcccctttctgagcaggaaaccttctgctgttagagtagaagagggaggaagtcatggcaggcttcctggagaaggcagcctgaagctggcccttaaggctgagaaggtggccaggaggcagagagaccccactctgttttattttaaaaaataaaataggctgggcacggtggctcatgcctgtaatcccagcactttgggaggctgaggcgggcggatcacaaggtcaggagatggagacggagaccatcctggccaacatggtgaaaccccgtctctactaaaatacaaacaaaattagctgggcgtggtggcacgcgcctgtagtcccagctactcagtaggctgaggcaggggaatcgcttgaactcgggaggtggaggttgcagtgagctgagatggcaccattgcactccagcctggtgacagagggcgagacgccatctcaaaataaataaataaataaataaataaataaataaataaataaataaaggccgggtgtggtggcttacacctgtaatcccaccactttgggaggccaaggcagacggatcacctgaggtcgggagtttgagaccagcctggccaacatggtgaaaccccatctctactaaaaatacaaaattacctgggtggggtggtgggtgcctgtaatcccagctactcaggaggctgaggcaggagaatcgcttgaacccgggaggcagaggttgcagtgagccaagatggcgccattgcactccagcctgggcgacagagcaagactctgtctcaaaaaaggaaaaaataggccacgcacggtggctcacgcctgtaatcccagcactttgggaggccgaggcggtcggatcacaaggtcaggagatcgagaccatcctggctaacacagtgaaaccccgtctctactgaaaatacaaaaaattagccgggcgtggtggcgggcgcctgtagtcccagctactggggaggctgaggcaggagaatggcgcgaacccaggggggtggagcttgcagtgagcggagatcgtgccactgcactccagcctgggtgacagagcaagactccagctcaaaaaaaaaaaaaaaaggaaaataaataaataaataaataaactatccaggcatggtggctcacacctgtaatctcagcactttgggaggctaaggtgggcagatcagctgaagttaggagtttgagaccagcctggccaacatggtgaaactccatctctactaaaaatacaaaaaaaaaaaaaactagctgggcgtggtggtgcgagccagtagtcccagctactcaggaggctgaggcaggagaatcgcttgaaccctgaacccgggaggcagaggttgcagtgagctgagattgtgccactgcagtccagcctgggcgacagagcaagactccatctcaaaacaacaacaactaaaaacgaacaacaacaacaacaaaaaactgaggccaggtgcagtggctcacacctctaatcccagcaatttgggaggctgaggtgagaggatcacttcagctcagcagttcgagaccagcccaggcaacacagggagacagaccctgttatattgcagagagaccccatctccacaaaatataaaaatattagtcagatgtggtggcatccctgccgtcccagctactcaggaggctgagacaggaggatcgcttgagcccaggaggtcaaggctgcagtgagctgtgatcatgccactgcactccagcctgggccacagagctagaccctgtctctaaaatttttagagaccttatctctaaaaataaattaaa

SEQ ID NO: 37653 - DNA, 2300 bp, Homo sapien
gaggcaggagaatcgcttgaaccctggaggtgaaggttgcaatgagccgagattgcaccactgcactccgacctgggcgacagagaaagactccgtctgaaaaacaaacaaacaaaaccccgagattctcttttcccccgtccggagctctatggccatctggagctcgttctgtccacaaggacacatttcctggcagcagctgtggaccagggctcactcactcacatctgtacccaatctagagcaggacaaacacctatcacctgcactggcaatggacagaggacagtggcagccccatcaccagaggcattcaagccaaggcattttctatcgtctatttatctatctatctatctatctatctatctatctatctatctatctagatgagatcttgctatgttgcccaggttgaactcctggcctcaagcgatcctcctgcttcagcctcccaaagtgttgggatttcaggtgtgaaccactgtacctggctggagtgcagtggcactgtcatagctcactgcagcctccacctcctgggctcaaggaatcctctttcctcagcctcctgagtagctgggaccacaggcatgcaccatcacacccagctaaaccttgattttttccatagtatatggctcagggcagagcaaagaagcacaaaaacatgttggcttgcggttgagggctgatgggagggggttctggccaaagcccaaaattaacagccacaacgtcagtgtctgtgggaggggttgccaggggcgtgcgggttctggggctcaaggccctgccggtaaacccatttgaagcaggatggcaagaaggtgacaccatcttcccccgcgcactgaaagcccctggctgggattgcctggggcagacacaggctcggaccagccccagcaatcccagtttatcagcgagccggctgagggcccggagttatctcagtgcccggcctgagaccttgtgggcagcctgtggtcatgctggcattccaggggccttttggcatgtggggaatgtccaggaaaagcctcagccttcggtgaggcgcagaaaagggaagtgtccctagagggggtgggtgagggcgtgggaggtggtgtctgcagggaatgtcccctttgggggaggaggatggagggttgggattctgaggatgggggggggggctgtagccagcaccatgtccctcctgtgtgaccagctcagagtcccatgaaattggggcttgggaggggaagggacactggcctgggaaccagagacctgggctggtctggctcacagttgctggacctctgtgatccgtgtcaaaaaacgagaacaccaattcctgtcctgcccactcaccaccaggtgggacctgaaccctggcatcgccagcattgggaatgtcggccactgactcaaccactctcccggagacctatttgggccacccgaggcgggtgcctgggccacacggaggggtcctggtggtcttcagggcagcggctgtggggctgaagcctcaaggaaccacatctctgcataggagggccaggctgcagggcctcggagacaacctagttgggcgtgttggggtctgtgggtcccaggtcctggcctcaccgggtccccaccgcgctgtcagctcccagcctctttccctcgtctgcctctgggcttctgtaaggctatgtgctccaaggccacctcctccaggcagccctcagacccccaccttcgcccagtaccgatctgcaccgtggtctctgaagtctccatcgtgacctcaaacctcgctcgtccttgctcctagcgaggcttggggtcggggtgtccgaggtgggggacatccgggggggttaggtggctggcgcggggagccggggttgtgaggggtgatgtcctcaggcggcggcgctgcggggtgcggcgaggacaccggtggggtgagagcaccggcggggcagcagcgggggccgcagcgccgggtccctcggcccggggcccctcccgcgcggagccaggggcgggacaggggggcgtggcctggtggcgctgacgtcacctcgcctataaaatgtccggggcgccgctagctgggctttgtggagcgctgcggagggtgcgtgcgggccgcggcagccgaacaaaggagcaggggcgccgccgcagggacccgccacccacctcccggggccgcgcagcggcctctcgtctactgccaccatgaccgccaacggcacagccgaggcggtgcagatccagttcggcctcatcaactgcggcaacaagtacct

SEQ ID NO: 37654 - DNA, 2300 bp, Homo sapien
gcctcccgagtagcagggactacaggcgcccgccaccgtgcccggctaattttttttttttgtattattaatagagacgggtttcaccgtgttaggatgatctcgatctcctgacctcgtgatccgcctgcctcggcctcccaaagtgctgggattacaggcatgagccaccttgcctggtccttttttttgtatttttagtagagatgaggtttcaccatgttggccaggctggtctcaaactcctgacctcatgatccgcccgcctcggcctcccaaagtgctgggattacaggtgtgggccactgtgcccggccagtcccattctactttttagggacatggaatcatgtaaagatgccatacagaaaacagtatgcaaatccagagacagaggacatctgtgcatgtttctttctttcttcctttttttttttttttttttttttgagatggattcttgctctgtcgcccaggctggagtgcagtggtgcaatctcagctcactgcaacctctgcctcccaggttcaagtgattctcctgcctcagacttccaagtagctgggattacaggcatgccccaccatgcccagctaatttttgtatttttagtagaggcggggtttcaccatgttggcaaggctggtcttgaactcatgacctcaggtgatccacccgcctcagcttcccaaagtgctgggattacaggcgtgagccgccgtggcaacccgcatgcttcttatgtataagaaaaaaacagctagaaagttgtgggttcactggctgggcacatggtggcttgtgtctgtaacctcagcactttgggaggctgagttaggaggatcatgtgaggccgggagttcaagaccatcctaggcaacatagccagaccctgtctgtaccaaatagaaaaaaaaattaacttgatgtggtggtgtgtgcctgtagtctcagctatttgggaggctgaggtgggaggatcacttgagcccaggaagtcgaggctacagtgagctatgattgtgccactgcactccaacctgggcaacagagcaagaccctgaatcaaaaagaaagagatgtatttgccaacacaggggtgttctgcagtggggtgggaaggggacgtgtaggacttcatagtttccttttttttgttttagagacagggcttaaaaaaaaattttttttttttttttgaggcggaatttcattcttgttgcccaggctggagtgatctcggctcactgccatctccgcctcccaggttgaagtgattctcctgcctcagcctcaggcaattttgtatttttagtagagacggggtgactccatgttggtcaggctggtctcaaactcccgacctcgggtgatctgcctgccttggcctcccaaactgctgggattacaggtgtgagccactgtgcctggccccttttttttttttttaagtagggtcttgctaagttgtccaggctggtcttgaactcctggtctcaaatgatcctcctgacttggcctcccaaaaggctgggattgcaggagatatgagccaccgcacccggcccttttataagttttctaaaggaaaggaacatgtaccatcgtgttttattttaatttttacatagaagcaggaacaatagcatgaacccccagacacggccccccaagatgcgctgttccgctgtgctgcagccccatttgtccttttctataccatttttggttgtatttgaagcaaatccctgacatcagggcatttcatcccaaaatacttccatctgtgtttctaaaaaaacgaggccattttcttatgtaaccacaacgtgatcaacagtaatcaatgcttaacatctaattctgggccacgttaagaccctcctgattggctcaagaatgtcttttgtgcagttggtttcttgattctttttgttttttttgagacagggtctcactgtgtcacccaggctggagtgcagtggtgcaatcacggctcactgcagcctcagcctcctgcctcagcgatcctcctgcctcagcctcccaagtagctgggaccacaggtttgcaccaccactcccagctaattaaaaaaagtaatttgtagagacgggggtggggtgggggtcttgctatgttgcccaggctggtctcaaactcctagactcaaacaatcctcctgccttggcctcccaaagtgttgcgatcacaggcatgagcccctgtccctggcccctattatttctctaactggggaaagtcatgtgggaacagatgtagcttgccttggcctctg

SEQ ID NO: 37655 - DNA, 2300 bp, Homo sapien
aaggtcagcaaccacagtcacagctccggcttctcttcctgtcctgccccgggagcacatcctgcggggctgtgtttcctgcctggttgagaatctagttgccaaaccacctttcctctgaaggaatcaaccatgatttttccccatttttcacttttatattactggctaggtagtcaccacatcccataataaaactccattctggccctatccagtactactcttacaaatgcagaagcaaaggacttgagtggacatttgtgcaatattgaatagctgtttaacatttcagcaatattgaatagctgtttaacatttcagcaatgttgagttgcaggcatgctttatgtattcctctgtccattttaggagagcctttttttctccctccatacccattattatttcatgtcagtgccagacagatcggatgagcaagcaaatagaccctctttccaagccttcatgaaaagactgtaaccttaattctttacagcctcttctctccttgagcagcttcccagggaaagtcagccagccccaggcaactggagtgccacaccttaaagccgcacctcagcctcagggtgctcttacagagaaggtttgtgctgtagaaaattgcagttgtgtttgggcacatagcttttcaaattgaaaagtttttcattagaaccttgagtctagctgggcgcagtggctcacgcttgtaatctcagcactttgggaggctgaggcaggcggatcacttgaggttaggagtttgagaccagcctggccaacatggtgaaacctcatctctactaaaaatacaaaaaatggccgggcatgaaagccaggtgtggtgatgtggtggcacacacctgtgatgccagctacttgggaagctgagacatgtgaaccgtttgaacccaggaaatggaggttgcagtgagtctcaaaaaaaataggccaggcacagtggctcacacttgtaatcccagcacttttgggaggccgaggcaggtggatcacctgaggtcgggagttccagaccagcctggccaacatggtgaaaccccatttctactaaaaatacaaaacttagctgggcatggtggtgggcgcctgtaatcccagctacttgggagactgaagtgggagaatctcttgaacccggggaggcggaggttgcagtgagctgagatggagccactgtgccccaggctaggtgacagagcaagactctgtctcaaaaaaaaaaaaacaaaacagaaccttgagttgtagaacgttgagtagtgtcttcacagttgctgagtaactaaaatcataaacggatgtactacagaggtgactcattaaggtaatagtactaaatgcactttatctaaacctcatctccttgacaatgttttctttctttctttttttttttctttttttttttttaagatagagtctcactctgttacataggctggggtgcagtgacacggtctcagctcactgcagccttcacctcccgggtttaagcgattctcctgcctcaacctcccaagtagctgggattacaggtgtgcactaccacgcctggcaaatttttgtatttttagtagagacagtttcaccatgttggtcaggctggtctcaaactcctgagctcaaatgatcttcctgctttggcctctcaaagttctgggattacaggcgtgcaccaccatgctcagcctgttctctccattttaagcctacagggattcctataacaaatagagcagtccttttctaaatgctgagtactgggcactatgccagggtactttatattttgtctgtaattctcaaaacaccatgagaaagttgtgttttcacagtttaaaaatgaggaaactgagtctccaggcaggtgagtaatttactgaaggtcatacaattaaaactttgaagcagttctcagactccaaaacctaggctcttttcactgtttaatgtcacaaaaaagccataagtgatcattttatgtgaaaataaataaatgcttaatggccatatttttttcctcctcatcttccctcccagctccaaattatgttttcttatttcagtgaagaaaaaatgactgctgcccgcattagaaaatgccacaagtgtgggactggcctcatcaaatctgaaggctgcaaccgcatgtcttgccgctgtggtgcccagatgtgctacctctgtcgagtttctattaatggatatgaccatttctgccaacatccccgctcaccaggagccccttgccaggagtgttcaagatgctctctctg

SEQ ID NO: 37656 - DNA, 2300 bp, Homo sapien
atactgaggttcagcagactttttctgtaaacatccataccaggggtcagcagactttttctgtaaaaggcaaggtagtaaatatttcaggctttgcggaccatatggtatctatcccagctacctaactctgcctttatagcgtgaaagtaaccacagacaatatgtaaacaaatgaatgtggctgtgtcccagtataattatatttacaaaaattggcagagggccagattggccagtgagctgtagtttgccaacccgtagcatataccatagcgtttaaaagaatgacgtggaatcccgttgtgcaaatatggagctgtctccaagatattaagtgaaaaaagcaagacgtagaacaatgggtgcaatatgcccacaattgtgtcttaaatgggaggaggaagagatgcttgctgacacagacataaaatctatttggaaggatagataagaaatgggtagcagtgaatcgcttttgaggatgctcaccaagggttaagggaggagtgtgcatgtgtcacattgtatacccattgtcattaacttagtcatgtctgaacatgagcaaaagaatttttgttttgtttgtattaagagaacttgaaaaatagaaatgtgattattaaaatatgcttgtgtattttcaaactccaagctatttcttctggtgtgttggaaggcttattttaccacctaaaaaggagtgccttgcctcgggctggaggcgagggatggcgttttgtggtgtgtggaaggagctggaactgagcagctctgcctttctcctcgctcgccttctgcacgggctctgcttgcagcacaagctctggcactgtcggacaggatacagccagtgagaaaccttggaccagaagtcagggccccgcgggaattagtatggcttttagtagttagaattcaagactgtttccaactgctgccttttcccacagagtatgtctgactaacaaggatgggttctgattcacccggcgttgctatgaccgctttttaaaaatgtctgctttgggttgtgaaatcagcaaataaagttgttactttcctagtatgtgtaacagttagcttttggtatgtgaggaacaagtaaaaggcttagtggcaaatccttgtctgcttagaaggcagtgtacatataaacaactaaaaaattcccatttggctgccagcctcgattcatagttccctcttccagctcccaagcaaatatttttcaaatagccgtgctaagccttttccaggcatgatttgcgggcttacttgctgtcattctatttttcagcaaaactctgggtaggaatgtcggaaattataccttttgaaatccctccttgaaaacatggagatttgtaggtatgcagaggcaattgtaacaatataaagtattgtatctcttccactagagtaggagggcctgactgtcggcccctggggtctgtctttcattacttgtcttgacttccgctgtaaaagcattaagtgggaaggtagcagttctgctgaacaagcagacattgccttctgtaagagaagttatttaaaacatcgaaaatatgtttgaaagatattggtgtagtttcctctgacctcaatttcatacactagtaactctccggtgtctagagttagtactgatggactccctgccgggtggccagaaccatgtgtccatgccagatagaagattctacttcacttgattgaggacgctaagaagttgtgctttgccatacatgttgcccctaaggagaagctgggcattttaaagaatagacttaaaactaacacacatactctgtttttctcacacacacattccccctctccccttctcttctacacacaccagcactgccttccccacccccaccatagctctctccattactgcctttaaccttgaaacctctcttgtacacttacgcattcatctgttcctgctcttgtatcattaatgggcctggagcaatccagccaggagcaatccagccagaacaggaacactgacattactaattactgcttataactgagaagtaaggagcagtgagtaaagtgggtcacaagacagtgtcctagcagtcaaatgctgccgtcggcccgagtggcgaggtgtcaggtggcttgtctccccttcaccatgggtagacctggcagagcaccctgttggcatgagcagaagtgctgtcacgttgatcacccaggctcaccgtctacacacacggttagagaaatgggtgtgcttctgtcggaacttaaaaacatggcagatcaacccg

SEQ ID NO: 37657 - DNA, 2300 bp, Homo sapien
tttttttaatttgtagcattgataattacagtaattaacattgagcacttaatatgtaccagtcacttttctaagtgctttaatggattaattcatttatgtttcaaatagccttatgagatgtatgtgccattattatcattttatagaaaaaaagtgaagcacagagaggttaagtaacttggcagatgttacacagctagcgagtagcccagctgggaatctggcttcaaagcttactgtctaaccacgtgcttttctattctcataataccaaaaactgattttttttgttgctgttgttttttttaattttaagacggagtccacttcccaagctcaagcgattctcctgcctcagcctcgcaagtagctggaattaattacaggtgtgcgccatcatgcctggggggtttcaccatgttggacaggttggtctcgaactcctaaccttagatgatgtgccctccttggcctcccaaagtgctgggattacaggcgtgagtcactgcgcctggccccaaaaactggttttctgaagaaaaggtttgaatttaaaaaaacatgagaggctgggcgcggtggctcatgcctgtaatcctggcactttgggaggccgaggcaggcggatcacgaggtcgggagatcaagaccatcctggctaacacagtgaaaccccgtctttactaaaaatacaaaaaattagccgggcatggtggcgggcgcctgtagtcccagctactcgggaggctgaggcaggagaatggcgtgaaccccggggggcggagctgacagtgagccgagatcgcaccactgcacccttgcctgggcaacagagtgagactctgtctcaaaaaaaaacaaaacaaacaaacaaacaaaaaaaaaaacatgagaatgagcaagagaaaaggagaatcaaaataaaatgtattaggaaccagatagtaaatattaaaatcaagagattaccaagaacagacaagagtaaattgaaaatctgaatgagataaagttttctagaaaaacataaattggccaggcgttgtggctcacacctgtaatcccagcactttgggaggccaaggctggtggatcatttagcccaggacttcaagaccagcctggacaacatggcaaaatcccatctctaaaaaaatacaaaaaaattagctgggtgtggtggcatctgcctgtatagtcccagctcctcaggaggctgaggcgggaggattgcctgagcccaggagttgaggctgcagtgatctgtgaatgtgccactgcactccagcgtgagcagcagagcaaggctctgtctccaaaaagaaaatcataaattgccaaatcagtgaaacaagtacaaaacctaaacagatcatttacgtgtctaatatttgttattctgctctcttttattctcatgttataatatattgtggtgaatctaggtactgttccttcagccccttgtatatttgaatgctttgaaaataaaaatggttgaaaatcatacagcacatttgcacccaccagaatggctaaaattaaaaaccgatgataggtgttggtaaggacatggagagactggaactcacatgcattgctgatggaggaagggtgtaaactggtacaaccactttggaaaactggcattattttctgaagctggaagtaagcctatcccatgatctagcaattcgcaggtaaattgcggacatacattcaccaacaaatggctataagcagcgctattcagattaacccaaaacagcaaacccaaatgtcctcagtagtgaaatagataataaattgtggtatattcacatagtacactagtgacaggataggagatgccttccaattggagcataaacagagggaaagaatcagaaaggtcaaaaaatggatggtaggttggctaatggtaagaagcccagtcttcccaaatggtagaatgtgatagaaaagtcatgaaacgtaccatcagagagaaggtggaggatgaggccgggaagaatggacatggctggcccaggttcctaacacatagttgtctgcatgcttttgcattgtcgtatatcttctaggtgacataaaaatagaaaagaggatgttctttcttgaaaataagcgacgacattgtaggtcctatgaccgacgtgctctccttccagctgtgcaacaagagcaggagttctatgagcagaaaatcaaagagatggcagaggtaggaagatgtgctctggtcttggggtgtgtttctgggattctggtttgctcttagggtttagttagtacaa

SEQ ID NO: 37658 - DNA, 2300 bp, Homo sapien
ctgtgcagttgttccaaggtggttgtctgatttgactgtgaagagcctggatagttaacatgtgttgggtctgggtggtgatacatcagtgtgtgttatctcactctatatagccttactttggaagtatttcatggtgataatagacaaagctagtgggttttgtgtgaagagagtctgttcataggaaaacatgatctgttcatcagtctagcttggcagctagctaaataaaccacgtgtaactcaatggctcatagagctttattattaccatagagatttatgttaccacaggggtataaaaagtattaatgaattaacagaaggtcttttatatttcatttattacatctcttagcagactgttttttactgtaaatgtgaacacacagttttccacttcttacttgttcatagttttctcgacaaagagtagctgcttttcttaaaattttccagttttgtagtttaaccaataatagtttcagtgacttcattacattaacacccaattgatacataaacttcagaggagtttgccttaatcagtatgttcattgctttttaaatttttttgtctttcacaaagatagaaattcagtgcagttgtttgtttattggtttagtttttctgggctacaaacatcttaatttcttgataggccagttgtaatgtgtgactaaggactatattcttcaaccattgcatttgaagcaatgggcaggtgtgggatttggaagcagtatgaaagtaacatcatttgtttctgcagactttgtaattttcttctggaaaacccagattatccaaagagagaagacagaatcattataaatcccagtagcagtctgctggccagccaagatgagacaaaggcaagtgtcatgttcatgttttgcagtcactgcctggaaatgctgtgctttgttgttgttgttgttgttgttatctctgtgggaagaaagtgctttgttgggacaagtttttaaagactagccgagggacataggatttcagaatatatctatacttcagtgcgatctcccagtctgagccactttgaattctgtctgtctttaacttctatctttccttgtaattcttatcttccttttcccacaaagaattgaacgaattctccatatctttaatcctacaaagcaaattcctaaagcaaaacaagaattggccaaaactcttaacattttattatgaaaattttcaaacctacagaaaaattgaaatattttacgttgatcatttatatacctaccactggtactagttaacagtttactgtatcctctttatcatacatatgtcctctgtctgtccatcagcacaactttgttatgtttcatttcatgataatgcatttcaaagtaaattgcaaaaacatgagtacacttccctctaagtacttcagcatgcaggtcattacccagagtggaatatcttttttcttttgatgtgagatttgtatacagcgtatactatacatctgtttaaccagatctcatatcaagatgtaaacagtttggtttttaaaaacttcaatcattgtcattatttgtgatctaaactggcatttagtgtgttatatggtcaagtatggttgagaactaactttattaagatctgttgcttgatcttccaactccccatagattctttgactgtctctcttacgtattctgtaatagaaaaaaaatagttgttcgtaaatatggtatggaaagaagatggctgtaagattggtttaaatccccaactatacttctttagtagtaaaactagtctgtcggctccagacaggtttgtttaacctctctgagccaccgttttctcatctgtcttatagggctggtaacttccttatagagtaattagaacaaatgttattcttttctacacatgtaattcttaaaatgatttcccctgtatgggaaatgtactgcctggcctctgattttatgcttctctctcatttcagttgcctaaaatagacttttttgactattctaaattgacccctcttgaccagcgctgcttcatccaagctgctgacctcctcatggccgacttcaaagtgctcagtagtcaggacatcaagtgggccctgcacgagctcaaaggacactatgcaatcacccgaaaggtactctacttggtcttcctgttggggtcacacctcttgactacatcttcccatggtaacagaatgaacagttcagcttgtggaaattgggatggtttatgattgctaaggaatttattagggtgaagataaatagat

SEQ ID NO: 37659 - DNA, 2300 bp, Homo sapien
gtgaagcttcccatttcagtacagactgagctacctctttttttggtaggggtcagttgtagagtattttgtagaacaaataagtaatagtttatttaaccattcactcagggacaaacttcacaatgtctctaggcttttttctgtttatgctgaatattcttgtatatgccctttttcgatagagtttatagaacagtatgaaaaaatgatgacagacatacattttttatttatatttatgtatttgtgtatttatttatttatttgagacagagtcttgctctgtctccaggctggagtgctgtggtaccatcttggctcactgcaacctcttgactccctggttcaagcaattctgctccgtcagcctcccgagtagctgggattgcaggcacacgccaccatgtccagctgatgtttgtatttttagtagagacggattttcaccatgttggccaggatggtctcgatctcctgacctcgtgatccgcctgccttggcctccctgaatgctgggattacaggcatgagccaccacgcctggcctacgttttttattttaataaatagtgccaaatttctctcctaaattcaccagcagtaaatgatagtataagaattttcacacatcggccaagcgcggtgccccacacctgtaatcccagcactttgggaggctgaggtgggccagtcatctgaggtcaggagttcaagaccagcctggccaacatggcaaaaccctgtctctaacaaaaatagaaaaattagctggatgtagaggtgtgcgcctataatcccagctactcgggaggctgtggcaggataattgcttgaacctgggaggcagaagttggagtgagctgagatcatgccattgcactccagcctgggcaatagagcgagactctgtctcaaaaaaaaaaaaaaaaaaaaaaaaaaagatttttcaccatcctcaccaatgcttggtattatctaatttaaaagtttgccggtcttacagggaaaaaaatactgtcttgttttaatttttcattttgctagttactaatgagatttagatttttttatatgttttttgaacatttcttattcttctgatgtgttagcattctttcattgttgtatctgctgtggagttatttttgttttagtagtctcaggttaaattataattcagggctgggttcagtggctcatgcctgtaatcccagcactttgggaggctgagggaggcggatcacttgaggccaggagtttgagacgagcgtggccaacatggcaaaaccccatctctcttagaaacacaaaaattagctggacatgttggcacatttttgtaatcccagctacttgggaggctgaggcacaagagttgcttgagcccgggaggcagaggttgcagtgagccgagatcgcaccattgcactccagcctgggtagcagaggaaaactgtgtctcaaaaataaaaataaattataattcaaactatatctcaagctttaatctatgaatgactactttgattcttacagatagtatatagtgtaatcaaatttcagtgttaagataaatgtaaagaataggtattgttaagggagatggtgtttttgtttctttcctgtcctatctcggaagctcaatataagtacataaggagggataggcataggaaagaaattgaattattaaaatttcattttttcttagacaaataaacctcagagatcacgacccaatctcatcaaaccagctgcccagtggcaagatctgaaaaggttgggagaagaaaggcctaaaaagtctagagcagcatttgaatcagataagagcagctatttttcagtgtgtaacaacccattgtttgattctggggcacaggatgattctgaggatgactacggtgaatttctggatcttgggcctcctggaatctctgaattcactaagccaagtggccaaacagaaagagaacccaagcctggaccgagtcataaccaagcagcaaatgacattgtcaaccccagatcagagcagaaagtcatcatcttggaagaaggtagccttctttacacagaaagcgatcctttggaaactcagaaccagtcatccgaagactcagagacagagctgttatcaaatctaggagagtcagctgctctagcagatgatcaggccatcgaagaagactgctggttagatcatccttacttccagtctctgaaccaacagccccgtgaaataacaaaccaggtcgttcctcaggaacggcagcctgaagcagaactgggccgct

SEQ ID NO: 37660 - DNA, 2300 bp, Homo sapien
ttactttttttttttttcgagatggagggttgctctgttgcccaggctggagtgcaggggcgccatgttggctcactacaacctccgcctcccaggttcaagtgattttcccgcctcagcctcctgagtagctgggattacaggcatccgccaccatgcctggctaatttttttatttttggtagagacgggtttcaccatgttggccaggctggtctccaacgtctgacctcaagtgatccacccgccttggcctcccaaagtgctgggattacaggcgtgagccactgtgcccagccatgggacccactttactcttaatttccccaattcctagaacagtgtgtggcccacaggaaatccgcagaatatatttgcagaatgaatgaatgacttgccaaacgaattagggcaaatcagtagatatcgagtaaacatccacaaccacctgccccatacccttttcagctctggggagatggtggctccttgtggggtcggatatgggggtctcctttcctttcaccctcctgcctcgtgggggagtcaagtctccgcaggcggagagcccggatgcaggcgcgactaggcggccctctctatggtgagccccccggtccctcctccgcagtacccggagtgcctctatggttcttcctgtccttagtcgggagggggcgctgtgcgcaggcgcgaggtgacgccgcggcagggccggaaggagtgcagcggctgccacggagctcgcagctgcggcttctgaggagtaagcggcgcggtagcgaaggccgccgaacctgcctggctagccggcgacttgagtgacgagtgagtgtcggctgcggggcgcgctcgagctcctgggcgggtctgtgaggcgacgcggcctctctgaggggcgcctctgtggagctccgggggtgggggcgggggcgcgggccgtgagggccgccgagctgaggggcgcgggccgaggcccgggcgggatcgggccaaggggctgggctgggcgtctcgagcccggtgcggtggcgaggctggagcgacaaaggcgctgagcggccgggtggccccctctcgccacttcgcgaagtttcgcgggccggcccctcgggtctgctgcgcgagggcaacagcccgggagaccgcgcttccctcccccgggcccgaggccgccgcggaggcggtgtccgtgcacccgagcgcggcctggaggagcggcgggaggcgggccgtgcctgtgaaccccagcccaggcgggcggcgtttttcctcctcttccctcacatctggagcgcgtgttccgcgaaagttggcgactgtcacccggcactcgcgagggcgccgcaagtgcgtcaaacccttctgcggggcgctgggggctggcccggctcgggtgtccgggcgctgggcagcgagcgaggccgctgtccccgcgtcgaggtggttctgctcccggtggaacaggaccagggatccaagactctgggccacttgcaaccaaccctggagcgtgcgcggcgtgcgggttacagaaatttctgacaaatccgacagggctctgtaaatccctaagggcctgggtagcagctgtcctaggtacttagatcgtgcaaagagaacgttcttttttcttttacttttttttttttctccttttctttgagacggagtcttgctctgttgcccaggctggagtgcagtggcgcgatcccggctcactgcaagctctgcctcccggattcaagcgattttcctgcctcagcctcacagggattgcctcagctgggattacaggcatttgccaccacgtccagctaatttttgtatttttagtagagacgggatttctccgtgttggccaggctggtctctaacgtctgacctcaggtgatccctccgcctcggcctcccaaagtgctacagtcttttcaaaagacgtttcagatatgttctccgggaccctcgggcccttcagtaagaagcgccctggctgaaaacccacacgttcacctacagaagaagcactgtgacgtagagggtgagcagagcagagggcctcacagtggccctcacatgcacctggctccagcctggccaggtcattttgccctggtgggcctgtgcctcaaaaatggggtttcttcccttgtgaggaagacccatgaattagtaacggaattgccaggaatgctaaaaactatctaaatgccatgtattgttttcaagctgttactcctggaaggggctgggttggcattgttttagaggttaggagccaaacatcagctcatctattc

SEQ ID NO: 37661 - DNA, 2300 bp, Homo sapien
atctgtaagatccctagatcctcgtcctgttctgtaagcagcccttcaatttctacttcactgaaacatgactattccctcaggacactgttccccaaagcactatgagtagtggtctttttctgtcccatgcaagcccccataagccacactctactgtcttagagaaggaacactcattgccgcatcaagactattgttcctctcatttccctgttttgtttttgtttgcttcttttgagacaggctgttgttctgtcatccaggctggagtgcagcagtgcaatcatagctcacagcagcctcggactcctgggctcaaacaatcctctggccgggtttagtggctcgctcctgtaattccagcactttggtaggccgaggtgggtagattacctgaggtcaggagttcaagaccagcctggccaacatggtgaaaccctgtctctactgaaaatacgaaaattagccgggcgtggtggcacatgcttgtaatcccagctactcaggaggctgaggcaggagaatcgcttgagcccagaaggtggaggttgcagtgagccaagatcgtgccaccgcactccagcctggctgacagagtgagattctgtccaaaaaaacaaaacaaacaaaacaaaacaaaacaaaaaaatcctcccacctcagtctcctgagtagctgggactataggtgcgcaccaccatgcccggctaatttttatttttgtaaagatggggtcttactctattgcccaggatcgtctcaaactcctggcttcaagccatcctcccacctccatttcccaaaatgttcggattccaggtataagccactatgcccagcccagactcatttatctaattactgacttgatatctctacttgaaggtgtacttggcaatttttttttttttgagacacagtctcactctgttacccaggctgaagtgcagtggcataatcactgcactacaacctccccctcctcggttcaagcaattcttgtgcctcggcctcccgagtagctcggattacaggcacgcaccaccatgcccagctaatttttgtatttttagtagagacggggtttcaccatggtggccaggctggtctcgaactcctgacctcaagtgatctgcctgcctcggcctcccaatgtgctgggattacaggcgtgaaccaccacgcctggccagcaattattttaagagttggggtcttgctattttgctaaggctggtcttgaactcctggcctcaagcgatcctcctgccttggccttccaaagcgcggggattatggacatgagccactgtgcccagcaggagcagtattttagtcagttattcacttgctcactaaaacctaaacttcctgaggccaggaacacattttactttttttttttttcgagatggagggttgctctgttgcccaggctggagtgcaggggcgccatgttggctcactacaacctccgcctcccaggttcaagtgattttcccgcctcagcctcctgagtagctgggattacaggcatccgccaccatgcctggctaatttttttatttttggtagagacgggtttcaccatgttggccaggctggtctccaacgtctgacctcaagtgatccacccgccttggcctcccaaagtgctgggattacaggcgtgagccactgtgcccagccatgggacccactttactcttaatttccccaattcctagaacagtgtgtggcccacaggaaatccgcagaatatatttgcagaatgaatgaatgacttgccaaacgaattagggcaaatcagtagatatcgagtaaacatccacaaccacctgccccatacccttttcagctctggggagatggtggctccttgtggggtcggatatgggggtctcctttcctttcaccctcctgcctcgtgggggagtcaagtctccgcaggcggagagcccggatgcaggcgcgactaggcggccctctctatggtgagccccccggtccctcctccgcagtacccggagtgcctctatggttcttcctgtccttagtcgggagggggcgctgtgcgcaggcgcgaggtgacgccgcggcagggccggaaggagtgcagcggctgccacggagctcgcagctgcggcttctgaggagtaagcggcgcggtagcgaaggccgccgaacctgcctggctagccggcgacttgagtgacgagtgagtgtcggctgcggggcgcgctcgagctcctgggcgggtctgtgaggcgacgcggcctctctgaggggcgcctctg

SEQ ID NO: 37662 - DNA, 2300 bp, Homo sapien
attacaggcatgtaccaccatgcccagctaatttttgtatttttagtagagacggggtttcatcatgttggccagggtggtctcgaactcctgacctcaggtgatccacctgccttggcctcccaaagtgctgggattacaggcgtgagccaccgtggccagctgggtattataatttaacatgacccaaaccataatcaccctcatacccaaatctgccatactcaagtcccacagttggccttgtggaactgtgtacatgaaaagttgggcttctatatgtttgagtttcacatccctcaaatactgtattttctgagttcggttggaaaaaacctgcatataagtggaccttcgaagttcaaacccatggtgtttgagggtctacgtggtgtatttttccctcactgatctaaaatgcaaatttatagagaaatcttgaaaaagtaataggcataacaaatatctgagttaaaaatatgtcctgattaaaggacaatttggaaaaaaaatgtataacaaaaatgacctaaataggaagaaaggaacaaatgacataaaaccccaaaaggattattccttttttatatatatgtgtgtgtgtgtgtgtgtgtgtgtacacacacacacacacacacacacacacacacacacacacatatatatatatatatatatatatatatatatatatatatatatatatatatatatattttgagacagtcttgctctgtcgcccaggctggagtgccatggtgtgatctcggcttactgcaacctctgcctcccgggttcaagtgattcaaacaattgtgcctcagcctcctgagtagctgggattacaggtgtccaccaccatgcccagctaatgtttttatttatttatttttatttttatttttgagatgaagtttagttctttttgcccaggctggagtgcaatggtgcaatcttggctcactgcaacctccgcctcttgggttcaagcgattctcctgcctcagcctcccaagtagctcagattacaggcatgcgccaccacacctggctaatttttttttttgtatttttagtagagacggggtttcgccatgttggtcaggctgatctcgaactcccgacctcaggtgattgcccatcttggcctcccaaagtgctaggattacaggcgtgagccactgcacctggccaatttttgtatttttagtagagagggggtttcaccgtgttggtcaggctggtctcaaactcctgacctcaggtgatccacctagcttgaccttccaaagtgctgggtttacaggcatgagccaccgcgcccaaccccaaaaggattattctaaaaagagtctacacccacaagatttgtaaatgaatcatttttatggagatgatttctactgtttattttggttttgttttgttttttttttttttttttttttttgacggagtcacacactgtcgctcagggctggagtgcaatggtgcgatctcggctcactgcaaccttcgcctgctgggttcacaccattctcctgcctcagcctcctgagtagctgggattaaaggtgtacaccatgacaccgagctaattttttgtatttttagtagagccagggtttcaccgtgttagccaggatggtctcgaactcctgacctcgtgatctgcccgccttagcctcccgaagtgctgggattacaggcaagagccaccgcgcctggcctactgtttataattcactctagaaccacgcggtagaaaccacaggtagaatctaccacagggtggaaatctacgtagttgaatgtgcaaaggactccaattcctgatgtgcaaacctgatccaggaaaccagacaaaaaaccttttacaaagagacaaaatctttttgtagaaacaaaaggaaaagccggctgggcatggtgtcattcacccccagctctgtgtcaaccagaagcccggcgccacaccctgccagcccatggccacctcccacgtgactgcagccgtggctgtggctggaagtgcagggtagcctaaccggaagcatggcgtcgtggggggttctgggagttgtagtccctgggggagctgcttttacgcagtgttttgaggtgcaggactgcaatgcccgcacttccggaccccagactcttcctacggcgactgacacctcagacacgcgttgtggggggcggcgctctggctccggggctgtgcccagcgcgagcgtggccggcacccacttgctgcagagccggcactgcactggggttcttgggggcggctcctc

SEQ ID NO: 37663 - DNA, 2300 bp, Homo sapien
gaatgtggttttaccacaataattaaaaagaacagtctagcacagtgctggccatataaaggctcaataaatgtttgctgaaagttaaaaaaaaaaaaaaaaaaaaaaaagccaggcgcagtggttcattcctgtaatcccagcactttaggaggatgaggtgggagaattacttgagcccaggagttcgagaccagcctaggcaacatggcaaaaccctgtcaaaaccctgtctctccaaaaaatatgcatatttaaaaaattagccaggcatggtggtgtgtgcctgtagtaccagctactcgggagactgaagtgggaggatcgcttgagcctgggaggtcaaggctgcaatgagctgagatcgtgccactgcactccagccggggcaacagagcaagaccctgtcacaacagaaacaaaatcttgaggtgtctagtcctggcctcagcctcagaatatttgtttctgaacatgttagttttgggggttggggatgctggtttgatttcctcctttttgccttttgagtgtgtgcaatttatggtatagctgggaaacgtcaaagtcaagagttttgtaggaaagtcacgtcacttagccctgtctcctgtgccgggtgagacctgtgtgtgcacttggtgacaatggctttgagtctgtcaactccagactgaggtcagccttacacacccatagttcccaaagctgaaaacaggcctgcctccaacggtacctgctaatatcaggggagccttttcagcttacagagcaccctgtatgtgtttgtcttagttcaggccaccatctccaccttaccaggcatctagaaccttctccacactttgccaacagggttcgtttgcagaattgaaatcttagttaaggtttgttgaagtttgttgttgttttttttttttttttacaattggctgttcccacccacattcccttgagacataaatagaaaaaaaaaaaaaaagaggtttcatgagtaagacaagacatttgagctgcatccacttgatccttgaaaaggaaatctaagaggttgtaactatcactttttctagcctatataaggtaggtcagtaaggtagcaaaaacacatctgttgttttgctccttcaactctttttcctgattcttcctggggggaaaccgaaaacggtgagtaactggtggacacatcagaccccagactcttttcttcactgcatgcattcatattaggctcaggtgcttagactcctgttttccggtggctctgacacctggaaggattttaatctctgggagatgggcttttcatccatctgcttcccacctttcaggacaggtgcatgccttcttccacagaatgtctgcaagcagcccaaactgtatcctttcccacgtggaatttgcaacattgcatctctcgggctgctgtaggaaaatgccagtgcatgtgtaacatggtttacggctgcctatgcaaatgactgattatgtcagtataatttttataagaaaacaattgaatccttctttgggtcattttttttttccatttttggcatgtattcaaaagaaggctctgagacaaaaaaggctggggtgttttccgtatctggttttaatttggatattctgtcccgtcacttaatacaaaaccatgcttatcacattttaaaaattctagacaggcctggctcggtggcttgcatctgtcatcccagcactttgtgaggccaaggcaggcagatcacctgaggtcaggagctcaagaccagcctggccaacatggcaaaaccccgtctctactaaaaacacaaaaattagccaggcatggtagtgcgcacctgtaatcccagctactgggaaggcttaggcaggagaatcacttgagcccaggaggcggaggttgcggtgagccgagatcacgctcttgcactccagcctgggtgacagagtgagactccgtcttaatttaaaaaaaaaaataatctagacacacatacagtttcagtgggcctgggaagatgtgtttcccctggatgtgcacattcctgtttgtggcttatcgcctctcatttattctgtgtgagtaggtagaaaatgagcatcacggacgtgctcagtgctgacgacattgcagcagcgctccaggaatgccgaggtagaggggacgtgaggcgggggtgggatttcctcacagctttgcacctccagcgagtcaacacaaaatcaaaatgtaggccaggcggccagacgcagtggctcacacctgtaatcccagcactttgggaggccgaggc

SEQ ID NO: 37664 - DNA, 2300 bp, Homo sapien
ctcaaacaaggactctgtagatgatgttaatgggccaaacggaatgcacatctgcccttaagtgtgtttcttttctttcttttcttctttctttctttcttttttttttttttttgttgagacagggtctggatctgttgcccaggctggagtgtagtggtgcaatcttggctcactgcaacctccacctactgggttcaagtaattcttctgcctcaagcctcccaagtagctggaaccacaggcatgtgccaccacgcctggctagttttttgtattttagtagagacggggctggtctggaactccgggcctcaagtgatccacccaccttggcctcccaaagtgctgggattacagctatgagccaccgtggctagccttgtttatttctaaatgaggcttcctttgtgtctctacatttccttctacaaaaaaaactgccatggcacaggggcttatgcctacaatcccagcacttggagagcccaaggccagtggatcacttgagtccaggagttcgagaccagcctgggttaacatagtgagaccccagctctacgaaaaatttaaaaattagccagccatggtggcatgcacctgtggtcccagctattcgggaggctgaggtgggaggatcacttgagcccaggagttccaggctgcagtgacgtctgatctggccactgcaatccagcctgggcaacagagcaaagtgctgttttagaataaaatactttttaaataaactaaaaacaaaacaatggacctggtgtgggtggctcacatctgtaatcccagcactttgggagggcaggtgaggcagaatagggaatgagggtaaccaagggttaaggcataaacaaaagaacagcaggtgcagccagttctaggcaagattaggcagcatagaggccacgtgttcattccctcaatcagaggctgattgatggacgacgggggggggggcgggggggagggtgacagcctctgattgacgggggggggggggggggcgggtgcgcgtctccacttcagcctctgattggtcacaggccaatccttcagagggtgtaaccaatcggagacctctaacgggcacctaggggcgttacctaattcttccagcttaataaaaatcctaatgggggctcttgagctgtttgctctagcttgctcctgctctgtgagttgtactttcgcttcaataaatctgtttcttccttacttcagttttttcttttgtttcttttcgttgctttgttcttttgttactttgtgcattgcattttgttcagttctgtgttcaacaagccaagaacctgggcaatccacggtcaagaccttccatccagtagcagaggcaggaggatcccctgatgccaagagttagagagcagccggggcaacaaagtgagaccctgtctctactatctatctatctattttttaattatctgggcatggtagtgcatgcctgtggtctcagctactcctcaggctgaggtgggaagatcccttgagcccaggagttgaggctgcagtgagctatgatggcaccactgcactgcaacctgggtgacaaagcgagatcttgtctctaaattaaatttaaaacaataccaccaaaacaacaacaggctgggcggtggtgtctcacgcctgtaatcggagcactttgggaggccgaagtgggagaccatttgaggccaggagttcgagagcagcctgggcaacacagaccccacctctacaaaaaaataaaactggccttggtggcgcgcgcctgtaatcctagctacttgggaggctgaggcagggggattgcttgagtctcggacgttgaggctgcagtgagctgagatcgcgccactacactccagcctggatgacaaactgagaccctatcagaaaaaacaacaacaaaaaaaaaacagtgcccgctcggtttttcctgaaacgcgcagccctcgcctgtagccaggagaaaactccgcgagccaggaaaacacaaactcggccaggaaacagccacccgggggtgcctgaagaggacgctgcgaggcggattctttttccgggcctgcggcgagcgcttccggggcggtggcgacggaggcggaagtgcggtgttttagccggtggctgctgtctctgggcgggccgtgggaggctcccgaggtgggggccggggcgggatggctgcagcggcggccggggccgggagcgggccctgggcggcccaggagaagcagttcccgccggcgctgctgagtttcttcatctacaacccgcgcttc

SEQ ID NO: 37665 - DNA, 2300 bp, Homo sapien
gagtctccaagaccatcctcacttctgacacccactgcgagtttgggagtccccgtgaccacctttagggtaagagttctctagaagtactacaggactcagaaaaggctttctacagcagtacccccgagccaaaggccatgtgttccaaaacccccgggaggtgcctgaaaccggggacagtaccaaacccttcacttgctgtgttttttcctgtacatacatgcctgtgataatgtttataaattcagtacagtaagcgattaataaggctgggcgcagtggctcacacctgtaatcccagcactttgggaggccgaggcaggcagatcacttgaggccaggaacttgagaccagcctggccagtgtggtgaaaccctgcctctactatagatagaaaaattagccaggcatggtggcatgcacatgtaatccaagttactcaggaggctgagtcaggagaatctcttgaacttgggaggcggaggttgcagtgagccaagatcgtgccactgcactccagcctggacaagagtgagaccccatctcaaaacaagtaatagtaatcataattggacgatgacactctactgcaataaaagtcatgtgaatgcggtttgcttcccccttccctcaatattttattatactgtccctcacataacagaaaccatgggaaacaaaaccagggggaaggaagaatggcggcactcacagctgcggtttattacagtggaagaatacaggttaaaatcagcccggggaagaggcgtgtggggcagggcgcaggagccaccaatggaaggaccaggagtccttctatttgctttaggttggtttgggttggtttggttttttgggtttttgttttgttttttgttttttttttttttggttttttggtttttgagatggagtcccactctggtgtgagcttccggctgtcctctcccgttggggtcatgtggacagcccagtgagtgtttccccatcgaggatgtgtggctgtctctatggagtgttgacatccagggaagctcacctgagcctcgagatccagagatttgattgggggttggccacagagacacagctggccccacatggccagccttagtctccagccctccagaggtggagcgggtgctgtgcgggcttgggtgtaagggatattggcctgtagttttgttttcttgtgatatctttgggcaatgctggcttgataaaatgtgttgggaaatgttccctcctatttttttggaagacagtgaaaaattggtgttaattcctctttacatgtttcatagaattcacagtcaagctctctgcacctgggcttttctttgtggcaaattttaaagttaaccatttatgcccagtgttccattattggaacactaagcttgtgagagttatttatatcctgctgaaggtcattgccaaggtctcatttttcacaaaaaagatttacaacctccagcataaatgggttaatctctgtacttgttacaggtttattttgattttgtttcttcttgagtcagctttggtagtttgtgtctttctaggaatttgtcagcttcaattaatttatttgatttgtcggcacgtggtttttcatggtattgtaggtaaagccggatactccttcgtttttcctgtaaagtcagtagtgatgtctcctctttcattcctggttttagtaatttgagtcttctctctttgttccttgttgtatagtctagctaaaggttcttcatacttctggaatcttcacaagaaaaaggaaaagtttttcaatgttgggtcttttcagagaacaacttttggtttcatttattatctctgtgatttttctctgttgagtttgtttctgctctcatgctttattatttccttccatttgctttaggtttgtttgggtttttttgtttttgtttttgttttttttgagacggagtcctgctctgtcacccaggctggagtgcagtggcacagtctcagctcactgcaacctctgcctcccaggttcacatgattctcttgccgcagcctcctgagtagctgggattataggcgcaccaccacgcccggctaatttttttgtacttttagtagagatggggttttgccatgttagccaggctggtctcaaactcctgacctcaggtgatccgcccacctcggcctcccaaagtgctgggcttacaggtatgagccaccacacccggccccacttgctttaggtttagttgactcctgttgtccaggatcttaagacgaaaggtcaggtcactga

SEQ ID NO: 37666 - DNA, 2300 bp, Homo sapien
cccgaagtgcagggattacaggtgtgagccaccgcactgggccagtttctggtccttaagtgacaacttaccaagaaccgccctgtgcctcgttgtctcgggaaactcccggcagggggggaggtcatttttgcaggcacagacccccactccagcccagtcaggggggcttctgggcaggactcggggggctcctagaagcattctcagaggccgactggcctcatgggtcctggctggtgatcaggccacggcgtgctgtcctcttttctctgctgctgtggctgcctccagggagttcaggttcctggaagagaatccgatgctgctgggtgctgtgcactgtgctgcctgctgcccactcaggcgtcctgggcagagcgcgttccctggcaggtgcccctggggcaggctgttggctgatttgtttacagactattttgatgaccgtggcagaaagagggatttcctgaccgggcatggtggctcacgcctgtaatcccaatactttgggaggccaaggtgggcagatcatctgaggtcaggagttcaagaccagcctggccaatatggtgaaatcctgtctctactaaaactacaaaaatttgcggggcatggtggtgcacacctgtgatcccagctactcggaaagctgaggcaggagaattgcttaaacctgggaggcggaggttgcagtgagccgagactacaccattacactccagcctggggaacaagagcaaaactccatcttgaaaaaaaaaggaaaaagaaagagggatgtccccagtcatcactaagccttggagggaacagtgaattcacctccttcgagcgggttattttttttttcattagagacaggatcttgctctgtcgcccaggctggaatgcagtggtcatagttcactgcagcctcaacctcctgggctcaacagatcctctcacgtcagcacccccaaagtgctgggattataggcgtgcaccactgcaccttggtggccagcacctgtagtcccagctacttgggaggccaaggtgggaagatcacttgaggctgggagtttgagaccagaccagcctgggcaacatagagaaactccatctccacaaaaaatttaaaaagtagtgaggcttggtggcacacacacttgtagtctcagctacttggggggctgtggtgggaggatctcttgagcctgggaggtcgaggctgcagtgagctatgattgtgccgctgcactccaacctaggtgacagggtgagaccctgtctcaaaaaaacaaaaaaacaacaacaaaaaatccacaaaaactaggcatgatggctcatgcctgttaaatgcctgttaatctcagcactttgggaagccgaggcaggtggatcacctcaggtcaggagttcgagaccagcctggccaacatggcaaaaccccgtctctcctaaaaatacaaaaaaaattagcagggtgtgatgatgggtgcctgtaatcccagctacttgggaggctgaggcaggagaactgcttgaacctgggaggcagaggttgcagtgagccgagatggcgccattgcactacagcctgggcgacagagtgagactctgtctcaaaaataaaaacaaaaacaaataaaatctttttctagagacagggtcttcctaggttgcccagactggcctcaaattcccggcctcaagcagtcctcccgcctcagtctcccaaagtgctgtgattacaagtgtgagccactgcaccttgccaaggtgggttctaagaatctgaagttccccaggtcaggattggaagccagcactttccaacgtcacctgcttgtttcttcgaacttagtcaacctgcaacctcccagatatttcctcctgcctgagcttccgcccactggtcgggtcagatgagagaggatgcgatgagagcagacaaggaaggaagagagagagtgtgagggggatgttcagtgtgtccacaggagaggcaagaacagaatcagaggtcaagcagctcctggaaccgcccgcaggactagggattcccgcccccaccccccaacacttccttctgtcaccccatggccgttctgcttcagggcgactttgtgaagaatgtcccgatgaaccacggcgtgtacacgtggccggacggcagcatgtatgaaggcgaagtggtcaacggcatgaggaacggattcgggatgttcaagtgcagcacccagcctgtgtcctacatcggccactggtgcaatggcaagcggcacgggaaggtgggcgaggtggccacgtggagg

SEQ ID NO: 37667 - DNA, 2300 bp, Homo sapien
gacatagtttagtctataactttcaacccttaatgataattaaattcatctttgtttaatttcataaatttaaaagtagggtccttttcagttagtgattctcagccctgattcacattaaatttttaaacacgggggattctctgcccggctggaagaaaatgactggatgggacaggggtcactatttgaaacattcctctgtgcggccaaggtcgcaaaatgctgtcctcgcaggggaacaaaaagagtttgatttcccataatttgatgctgtgatttggtttcctcaggatgtgaactgtagaacattccagttactggccttgaatggttctgggaatataagaatccctgtctgtcttttcaaatagttttcatggaaccttgtcctgtttgaacttggctgaaaatggaagtaaagatgccctcttgggggcccagagatgacagatgtggctccccctgctgcccccaccccttctccagactgtgggcggctccccttcctgctttagaatccctcagatggaggaggcagtacagtagtcactgtgccatcgtgtctggcactgtgctggcgtggtctgcaggatcccacttatgaactctccagattgggagctgtggcaggataacagcccccaagacagctgtgtcctaatccccagaacctgtgaccacgctgcctcacgtggcagaagggactcggcaggtgtgattgagtgaaggatcttttttttttttttctttgagatgaagtttcgctcttgttgcccaggctggagttcaatagcatgatctcagctcactgcagcctctgcctcccaggttcaagtgattctcccacctcagcctcccgagtagctgggattacaggtgtccagaaccatactggctaatttttgtatttttagtagagacagggtttcaccatgttgaccaggctggtctcgaactcctgacctcaggtgatccgaccgcctcggcctcccaaagtgctgggattacaggtgtgagccatcatgcctggctgagttaaggatcttgcaacagagagattatcctggattgtctgggtgggcccagtccattgggtgagtccttcaaaggtggagacctttccctgctggccagagagaggctgtcttgctggttttggagatggaaggaggtaccactagtcaaggattgcaagcagtctctagaacagggattccaacactccggacacagaccagtagtggtccatggcctattaggaagtggggtgcacagcaggttaggggccggcaagccagcgaagcttcatctgtatttatagccactccccgtcgctggcgttaccacccgagctccgcctcctgtcacatcagcggtgggcattagattctcatagcagcacgagccctattgtgaactgcacacacgagggatgtaggttgcacgctccttatgagaatctgatgcctgatgatctgtcactgtctcccgtcacccccagatggggctgtctagttgcaggaaaacaagctcagggctcccactgagtctctgtgatggtgagttgtagaattatttaattatatgttacaatgtaataatagtagaaataaagtgcacaataaatgcaatgcacttgaatcgtcctgaaaccatccctccccgaccccaatccatggaaaaattgtgttccgcgaaaccggtctctggtgccaaaaaggttggggaccgcttctggaaaagctggaaaaggcaagaaaacgcattctctccctcagcctctggaaggaaccagcactgtgggactaatttacatactgtagggtaataaatttgtgttgcttcgaaccactaaatttatggtaatttgtttgcggcagcaatggaaaactaatgcctgcgttattcctattttatgatgaagcagttagcagagctgggaaaaccctggcctgctgcctccagcgtccagcctttcccccggccttcaggaccagcaagggcgggacacctgcttggcgctggcgcgcggcccctttaagagcacagggtgggcctggcggcgtccgcggttgcctggagaccggagccgggtctgggacgccgagagcccggcaacacctcagcccgagcccggcgaggtctctgggctcctggagcgaggtgagcgccccaggccgcggtcctgcgtacgccgggacagccatggcgactgggtcctgctccttcccggccggactgacgcggcctcccaggacccgagcacgtgcgtgatgggcgaggagggcctaggccgg

SEQ ID NO: 37668 - DNA, 2300 bp, Homo sapien
cccgttgcctatgctagagggcaatggcatgagctcagctcactgcaacctccgcctcccaggttcaagcgattctcctatctcagcctcccaagtagctgggattacaggcgcccaccatcacacccagctaatttttgtgtttttagaagagatagggtttcaccatgttggccaggctggtctcgaactcctgacctcaggtgatccgcctgcctcggcctcccaaagtgctaggattacaggggaccgcaaccagccatcccctatattgtagcacagtgaacaactgtcctgaacatcacaagctctttgagacactacagtgtataagcaggtctctgtctaaaccgctctcctcttcctcctctgcccaaacaatgtctgctcaaagaatgtatcccgtgtgttcattaacttagcaatttccagcaaacagtttaattgataacttgttaagagaaggcaggaaacctccatgaaagagaaatcactgggtatttcctacagcatttaacacatcgtaggcctttaataaacccttctgaaataaacaaacctctttactcttcattccaccttgctaagaatctcacctaagtctgtctaccatgtgaaactgcagatgacctcacagaaaatggaaagaagtatctctaaaaataagtttatttggcagcacactataggctacaggtccacttctgatttttttttttttttttttttgagaccgagtcttgctgcgttgcccaggccggactgcagtggcacgatctcagctcactgcaacctccgcctcctgggttccagcgattctcctgcctcagcctccaaagtagctaggattacaggctcccgccatcatgcccagttaatttttgtatttttagtagaaacggatttcaccatgttggccaggctggtcatgaactcctgacttcatgatccacccgccttggcctcccaaagtgctgggattataggcgtgagtcaccgctctcggcccacttcagatatttattttgaggagggagcgcatttagacacagaccccaaatttatttaaatgtctcaatacatttaaatgtagttacctaaatatatctaatatatttaaatgcagagagcaaatttgcgtttacaaatctgacatggaatgcaaatgtgctagccaagattcggtgtagcttaccagccagaaatcacacatcctaacaggtagaaacgtattgcatttttaaaaactgcgcagctatgcaaataaggatgtgtctggacgctctaccgtccccaaaataaccttaattttttaaaaaggccaggcacggtgcatcatgcctttaattccagcactttgaggggccaaggcgggcggattgcttgagctcaggcgttcgagaccagcctgggcaacgcagcgaaatccccgtctctacaaaaaaaaattaaaaataaaatactataaaaataaaaataaaaggggagagagaacaggtagaaaggaaatgcattcagtctatggggatttcacgctcccgcttcaagtccacggccctgtgatgggatgtgggcaaggcctgtctgggacaggccgaacccaactcctcacagggccgaatcctttgcccgcagcccaggaccccgaaggagcttgcctcggcctcaaggcgcacccaaggggcacgagatcgctgcaacactgaggtcgccactccggggcctccagggggctgcctcgccacgcgcctcggccatgttccccccatttccagggaggttggaatgccgtgggtctcaaagagggcgcgcgagaggggacaccggaagactgcgagccccgctcacctcgagctctcagctcgctccatggatgcaacacccgatccgcctcggggactgggaaagttccctccagggctcccacaggcgctccgcctcctgaactcccattggctgctttcgacgttgtgctccaccctttccgggcggggcggcaaaaatacttcccgtctctccttttcgcctattggctctgtcaaaggtcgacttcgtgacgtcaaagagcctgggccaatcagagcacaccggactgcgttttcccgaacgcccgcagcagggtcagaagggaggtggccggtctccgtcgtgacctctgacggtttctgagcgttggcctttggcacgcgctacccccttttgctttggttctgccatgccgatgtaccaggtaaagccctatcacgggggcggcgcgcctctccgtgtggagcttcccacctgcatgtaccggctcccca

SEQ ID NO: 37669 - DNA, 2300 bp, Homo sapien
catgcctgctcctctgtataagagtattcactgcaggactgttcatagcaagttaaaatggaaaacaatccagtgtccctgagcaagcaggatggataagtatatggtggagagtcatgcaatagaacggtatagtacagagatgatgaatacttctgatattacaataaaatgactcctaaaataatatctacgaaaaagaagccagggctgggacccagtggctcatgtttgtaatcccagcactttgggaggctggggttagaggatcgcctgtggccaggagattgagaccaccttgggtctccataaccaccttttatgtagagatgtggtaagacctcatctctacattaaaaaaaaaaaaacacccagacacatcagactatacgctgtatgcttacctatatgaagactattgtttaggggccgggcacggtggctcacacctgtaatcccaacactttgggaggtcgaggcgggtggatctcttgaggtcaggagttcgagatcagcctggccaacatggtgaaaccccgtctctaccaaaaatagaaaaattagccgggtccagtggacagcgcctgtaatctcagctactcaggaggctgaggcagagaattgcttcaacctgggaggcagaggttgcagtgagctaaaatcacaccactgcactccagcctgggtgatagagtgagactccatctgaaaaaaacaaaaaaaaaaacaaaaaaccagactatattgtttagggataaatagttgacaaaataatagagacaagcaagacataattaccataaaaatcaggacctggggttgggggtggagagggaaggtttaagtggaaagaatggagtggtgacaatgtgtgtcaacctgggccatggtgaccctggggttcgctttgtaattcctcaaaatgagcatttatgtgctattcacttttcagagggtagaatctctgaaccaaaatgtttaagcaaccatatattaaaaaaagaaaaaatatggacagatttgtattttaattaaaacatttaaaaaatagagacaagggtctcgctatgttgctgagagtggtctcaaactcttgggattcaattgatcctcccgcctcagtctcccaaagcgctgagactccaggcgtgaaccaccgcgcccgacctggaaagatacatacatatatatatatatatattttttttttttttttttttttttttgagatagagtttagctcttgttgcccaggctcgagtgcaatggctcgatctcagctcactgcaaactccgcctccagggttcaaacgattctcctgcctcagcctcccgagtagctgggattacaggcgcctcaccacacccggccaatttctgtatttttagtagagacgaggttttaccatgttggccaggctagtctcgaactcctgacctcaggtgatccgcccgcctcggcctcccaaagtgctgggattacaggcgtgagccacggcgcccggcctggataaatcttttaaaacataaaagtctgagtgagtccctggccggccggcacagatgccggggtggggccgtgaaccggttgggacgcgctcgctccggcctggggggacccgggccagcagccggtcgccgcgcgtgcgcactgggcggggggccccgcgctcctacctgcacgtggccagcgcccggcgctgggccgtagctcctgccgtgcacgttggggagccggtacatgcaggtgggaagctccacacggagaggcgcgccgcccccgtgatagggctttacctggtacatcggcatggcagaaccaaagcaaaagggggtagcgcgtgccaaaggccaacgctcagaaaccgtcagaggtcacgacggagaccggccacctcccttctgaccctgctgcgggcgttcgggaaaacgcagtccggtgtgctctgattggcccaggctctttgacgtcacgaagtcgacctttgacagagccaataggcgaaaaggagagacgggaagtatttttgccgccccgcccggaaagggtggagcacaacgtcgaaagcagccaatgggagttcaggaggcggagcgcctgtgggagccctggagggaactttcccagtccccgaggcggatcgggtgttgcatccatggagcgagctgagagctcgaggtgagcggggctcgcagtcttccggtgtcccctctcgcgcgccctctttgagacccacggcattccaacctccctggaaatggggggaacatggccgaggcgcgtggcgaggcagccccct

SEQ ID NO: 37670 - DNA, 2300 bp, Homo sapien
gtgctgtgggtgaggtccaaaagctgaaagatttttattccagctgtagctgatccatgaaaattaaggataattttttcttttttttttgagatggagtcttgctctgtcacccaggctggagtgcagtgtgcagaggcccgatctctgctcactgcaacctctgtctcccgggttcaagcgattctcctgcctcagcctctcgagtagctgggattacaggagcgcgccaccacacccaactaatttttgtatttttaatagagacgggggtttcaccatattggccaggctgatctcaaactcctgacctcaggtgatcccccaaccttggtctccggaagtgctgggattataggtgtgagccacagcgcccggcttagggtggatttttgaatctgagggtttcaacccatagtagatggagtgtggccagggcggggggttttagtttggaaaacgaacctgcacctgtatccctcaacctaaattttttttttttttttttttaaggaaaacatttcagttgtaaattctaagaggaatttctgttaggttggattcactgcgcgttttggaatgtagttggcatctcccgtttttttttttttttgagagtgagtcttgctctgtcgcccaggctggagtacagtggcgcaatctcggctcactgcaagctccgcttcccgggttcacgccattctcctgcctcagcctcccgagtagctggaactaacaggcgcccgccaccacgcctggctaattttttgtatttttagtagagacggggtttcaccgtgttagccaggatggtctcgatctcctgacctcatgatccaccgcctcagcctcccaaaggtgctgggattacaggcgtgagccaccgcgcccggcggcatctcccgtttttttgtggcataacagttgaccaaaataggttcaggtctccttgagacaggttttgaaaatgctttttaaaatttttttcctggaaaacaaatgaccaaagtcattgctgtacccacaaaaggtaaatatgtttcgattagtctttgcagacacctgattcttacactgacattcgagtctgggcgtgagacgtgagcgctaagacccttctggggtagctgggaactaggccagggttcacctgggcgcccctgaaacccagccgccggtagacgagcccaccagagcgcatgcgccgggggtacgccggggccggacacgcccaactcttcttgtctgataaagggcggagtctgctacagccccgcccccagtgaaggtgcgcgcgtggcggaggctggttttccgtctggtgaggggttacttccgggtcggacggcgctagctgcagcatcggagtgtggcagtgctgggctggccggcgggctgggctgcggcccgcgcgcggccggcgatgcaggggggcaactccggggtccgcaagcgcgaagaggagggcgacggggctggggctgtggctgcgccgccggccatcgactttcccgccgagggcccggaccccgaatatgacggtgagggatcggatcgcggcgtcgccgctctgctctctctgtccacctgcgtttctgggcggcaaaggcagccctgaggtttgcctgaggacctgggcgactttggctgcctccagggttgaaccggcggcccagccgcgcagtgcgagggggggcggcgggcgggccgtcgggtaaggtaaatatttattgaaaagaacgtctgcctctccctcctttgtttacatttctgttccttggtttcctctctggggactgaggccttcggatggctggggacatccccgaggccaccgtcttgcccccatgccctgggttttgtcattggttgagaacgatcttctttcattactgcaaggagactttgcaaactatacgctgaatagtttgggttaagagttgtaatttgtagctcttcttgtcttttgcttcattggagcttttcttgtcttttgcttcattggaaggagaactaaagatttcttatagtgaggcagcgtggaaataaataaacgtctttggtttaataaaaaggcccaagtttttttttgaagacaggcttgctgtgtcacccaggctggagtgcagtggcacaatcatagctcattgcagcctccaactcctgggctcaagtgatcctccagccttagcctcccgagtagctgggaccacaggtgcacaccactgtgcccagctaattttttaatttttttttttttgcagagatgtggtcttgctgtgtttcccaggctggtctcg

SEQ ID NO: 37671 - DNA, 2300 bp, Homo sapien
tgggactataggcgcccgccaccacgcctggctcatttttcgtatttttaggagagatgggggtttcaccgcgtcaaccaggatggtctcgatctcctgacctcgtgatccgcctgcctcggcctcccaaagtgctgggattacaggcgtgagccaccgcgcccggccagtatttgtatttgtatatatatatatttttacagtatttgtatttttaaagctgcgaatacatacagacaaaacactcctcagaaggggcgtgctcttctagaacatcagcaaggcacaggaaggaacatctctaatctctttttttttttttttgagacggagtcttgctttgttgcccaggctggagtgcagtcgctcaatctcagctcaccgtaagctccgcctcctgggtttaagcgattctcctgctaattttttgtgtttttagtagagacgggggtttcaccatgttggccaggctggttttgaattcctgacctcagatgatccacctgccgcggcctcccaaggtgctagtattacagaggtgagccatcgcgcctggcccatctctaatgtttggaatctaatctatctggagaactatacctttattttttatttttctttattttctttatctatctttacagtactttgagttgctgtttaagagaactacacctttaattgcctctaccaagctgaatgcatccaagtatgactgtctatggaaaacaagttcaaatagaattcttaaacaataccacttttacacatcgtgctgtgggtgaggtccaaaagctgaaagatttttattccagctgtagctgatccatgaaaattaaggataattttttcttttttttttgagatggagtcttgctctgtcacccaggctggagtgcagtgtgcagaggcccgatctctgctcactgcaacctctgtctcccgggttcaagcgattctcctgcctcagcctctcgagtagctgggattacaggagcgcgccaccacacccaactaatttttgtatttttaatagagacgggggtttcaccatattggccaggctgatctcaaactcctgacctcaggtgatcccccaaccttggtctccggaagtgctgggattataggtgtgagccacagcgcccggcttagggtggatttttgaatctgagggtttcaacccatagtagatggagtgtggccagggcggggggttttagtttggaaaacgaacctgcacctgtatccctcaacctaaattttttttttttttttttttaaggaaaacatttcagttgtaaattctaagaggaatttctgttaggttggattcactgcgcgttttggaatgtagttggcatctcccgtttttttttttttttgagagtgagtcttgctctgtcgcccaggctggagtacagtggcgcaatctcggctcactgcaagctccgcttcccgggttcacgccattctcctgcctcagcctcccgagtagctggaactaacaggcgcccgccaccacgcctggctaattttttgtatttttagtagagacggggtttcaccgtgttagccaggatggtctcgatctcctgacctcatgatccaccgcctcagcctcccaaaggtgctgggattacaggcgtgagccaccgcgcccggcggcatctcccgtttttttgtggcataacagttgaccaaaataggttcaggtctccttgagacaggttttgaaaatgctttttaaaatttttttcctggaaaacaaatgaccaaagtcattgctgtacccacaaaaggtaaatatgtttcgattagtctttgcagacacctgattcttacactgacattcgagtctgggcgtgagacgtgagcgctaagacccttctggggtagctgggaactaggccagggttcacctgggcgcccctgaaacccagccgccggtagacgagcccaccagagcgcatgcgccgggggtacgccggggccggacacgcccaactcttcttgtctgataaagggcggagtctgctacagccccgcccccagtgaaggtgcgcgcgtggcggaggctggttttccgtctggtgaggggttacttccgggtcggacggcgctagctgcagcatcggagtgtggcagtgctgggctggccggcgggctgggctgcggcccgcgcgcggccggcgatgcaggggggcaactccggggtccgcaagcgcgaagaggagggcgacggggctggggctgtggctgcgccgccggccatcgactttcccgccgagggcccggac

SEQ ID NO: 37672 - DNA, 2300 bp, Homo sapien
agccactgtagggtggggagtgcagcaacagagaagagactgttgagatggaattgttgagcgaagaaaggctgactcagggagggtcaggacagcagccgctggggaggccaggtaaacatgagttggtgtaaagggttagatcaccaggggagggaaagaggcagtgagagaggaaaggtctggtgagcacagaataccaggtccttaatcagtgcagggagaagcaggctcatggtggaggggagatgcagagatgaactagctctgttaggcctcgaggtggagacagccaataaatgattggatgtgtggatctggcactctggagcaagaactggtccagttgtctcctaagcctgtacaatgctaggatttgagataaaatctggacggggtgaacaggggtctatccccttcagagccaggtttaaaattccacacctgaggtcaggagttcgagaccagcctgaccaacatggtgaaactctgtctctacaaaatacaaaaaattagccgggcgtggtggcgggcatctgtaatcccaggtacttaggaggctgaggcaggaggcacaggttgcagtgagccgagatgacaccattgcactccagcctgggccataagagcaaactccgtctcaaaaaaaaaaaagaaaaagaaaatccctttctgtaactcagtgtgtgagtctgatggacagtggcgcaccggtggggtcaggcggacttgaaggctgcatcaggtcttgggcggtggctccggagtgtaatcccagcgctttgggaggctgaggtgggacaatcgcttgatctcagaagttggaaaccagcctgggcaacatagcgagacccccgtctctacaaaaaaaaaaaaaaaaacaaaacttaaaaaattagtcgggtgcagcggctcacgcctgtaatcccaacactttgggaagccacggagggggagctgcttgagcccaggaatcttagacctgcccgggcaacagtaagacctctgtccctacaaaacaaaactccacaccaaaaacaaacaaacaaaaaccctaaaattaagtgggcgtggtagcgcgcgtccgtagccccagctgctagggaggctaagacaggaacatcgcttgagcccgggaggtcgcagctgcagtgagttaggtcgtgaaattgcactccagcctgggctacagaccctgtttcttttcttttcttttttgagacagactctcgctctgtcgcccaggctggagggctgcagtgcagaggcgcgatctcggctcactgcaacctccgcctcccgggttcaagcaattctcctgcctcagcttcccgagtagctgggactacaggcgcgcgccaccacgcccggctaattttttgtatctttagtagagacagggtttcaccatgctggccaggctagtctcgaactcctgacctcgtgatccgcccgcctcggcctcccagaatgctgggattaaggcgtgagccaccgcgcccggcccagaccttgtttctaagaaacaaaaaataaaggctgcgtccgctaggccaagggaggcgcaaggtagttgcagagggcgaagcccacgaagcggaggatttctcggagccaagtccgttttcgggggacggggatcccagactcctgcgtccccaggtgccccgcttctggaaacgcatctggggtcaagcgcaggacgaggcgaaagcccaaagtcctacgcccgccgcgcgccgtctggctctgcccagggaagcacagggcggaaggagccctttcgccggcgcgcagacgcgcgaccagcccagccaatcagcgcgctccctctgccggcccgaccggcgctctggtgacgcgcgacgtctgccttcgcccacggctcttgggcgacgacccctcccacactcgccgtgcttgttagctgcgcgccgcgcttcttgtgcgacggcccctgggcggcggcgcgttcgggcgcggccctggcgcgccccccggcggcccggaggggcgcggcgggcgcggcgctgacccggaggcggcggcggcggtgcccggatggaggcacgtcattgtcccccgccgggcggctgggctgtgtgcggcggcggcggcggcggccgagggggatggagcgagcgccgagccgggtcaggtaagctcccgcctccttcccgcccgccgcaggccggcatggggcccgcgcagcggcccgctcgcctgggccgccgctggctcggccgcccctcagccggcgcggcccgccgggggctggtgcggcccctcgcccgcctccc

SEQ ID NO: 37673 - DNA, 2300 bp, Homo sapien
gtcatcttctcaaatcttcggcttcataccttgttctcgtttacgtggactgtttgctcatggccttacctcaactgcagactgcaatgttggcagcgtttttgtgggaccctcgtgatgttgtgctcacagcgcagcctggggctgaacagtgcgctgagagttcgcaacatataagaatcctgcagccgcagttcaggcttatcagattgcgtttctggaagctgtacatccagagaagggtgcaggcctggtgagtctgggaggggtgtctggtgcggcccttgcagctgtgactccatttctttcagtccatcagtctctggcgagagccggagaggttcctattaattcccacagccgtgggagcctggcatagccccgtagagggcctgatggaggcacaggatgggcgggaatacaggcaggtcctgtggcctgaggagctgccctgaggatgttagcttttgtcctgaggggcacggcaagcctgtgtggggcagaggcatgcgggctgactcgagacgcatcactgctgtggggtgggcaggtgcatgctttgctggtgaatgtggggcagagagggagtgaggggtggaggaggggtggttgtgttgagtctgaaggctgctggtgcaggcctggcggagaagaaggggcctggtagagagtggggccagacgtggctggaatcctgggaagagagagcagaggaaggaccctggggagctgccctgtgtgagggacgtgcagaggaagaggagccccgcggggccaggctgcatcctcccccgatggctggtgggatcagtattttaaaaagcccagagacttaattggagcctcaaggtctaactcggtcttgatccttgtgctaaatccacggcagcatcagacgttgctgaatagctggtgcgggaggctgcagctggccatggggactgcagcccctgcctccggggctcactcctgggcgggcagacggtggctaaggcagacaggtagcaggggtggtgccacgcagccaaggaacgcaaggaagggaagcagtgagcgggggcggggcgggttgttgggctgggggttccaattacaggcagggcagccagggagacctcagccagaggggatgcctgagggtgggagtgtctgctgggcctggtctctgaggcaggcatgtgtctgcccagcaaggcagcagcagcttctgaccgcagcgcccagtgctgtaggtggggctttggataccgtcctgtgggctatggctctgccttatgtgtgggagttctgaaaggaggaccggctggtggcagctcgggacaggcagggctctggtgatcacctggcagcagcaggagatggtggcaatggggacagagaagtgccaggatcctggatatttactttttaggcagagacaaccggcctcgctgctgaattggttgtagttacaaaaagatgagccatcagtaagcgtgtctcgagttatggaacggaaggagactgtcctgggtcttctcctttctgtctctgcgcccccaagcccctgccagagctgtaccccaggctcgggaggaaaacgtccttcctgagctgggcagaagccgcccttggccgtgaggcggtgttggttctgatgcggcttcccatggctttggtgtctccacaggcagttcttatggagcttcaggctgcccggggaggcgcagaagattgatcgcatgatggaggctttcgcttctcgctactgcctgtgcaaccccggggtcttccagtccacaggtcagtgcagagcccacagcctggccccttgccaggcacagcctccagctctggagggggcggcccctgtgggcacagcccagcgtgtgttcctggggacctgccttccctgagcgaggacgacctgtgggccgggcacctcttgcaggcgggcccccagcacgcggggtcccactgtccactggaggttctggctgagcccagcaccccggactcgttgcagacacgtgctacgtgctgtcattcgccatcatcatgctcaacaccagcctccacaaccacaacgtgcgtgacaagcccacggcagaacggttcatcgccatgaaccgcggcatcaacgagggcggggacctccctgaggagctgctgagggtgagctccccggcccgcggccgctgccgtctgcaggatctcttcgctgtgagcggccgcagcgcccgcggctctagacacgcctcccaagcctccttgccgccctggtcccgctgagctttctgcccggccagccattttcctcc

SEQ ID NO: 37674 - DNA, 2300 bp, Homo sapien
aagcacagaaatgacacccaaagcctttatcccccccaacatttttgcagaatttgttgaaatgcaagcccaggctaaaccatggggataatgtaatatcctccttatataactgggctgtgctttagtctgatgaaaattagattagatggagatcagagaagccactttcagattaaaactctgagaaaagcacctgtggatcacattctaagacacctaaagaattaagattgacatgaaaaagcatttataattgatagtatctttgagttcaaagctctgcatatctcattatcaagttcaaagtaatgctgtcattttttctcagtaacgatgctcttatctccaagatgacaaagctgacgggaacaagatcaggaagccgagtctgggggttgggagttgaaccctacatctcctgactcccagaccccttttctggtgcctctttgtcactcaagctgtcaaacacctttgcacgcagcagtgtcccttggctgggtgtggtggctcatgcctgtaatcccagcacttcgggaggtcaaggtgggaggatcgcttgagtccagaagtttgagacaagcatgggcaaacatggcaagatctcgtctctaaaaaagaatacaaaaattaaccgatgcatggtggcatgtacctatggtcccagctatttgggaggctgaagtgtgaggatcactcgagacactgcatgccagactgggcaatagagcgagaccctgtctcaaaaaaaaagtgtccctcgtgggtttggttgcatgagaatgcttggtgttcaattcttgaggttattagaagattgaactttgaaatcatcccgcaaccttgaaccaaaaggtgaaattgtccactttgatagatgacaacggaaggatcctttggttcaatggacagcttgtaaatataaaacagttgctggaaaattatattagagatgagctatctcctccattacaatgtttgcttttctttaatgcgattgagttccaacagaaaggcttgggaggggccacaagcaatgcttcaggagttactggaagagagatatggggagtgagagaggagatccatcgatgtggagcaggggccaggggaggccttctgcccaggaggcctgtgctgaggaccctggctgtgcccaagggaaactgaattcagagctcctcctgcatcataaatccaggacagctggcagctctccaaggaagactggcgctaaactccaagggcatcagccgccagattggccaacccctacaatgccctttgagagctgagccccaggtgtgttgaatcgggattccgttccaacctcatgaccacattcatttacaagccctgcattttgttaatttaaaaatgcactcaccaggagggaaggaggagaggctccattaaatataagacagctgaaaggctggaattcttctgacatgcatgtcttaggaaggagaaggcctgaccttgttctttttttttttgagacagggtctcactctgtcacccagactggagtgcagtggtgcaataataactcactgcagcctctacctactgggctcaagtgacgtgacctcccacctcagcctccccagtagctggaactacaggcacatgccaccatgcctgggtcgctatgttatcggggctggtctccaacttttgttctccagcgatcctcccacctcagcctctcaaagtattggaatacaggtgtgagccaccgagcctggccaggcctgacttctgaatgcattcgtttcttgatcttttaccccgagtgcacgtgcaagttgcacccctggccactgggttttgcagagtgtggcgttccagtgtccggggccccacgcccgtccgcaggctactggaatgctgagggcgaggaggcttcgctccacgcacaccggatcggcctgcacttcaggggccaggtctacagccttccccagcgcagacgccgccggcccggccggttcccgagggcggggctgcgcggcctcacgccccgcccaccgcgggcagaggcggggcatgggtcacgtgacggcacgccgaccagcgaggccccgcccggcgggaggaggcccggccgcgacccgggccgcgcgctgaggagccgcccggtcgcctgcgcgctccctccggcggcgtccccagcccgcggcccctctgctgccggcccccggctcgccggctgcgggagtggcctcaagatggatgaagacggcggcggcgagggtggtggcggtgagtgtcggaggtgtggtgggctcgcc

SEQ ID NO: 37675 - DNA, 2300 bp, Homo sapien
aaaattaaccgggcgtggtggtgcatgcctgtaatcccagctactcagcaggctgaggcaggagaattgcttgaacccagtaggtggaggttgtggtgagccaagattgcatcatggcactccagcctgggcaacaagagtgaaactccgtcccccgaaaaaaaaaaaaaaattagccgagcatggtggcgcatatctgtagtcccagctattcagaaggctgtggcaggagaatggcttgagcgagggaggttcagggtgcagtgagctgtgatcatgccactgcactccagactgggcaaaatagcaagacctctcatcttgaaataaaatttttaaatgcctccctgccacaatggcatttagagacaataaaaatgagtaaccagggaggatatgtatgcatgtgtgtatgattctgggtgtgtgtgtgtgtgtgtgtctgtacatatacatatacctatctctctctttatatataatcacatgttacctcagcccatctggtctttccacatagttcaaataaacaggactgacaaacttccaccagtgaaaatctctacaagcctaagaataaatttagctgatcttcaagcctgtttacacattaccagattgattctgtgttttctggcaaatgttccactgaagactctaccctttaaaatgtttaaattatttgcctagatactgcataaagacattttcattctactttttatcaagaggatagcttgaaaaacaacaattctgcagcatgtgcactgcggtgctcaaggagggcatgcaatgtgcactgaaaggaaaaaatagcttccaaaaaaaggaagtgagctttttaatgtcaatgataaatgtggcaaaatataatgctgcaaaaataagggaaactaaaggtttttttttttttttttttttgagacaggttctcactctgttttccagactggagtacactggtgtgatcataccacattgcagccttgaactcctgggctcaaggattcctctcacctcagcctcccaagtagctgggaccacaggcgtgcaccaccatgcccggctagtttttttcactttttgtagagacaggattttgctatgttgcccaggctggtcttgaactcctgggctcaaaggatggacctgccttggcctcccaaatgctgggattacaggagtcgggcaccgcaactggcctattttatttgatttatttaaaaaatgctaatcccagcactttgggaggccgaggtgggcagatcacctgaggtcaggagttcgagaccagcctggccaaaatggtgaaaacccctgtctactaaaaatacaaaaattagctgggcatggtgacgtgcacctgtaatcccagctactcaggaggctgagcctggggaatcacttgaactcgggaggcggaggttgcaggaggcgagatcatgccattgcactccagcctgggcaacaagagcgaaactccatctcaaataaaaagaaaaaaaaagatttagtactgcaacctttttttttttttttttttttttgagacggagtcttgctctgtcgcccaggctggagtgcagtggctcgatctcggctcactgcaagctccgcctcctgagttcacgccattctcccgcctcagcctcccgagtagctgggactacaggcgcccgccactacgcctggctgatgttttgtatttttagtagagacggggtttcgccgtgttagccaggatggtctcgatctgctgacctcgtgatccgcccgcctcggcctcccaaagtgctgggattacaggcatgagccaccgcgcttggcctactgcaaccatttttaaatgtatagttcagcggcgttaaatacattcactttgtctgcaaccgtcgctaccgtccatcgcctccctttgtcttcattttcagactcaccagtagggggcggacggagacagcgcatcagcctcgacccccacgcctcctctcccgcgcatgcgcgtcttacctgccaaaaagaaaggtggcaagggcgtgtccaggggcggggcctgtgggccgcgcaggcgcgtggctggctttgtgacgtcaggctgcgcggccaggctggtacaggcggctgctcgcggaggcacttctccgagcgtgacgtgcggactccgctccactgcggcccgcccgcccgccggtctagccgccgcctccttcgctccctgagcacgccaggcgagggtcagctgccggggcgacgcggcgcggagagggcgggcgggggggctgtgggagcgccggtctcta

SEQ ID NO: 37676 - DNA, 2300 bp, Homo sapien
ggcaacatggggaaactccatttctaccaaaaatagaaaaattagccaggtatggtggcacctgcctgtagtcccagcaacttgggaggctgaggtgggaggatcgctagagcccaggagttcgggaccagactgggcgacatagtgagatcctgcctctattttataaaaaagaaaaaaaagtcacaccgactctgtatgatttcttgattttgcttacaaaacgttcattatgcatatcaaaagataactaagaggaaatataccaaaatatttgcactttcaccgtctaatggccattatctccagaacctggtacaaagcacgaggcatagcactaaatacattaaaaacaagtaacagaaaatgcatatgcgacagaggagaacatgcaacactttttttttttttttttttttttttgctgtgtcgcccaggctggagtgcagtggccagatttcggctcaatgccacctccacctccccggtacaagcgattctcgtgcctcagcctcccgggtagctgggactacaggcatccacctccatgtccggttaattttttgtatttttagtagaaatggggattcgccatgttggccaggctgatctagaactcctgacctcaggtgatccacccaccttggcttcacaacgtgctgggattacaggtgtgagccaccacacctggccggcaacacattttttttggctgaatggacatggttattgctgagtaaacgtatggtgtatgattttattcttccttatagttttagattccgaattttctaaaaggacctaatgtcattgcagatagttatcacataaagataatgaaacagggggagtcaatgccctccaatggcctcaagcaggagttagtgacaaggaacatggctcctgcaaccacaggttcctttttttttttttttttaagacggagtctcactctgtctcctaggctggagtgcagtggcgcaatctcagctcactgcaacctccgtgtcctcggttcaagcgagtctcctgtctcagccgccctagtagctgggattacaggcgcctgccaccacatccagctaacttttgtatttttttagtagagatggggtttcaccatgttggtgaggctggtctcaaactcctgaacttgtgatccacccacctgggccgcccaaccaaagtgctgggatgacagacgtgagccactgcgcccagccaccacaggttcctcttttttttttttttttttgagacggggtctcgctctgactccaggctggagtgcagtggcgccatctgggctcactgaaaccaccgcctcccaggttcaagagattctcctgcctcaggctcctgagtagctggaactacaggcgcgcgcctccacgccctgctaatctaatttttgtatttttagtagagacggggtttcaccatgttggccaggatggtctcgatctcttgaccttgtgatccgccctcctcggcctcccaaagtgctgggtttacaggcttgagccaccgcgccctgtctgacaggttcctcgtttttgtttttgtttttttttttgagacggagtttcgctcttgtcgcccaggctggagtgcaatagcaggatctcggctcactgcaaccactgcctcccgggttgaagtgattcacctgcctcagcctcctgagtagctgggattacaggcgcccaccaccacgccccgttaattttttgtatttttattagagacagtgtttcaccatgttggccaggctggtcttgaactcgtgacctcaggtgatccgcccgcctcagcctcccaaagtgttgggattacggacgtgagccaccgcgccgagctgacaggttcctcttaaagccctgagtcccagggaagggacctgcaggcccggccacgcccaggccgctttagcgcgccaagatggcggctgccacgccccgcggccggagccgagtgggcccgagcgcttccgagcattcccgaagtccagagaaactccgggagcggcgcgggcgggagcggcgcgggcgggagcggccccgcccggaacctgggagcggcggcgccggcgcgggggaggggaggccggatgtgagtggagcggccatttcctgtttctctgcagttttcctcagctttgggtggtggccgctgccgggcatcggcttccagtccgcggagggcgaggcggcgtggacagcggccccggcacccagcgccccgccgcccgcaagccgcgcgcccgtccgccgcgccccgagcccgccgcttcctatctc

SEQ ID NO: 37677 - DNA, 2300 bp, Homo sapien
gggattgcaggcgtgagccaccacgcctggccctttgctgtcttttttgtatgccagttcacaaaagactccagtttgcccattactgtgtgaggaaaggaggaactgtaagccttagtacagagatgccccagaaacccgtcaggggccagggggcttggcctgggtggatctgctcaggcaaaggctttatgtgaccacaagctgaggatccgcggcttggctggcagctgaggcccccaagtgctgggttcatattttagtgacagttcatcccttgggtcgggaaggctgccgctcagggcctgtcctgtcctcttggcttcatttgtgccaaatcacgctgagtttggctctgacgctgtccacggtaattggactccaaacctgtgtggccgaaagggctttggcatttgttgttggatgtgcgccggggaggctcgccagcagcagcttagtccacgtcctgctgggctctgcctgcccagcaccagccacagggtaggtgcccagtgagtgtggcctggagttgactgcatcccgccgtcgcaggagagagaaagggcatctggtaatttgttaagaagtgctgtcagggccgggtgcagtggctcacacctgtaatcccagcactttgaggtcaggagtttgagaccagcctggccaacacggtaaaaccccatctctactgaaaatacaaaaattagccgggtgtggtggtgagtgcctgtaattccagctactcaggtggctgaggcaggagaatcgcttgaacctgagactccgtctcaaaaaaaaaaaaaaaaaaaaggaagtgccatctgaatgcacacagagtgttgaagcctttttaaaaattttcttatatgatggctgggttcagcattctacttgtagaattatttaattcttagaaacttgtagttgcagccaggtgcggtggctcacgcctgtaatcccagcactttgggaggccgaggcgggtggatcacgaggtcaggagatggagaccatcctggctaacacggtgaaaccccgtctctactaaaaatacaaaaaattagccgggcgtggtggcgggcgcctgtagtcccagctagtcaggaggctgaggcaggagaatggcgtgaacccgggaggtggagcttgcagtgagccgagatcgagccactgaactccagcctgggcgacaaagcgagactctgtctcaaaaaaaaaaaacaaaaaaagaaacttgtagttggattagagatgatcaaaaaccatctcccatcttctgtgggatttcctccaccccgtcctattagaatcgaagctgcacgggacaggggccaggcccgcttttctccgagcccagcacaggagcacactgaggaagcattttgaagatatttttgattgacagggtcatttcttccctggcactgcttttcttttttaaaaatttttttagggcttaactgcgtgtagggaatggctttattttttttcttttatttattatttttatgatgattatttttcagaaagagtctcactgtgccacccaggctggagtgcagtggtgcaatcatagttcactgtaaccttgaactcctgggctcaagtgatcctcctgcctcagcctcccaaagtgttggaattacaggcatgagccacctgcttaattttcaagaagcctgtttcagaggacagatgtatatgttagaaaattttaaatttttgctgggcacagtggctcacacctgtaatcccagcactttgggaggctgaggcgggtggatcacgaggtcaggagttcgagactagcctggccaacatggtgaaaccctgtctctactaaaaatacaaaaattagctgggtgtgatggcgcatgcctgtaatcccagttactcaggaggctgaggcaggagaattgcttgaacccaggaggcagaggttgcagtgagccgagatcgccccattgcactccatcctgggcaacagagcgagactgtcattcattcattcattcattcataaataaataaataaaattttatttactttttgaagttaaagccaaacctgaccaccctaaaactcacttctgatggtttagttttacctttgcaggaacagtggatgcttatcagtgtctttgattcagaacttcgtggattctgtagttgttttagagaaatggggtcttgctatgtggcccaggctggtctcaacctcatgcgttcaagtgatcctcctgcctcagcctcccaaatagctcagattgtaggtgtgagccacttggcacagcggtaga

SEQ ID NO: 37678 - DNA, 2300 bp, Homo sapien
tttttgtaattttaatagagacaggttttcgctgtgttggccaggctggtcgaactcctgacctcaggtgatccactcgccttggcctcccaaagtggttggattacaggcatgagccaccgcacctggccaaaattgtgatttttctaaattcatcatttcttctacattaattgtcattctcctataaaaaagagctttttatccctacatcttactgtcaatatggatttatagattcttaaattattcagtgggttgtaattatgactgtttattttgtattaagtacagtgtttatttgatgctcaaaatgttccagattttgtcctgcagactggctccagtgttcttttcatatgaccccatcatgttctgagcacttcctaacctctggattttgctttttctttttttgggactgttgcccaggctagagtatagtggtatcatcacggcttactgtaacaccataccctcaacctcctgggctcaagtgattcacctgcctcggtctcccaaagtcctgggattacaggtgtaagccaccacgcctatgtatttattttaaagatcatgagattttactaatatcttttttttgtttgtcttttaagagacggggttctctcacctcagcctcccaagtagctgggactacaggcatgcactgccagacccagataatttttaaaaatgttttaaattaataaatttctttttagagacagttttgctttgtggcccaggctggtctccaacacttgagcgatcctcccgcctcagcctcccaaagtgctggcatcatgggtgtcagtctcctggccctgatatcttttaattctagtccaaagccacagagtttctctttgcttctccacatcatgtctgcaaagagaagcttggctcccagcaacatcagcgtgagttacccatgctcagtcccctattactaagaaaatagtttcagaattgctatacccagttccactacaaaaagggcatctgctaagtacagtttgcgatgtgtttgtagtttttttagtttttatttttatttattttaatttaatttaattgtattttttgagacggagtctcactctgtcacctaggctggagtgcagtggcgcgatctcagttcactgcaacctctgcctcccagttgcaagcaagtctcctgcctcagcgtcccgagtagctgggattacaggcgcctgccaccacacctggctgagttttgtatttttagtagaggtggggttccagcacgttggccagactggtctcgaactcctgacttcaggtgatccacctgcctcgatctcccagagtgccggattacaggcatcagccaccacgcccggcctctttttgttttttaaacgtagagcacagtactcaaaagttacttctatgatttcttgtttattttctacggagttggctgtgctgttcatttggacaggtttgctttacctgcttctgttggcattcagttttagggacttgcccatccttgttgatgaattttttgaatatagaaatcattaacatgatgccagaagtcagaactctatccaagaagtgtacacagagaggtattatctttaataagccattccgggcccagtgcagtggctcacgcttataatcccagcactttgggaggccaagacgggcagttcgcctgaggtcaggagtttaaaaccatcctggccaacatggcgaaactctatctgtactgaaaatacaaaaactagccgggcatggaggtgcacgcatgtaatcccagctactcaggaggctgaggcaggggaatcgcctgaacctgggaggcggaggttgcggtgacctgagattgtaccacggtactccagcctgggtgacagagtgaggctccatctcaatcagtcagtcgatcaaattaagttttaaaaagccattccatgtcagccaggctaagtcctgagaattgtccgctctggtcctcgcgtctctgggaacatgtggcagtgaggatggacgttccttgccaagtggctctgttcggcatagtaacgtctttgtcctctttttagctgcagaagcagaaccacagactatgacttggtcggaggcgatcagctcaactgtcacttcggctccatcctgcacaccacagggctgcagtacagggacttcatccacgtcagcttccatgacaaggtgtggacgctgcagacagcggctcttcacttcttttgggtcctggagctgttagagattctgatggaagttatgaattattcttcccgtaa

SEQ ID NO: 37679 - DNA, 2300 bp, Homo sapien
gttcaacacgcaagcccctgaccaactcacagccaagactttccatccagtaacagaaaacctgcaggggggctattcctggcagaggaaacacagaatgtagaacccctggagcaaaaatgaccctgatgtcttttcagagggggaaaaggcggcaggcagtggggtgggtgatagaggcaaatagtaaccagggagacagataaatgagcccttacaaacttttgatgtgtgactaccagggaaaggcctttgccaggggctggagtgtaattttttttttttttttgagacggagtcttgctctgttgccaggctagagtgcagggcgcgatcttggctcactgcaacctctgcctcccaggttcaagcgattcccctgcctcagcctcccaagtagccaggactacaggtgcgtgccaccacacttggctaactttttttttaaattttagtagagacgaggtttcaccatgttggctaagatggtctcgatctcctcctgacctcgtgattcgcccaccttagcctcccaaagtgttgggattacaggcgtgaggcaccgcgcctggcctgcaatgtaattttatgcacaaagtgcagccttgcaaagtcccaggcagggtgcaggctttatctgaaggttcacaaagtcaccctggctgctgaagagggcacagcagaatgagaaagcacagtggggtgatgagcccaggcaggagatgaaggtggctcagaccagggtggggcagtgggggtactgaaaagcgctcagactccaccccgccagctgcagggtggtttcagaccctgaactcgaggggttcctaacacgggctccttacagcaaggggcacagatggaagcaatgttgtcccatgcttgcaagtctcacagaacgggatatgagtcccacacctgccattgacagcctgggtctctaggctagctaattcctccaggcctgaagcgtccctccttataaaatgaaaatttcggtcaggtgtagtggctcacgcctgtaataccagcactttgggaggctgcggcgggaggatggtttgaggccaggagttcaagaccggcctgggcaacagagtgagactccggtctctacaaaaaataggaaaatttatggagaaaccccatctctactaaaaatacaaaattagctgggcatggtgacacatgcctgtaatcccagctactcaggaggctgaggcaggagaatcgcttgaacccaggagatggaggttgtggtgaaccaagatcgcgccattgcactccagcctggggcaacaagagcaaaactatgtctctaaataaataaataaataaataaataaataaataaaaataaattagccgggagtgtggcacgtgcctttggtctcagctactcaggaggttgaggtgggagagtcgctggaatccaggaattcaaggcggcattcaggagttcaaggctgcagtgagtcatgattgcgccactgcactccaccctgaacgacagagccatacgctgccttaaacaaacagacaaacagggccgggcgcagtggttcacgcctgtaatcctagcactttgagaggcccaggcgggcggatcacttgaggtcaggggttcgagaccagcctggccaacatggtgaaacttcgtctctactaaaaatacaaaaattagccgtggtggcgcgctcctgtaatcacagctacaccggagcctgagacaggtgaatcgcttgagcccgggaggcggaggatgcagtgagccgagatcacacccactgcactccagcctgggaacagagcgagactccgtcaccaaaaaaaaaaaaaaaaaaaaaaaaaaaaaaaaaaaaaaaaggaaaaggaaatatcaccagaacggatatcactgcactcttcacgaaaaagaaaaagaaaataccagaacggatttcaccgaccggcagacctgcaatcgactcagccagcgccttccggatcagcgtttctgcgcaggcgcagacagctccggcggaagaggcggtgtagggctcagtgcgcttgcgccgatctcggcctcagcgtgagcatgcgcaggtccccgccctcgctgcgtttgcgcttgagcgccgataatttggtggcggcgtccggagggtgctggtttgttctcggtgaacggcgcgcggggtctctcctgagtgcgagctacgggaccttcgccatgccggggatggtactcttcggccggcgctgggccatcgccagcgacgacttggtcttcccagggttcttcgagctggtcgtgcgag

SEQ ID NO: 37680 - DNA, 2300 bp, Homo sapien
aggtgtgtgagcaagaatcctctctccccctcaggatgcccaggtttcagaggaatccatgcttgcttggttgtagtttctaagcacgatgtcctgaaagtctggcgtgagacccgaggtgctcgtgtctttttactttaacttctgtgtgctggtgagaggagagaagcagctgttcttctccaggtgctgctaaggccttagtggaaataacgcccatcaagtttttattaatgttgagctggccacagtctaggtcctggtgagaggcctctctgctgtgagccttggctagatgcgctgagggggctcagtgcatgtgtagatggatgtgtgtcttgtttatgcatgtagattttgttttgtatttattcacatacatggtgaggagatcgagaccatcctggccaacatggtgaaaccccatctctactaaaaattagctgggtgtggcggcatgcgcctgtaatctcagctactggggaggctgaggcaggagaattgcttgaacccgggaagcggaggttgcagtgagccgagattgctccactgcactccagcctggtgacagagcaaggctccgtttcaaaaaaaaaaaaaaagttaaacttacacttaacatatgacccagcagtcccacccctaagtacatacccaagagaagtgaaaacttacattcacacaaacacttgtacgcaaatgttcacagcagctttatccactgtcctcccaaattagaaaccacctgtccttcaactggtgagtgaataaacaaactggtgcatccatacaatggaccaccaatggacgcagctataaaaaggaacaaattattaacactaggccctcacttaatgtcattggtaggttcttgaagtgaaacaacacacactgcaacttgaagtgaaacaacatacactgaagccagttttaccataggctaattgacatgagtaagagttaagttcctacagcatatttccggtccccaaaacaccaccagacttttaaataaagacccaaaacaggccgggtgctgtggctcacgcctgtaatcccagcactttgggaagccgaggcaggcagatcacctgaggtcaagagttcgagaccagcctgaccaacatggaaaccccgtctctactacaaatataaaaattagctgggcatggtggcaggcgcttgtaatcccagctacttgggaggttgaggcaggagaatcgcttgaacctgggaggcggaggttgcagtgagccgagattgtgccactgcactccagcctgggcgacagagcgagactccatctcaaaaaaaaaaaaaaaaaaaaaaaccgaaacaaatgtgagctatacatttatttatttatttatttatttattttttattttttttgagacagagtcagtctgtcacccaggctggagtgcagtggcgagatctcggcacactgcaagctccgcctcctgggttcacaccattctcctgcctcagcctcctgagtagctggaactataggcacccgccaccacgcccggctaattttttgtattttttttagtagagatagggtttcaccatgttagccaggatggtctcgatctcctgacctcatgatccgcctgcctcggcctcccagagtgctaggattacaggcgtgagccaccatgcccagccaacatgagctatacatttaagaaagattaataaaagcaacataattatttatccagtttttggtgaatccgtgcatgatggtggtcatagtggtggcggattaaatcaagaagtatatgtttacaaacaaaaattataaggagtacctcctactaccataaagttcaaaaacaaacaataacaaatatagcaggctcactgagtgcttttgtactacattgtttattgtggtacatatgtataattattgtatactactttatgaattattttaccatagtttgtattcattttccaacccacttacttcatttcagggtcccaggtggccagagcctatcccagcagctcaggttcaaggcgcgaactttcccccaactgcataggatgccattccatcacagggcgcgctcacccacacccactcacactaggacagttcacacatgccagttcacctaactggcatcgttgagatgtaagaggaaaccagagtatctctggtgggagattctccaagagtatctcttggagaagacccacgtggactcggggagagcatgcaaacgccatggatggcggccccagccgggaaccagtttcttttctcatcagtgttacaacca

SEQ ID NO: 37681 - DNA, 2300 bp, Homo sapien
ggttcaagcaattctcctgcttcagcctcctgagtagctgggactacatgcgcgcgccaccatgcccagctaatttttgtatttttagtagagatggagtttcaccatgttggccaggatggtcgggatgtttttgttttttttttttttcttttgagacggagtctcgctttgtagcccaggctggagtgcagtggcacgatgtcggctcactgcaagctccgcctcccgggttcacgccattctcctgcctcagccttaggagtagctgggactacaggcgtccgccacaacgcccggctaattttttttgtatttttagtggagacggggtttcaccgtgctagccaggatggtctcgatttcctgacctcgtgatctacccgcctcagcctcccaaagtgctgggattacaggtgtgagccaccgcgcccagctgttctggatctcttaacctgttgatccgcgagccttgacctgccaaaagtgccgggattacaggcgtgagccaaggcagctggccagctttttttttttttttttttttttttttttttgagacagggtctcactctgttgcctaggctggagtgcagtggtggaatctccgctcaatgcaacctttggcccctgggcccaagcaatcctcccacttcagcctcctgagtagctgggagcacaggtgcgcatcaccatgcctggctatttttctttctttttttctttttttttttttttttgtatttttagcagagacagggtcttgccatattgcccaggctggttttgaactcctgagcttaagcgatcctccctcctcggcctccgaaagtgttgggactacaggcatgagccaccgcaccaggtcctcgcccccgccctgctttttgaactgcgaactgtgcgtttttgttttgcactccgtcccgcaaattatgtagcagatcctgtttgtcagctttttttgtttgcaatttcttgtgacgtccccatcccgtagaaatattcaagtttcttttttttcttttttttttttttttttttttttgagatggagtcttgctctgtcgccaggctggagtgcagtggcaccatctcagctcactgcaaccttctcctcccaggttcaagcgattctccctgcctcagcctcccgagtagctgggattacaggtgcgtgccaccacgcccggctaatttttgtattttcagtagagacggggtttcaccacgttggccagcatgctgtcgatctcttgacctcgtgatcctcccgtctcgtactccttaagtgctgggattacagggatgagccaccgcgcccggtcagacgttcacttttctacctaattttggattctctttcttaaagacagtccccagaatggtaaaatcttcagacccctacataaactgcatcttccacctccaccttcaatgttgaccttatcttgagtgaggcaatcagaaatcaatttttttcctcttgtacttttttttgttttgttttgttttgttttgtttgagacagggtctcactcagtcgtccaggctggaatacagtggtacaatcatggttcaccgcagcctcgatgtcctgggctcaagcaatcctcctgccttagcctttaaaatagctggtactacaggcacccaccatcaggcctggctaattttttaaaaaatttttgtagagacggggggtggaggaactctcattaggttgcccaggctggtctcgaactcctaggctcaaaggatcctcctgtttcggcctctcaaactgctagaatttcaggcatgagccaccgcacccggccttctcttacactttttcatacaataggcctgtagagctcttttgatatgtgggaggaaagaaaagatccccagggagtgttatttcaaaaaagtaaaggaaactgctggcacccgaggagaagccggaaacccggcagggaaaatttggcagagtccggggtcttcttgcaagggagtccctgcgagctgacctgctgagcctgcgctggggcgcgccccctttaaggggcggggcctggccccgctctcccagggtgccccgcgcgcgcgcgcgccggcagttcggccacgtccctggccacgtcgcgggcgatctcgccatcttcgccgcttcctctcaggggccgccgcctcctgagccgcccagccccggggccgccgcgctgcgccgaccgccaccgccgccgccgccatgaacattttccggctgactggggacctgtcccacctggcggccatcgtcatcctgctgctgaaga

SEQ ID NO: 37682 - DNA, 2300 bp, Homo sapien
cacacacacacacacacacacacacacacacacacacacacacacacacgtatcagcactctaagggccacagatgctgggggtttcaacataaaacccttacttcttttctctcttcctgttccgtctattcgtttgctagggctgctatgataaaaataccatagattgggcagcttaaacgaaaaaatgtgttttcccacagttttgggggctggaagtccaagatcaaagtgtcagcaggttgggtctctcctgaggctgttctccttggcttgcagacaagctttctccctgtgtcctcactcggtcttttctccccggcatttcttccttctccttctctgtctccgtctccctctccatctccgtctctgtctcctcctcctcctccttcctccctcctcctccttcctcctctatcctccttctttctttcttcttcttcttcttttttttttaagatggagtcttgctctgtcacccaggctggagtgcagtggcgcgatctcagcttactgcaacctccacctcctgggttcaagtgattctcctgcctcagcctcccaagtagctgggattacaggcacacactgccaaacctggctaatttttgtatttttagtacagacagggtttcactatgttggccaggctggtgtcaaacgcctgacctcaggcctgcctctgcctcccaaaatgctgggattacaggtgtgagccactgcactctgcctcttctttttttcataaagacaaggtcttgctctatcacccaggctggagtgcagtggtacaatcatggctcatgcagtaaacaccaagtaatgcagacatatggaggattgctcgtgggttcaagcaatcctcccacttcagcctgctgagtagctgggaccacaggcatgtaacaccatgcttggctaatttttttttaattttgtagatatggggtcttgctatgttgtccaggcttctgcctcttcgattaaggaaaccagtcctattggattaagccccctccccatgtggcctcatttaaccttaattacctttctccaaatacactcacattctgagatactgggcgttaggacttccacatacgaatttggtggtggagggagagcgatacaattcagtccataacaccctcctttcaggtgccaaagatataatagtccttagtctcaaggaggcctcaaagatttttgtatgagttgatgatgcttcacagagaaaagattctatcaagcagaggctgcactgaggctcatgcctgtaatcccagtactttgggaggtcaaggagggtggatcactggaggtcaggagtttgagaccagcctggccaacacaaagaaaccctgtctctactaaaaatagaaaaaattagccaggcgtggtggtgggggactgtaatcccagctactcaggaggctgaggcaggataattgcttgaacccgggaggcagaggttagaatgagctgagctcgtgcagttgcactcaagcctgggcgacagaataagattccatctcaaaaaaaagaaaaaaaaagattctatcagacaggattctcccaccccatgcctcttctacaaagttgtatgcatcggctcccatcctcatcacagggcatccaggcctccctccccactcctccaattcagagtgaattccctgtctatgctgggcacctgccttcccaagctctcactccatcagtgaccacaaatcactatcaactagctctttccccttcactggtaaataaacccttcccaccgctgtccacgcagcatgctggacagttctagacctcggcggctgctaccctctccttccccttttcttttcttttttttaattgagatggagtcttgctctgtcgcccagactggagtgcagtggtgcgatctcgacccactgcctcggcttcccaaagtgctgggattacaggtatgagccaccgcacctggcttacccaggttcttaagagatagttttactgggtgctatggtttggatgtttgtaccatccaaacctcatgttgaaatttgattccaccttttccaactggggctttgcaggatggcttctgcaaagaagggtggcgagaagaaaggtcgttccgccattagtgaggcggttaccccagaatacaccagcgcatgggtggagtgggcttcaagaagtgcccctcgggcacacagagagatccagaaattcgccatgaaggagatggggactccaaatttgcacattgatgtgaggctcaacaaagctctctgggccaaa

SEQ ID NO: 37683 - DNA, 2300 bp, Homo sapien
tcccatttccaaagtatagcatccatcattcccttggggacaagagatcgtggtgtaaagctggttgatcctgtcaactgatctcacagcaggtaaaaaactgatactgcaggtccagtttcaggagctgacaggagcgtttagcaacactccaaagaggaattctttgctccatgcatcacaagcaaggcaatccttttgatcacacttgaatttttggttttaagcttaagtagtctgttttctcttatgctatttataaaatgcaggtgtcaaggtttgcgcttggatgttttaaagaggcaaaaaatcaaacatgcctaggtttcaggaactgaccaagtgctgagagattaatctttttttttttttttttctgaaccagggtcttgttttgtggtccaggctggaatgcagtggtgtgatcctaacgcactgcagccttgacctcctgggctcaaacaatcctcccacctcagcttcctaagtagctgggaccacatgtgcatgccagcacacccggctaatttttaaattttttgtagagacaaggtctccatatgttgcccagactgttcccaaactcctgggctcaagcgatcctcccacctcggcctcctgaagtgctggaattataggtatgagccttggtttttcaattctgggtccataaatttatgaagaccttggatacaatgtacacaggagaaggcatcctgttggtaaggagtttcataaaaaggaaaagaaaacgcatcaagaagctgacgtaggtagcaaagagacaggaaaagagaagagctttaaggccagtgtttggagatcagacatttcccctcaaaggaggacaggcctggctcaggtcttcagaggcatcaggaatagaccctggcctcagctgattcagagatggtcagagcaaaggacaccccacagggccttctcagggctatgtttggaagcagctcttgttaccccaagcctgcctagcatcaaacacccttcccttttatcctcaacgtttgtggtcaagtatttgtcactgccccgaggatatttagggctgtacagagcaacatgtccttgtcatcaggagcaaggacacacatggagcggaatctgactgatgggtacacattgtgctttctgcccgcttctgcaacggaagatgctggaaatgttctgctagatctcaacagtgtgggtggctgaaagcaaactctgtccaccacacagacatagtctgagagccccctaagtgtgactgccctgggccacctggatccccctgctgggctctgagcagggacatgactggtctctgtgcaggccgcagggcagcttagtccctgtcacagccccagaatgatcgcccccaccaggcccaggtcggtcctcctgtaagtctcctggcaatactgctctaaaatcccacttccagcccagtgcagggactcacgcctgtaatctcaacactctgggaggccgaggtgggaggatcacttgagcccgggagttcgagatcagcttgggcaacatagtgagacacccgtctctacaaaaaaaaaaaaaaaaaaaaaaaaattaggcgggtgtggtggcatgcacctgtggtcccagctacttgggaggctgaggcaggaggcattgcttgagcccaggagttggaggttgtagtgtgctaggatagcgccattgcactccggcttgggcgacagagcgaggctgtttctgaatgaatgaacgaatacataagtaaataagaaaataggtaatacataaaataaaataaataaaataaaataaaataaaataaaataaaataaaataaaataaataaaataaaataaataaaataaaataaataaaataaaataaataaaataaaataaataaaataaaataaaataaaataaaataaaataaaataaaataaaataaaataaaataaaatcgcacttcccagcggttacacccggccacggaggtccccaggctggctgcgagggcgccggggaggtcactgttactccagccccgcaacccgcggcggccctcgcacacttccgccggaagtcagcccctcaggggcgccgtgctgatgtcacgagcccgcaggaagtctcgtatcgcgcccgggaggcgccggagcccagcggctggcggtaaggccgcctccgcggggctgtgggaagcttgggctgtcccaggaccgtcagtctcctcctctgaccctccctttccccttgtgtgtagggccgccgtcccacccccacctcgcccgagtccggggcggcccc

SEQ ID NO: 37684 - DNA, 2300 bp, Homo sapien
atgtccttgtcatcaggagcaaggacacacatggagcggaatctgactgatgggtacacattgtgctttctgcccgcttctgcaacggaagatgctggaaatgttctgctagatctcaacagtgtgggtggctgaaagcaaactctgtccaccacacagacatagtctgagagccccctaagtgtgactgccctgggccacctggatccccctgctgggctctgagcagggacatgactggtctctgtgcaggccgcagggcagcttagtccctgtcacagccccagaatgatcgcccccaccaggcccaggtcggtcctcctgtaagtctcctggcaatactgctctaaaatcccacttccagcccagtgcagggactcacgcctgtaatctcaacactctgggaggccgaggtgggaggatcacttgagcccgggagttcgagatcagcttgggcaacatagtgagacacccgtctctacaaaaaaaaaaaaaaaaaaaaaaaaattaggcgggtgtggtggcatgcacctgtggtcccagctacttgggaggctgaggcaggaggcattgcttgagcccaggagttggaggttgtagtgtgctaggatagcgccattgcactccggcttgggcgacagagcgaggctgtttctgaatgaatgaacgaatacataagtaaataagaaaataggtaatacataaaataaaataaataaaataaaataaaataaaataaaataaaataaaataaaataaataaaataaaataaataaaataaaataaataaaataaaataaataaaataaaataaataaaataaaataaaataaaataaaataaaataaaataaaataaaataaaataaaataaaatcgcacttcccagcggttacacccggccacggaggtccccaggctggctgcgagggcgccggggaggtcactgttactccagccccgcaacccgcggcggccctcgcacacttccgccggaagtcagcccctcaggggcgccgtgctgatgtcacgagcccgcaggaagtctcgtatcgcgcccgggaggcgccggagcccagcggctggcggtaaggccgcctccgcggggctgtgggaagcttgggctgtcccaggaccgtcagtctcctcctctgaccctccctttccccttgtgtgtagggccgccgtcccacccccacctcgcccgagtccggggcggccccggtgtcccctccgagcctgctgcactccacgtccccctaccagggctccagcccccagggaaatctccgaccaggcccgcccaggaggtgccttggatgggggtggcttcgggaggccctaatggggagtggcggggagagacccaaggctaccgacttggcttatttcttcccaactagctgtttctcacaaagtctttattattattgtattttgagacggggtttcgctcttgtttcccaggctgtagtgcagtggcgcgatctcggcttactgcaccctccgcctcccggattcaagcaattctgcctcagcctccccagtagcttggattacaggcatgcgccatcacgcccagctaattttttttgtatttagtagagacggatttcaccatgttggtcaggctggtctcgaactcctgacctcaggtgttctacccgcctcggcctcccaaagtgctgggattataggcgtgagccaccgcgcccggcctcttttattgtttttagagatggggtccagctctatggcccaggctggaaggcagtggcacgatcacagctcactgcagcctcgacctcctgggctcaagccatccttccacctcagcctcccaagtagctgggaccacaggcgcgggccaccacgccccactgatttttaaatttttatgtagggacagtgatctcactgtgttgcccaggctggtctcgaactcttaacctcaagctatcctcctgcctgggcctcccaaagatttgggagcaggcctaagcaacttagtctgggccatttctcccaaagtcttacccattcatgctgggggtgctgaaaatcccctacttccaaatccttttccacaggtattctgcctttgactgcaactcttgtcgtcttatgtgggtgttgaattgatctgtctctgcagccagatccaggctcctggaagaaccatgtccggcagctactggtcatgccaggcacacactgctgcccaagaggagctgctgtttgaattatctgtgaatgttgggaagaggaatgccagagctgccggctgaaaattacccaac

SEQ ID NO: 37685 - DNA, 2300 bp, Homo sapien
tagtagagaagggtttcaccatgttggccaggctggtgtcaaactcctgacctcaagtgatctgcccgcctcggcctcccaaaatgctgggattataggcgtgagccattgcgcccggcccctgtttctatttattaagaaaaggaaaaaaacttcggaagaggggctgataaaatcaatgatacaacgaatatccttgtacatctatttttggggttgtattgttttaagaaagacattgatctcttttgtccatctggattttatattgatgaatgaagtctgcatttattttataaatagctaactggaatagcacatttcctaagtaaactttcccttttccttcagtgtgaacacttcattcatcccacaggaaactcttgtatgtactgggattattctgggctgcttctcagtgctgtttatgttcagtttgtcacatctggacacaagtaggtgggctgaggaagcagcgctggtggctgtggcaggcccagggttggccagtgttcactctcatggatgtcacagtccagctgcctaaagcactaccttttctctgctcctagtacctgttcctgacttttccacggattgtcttcatgctgggctttgtcgtggttctgagcttcctcctgggtggctacctgttgtttgtcctgtatctggcggccaccaaccagactactaacgagtggtacagaggtgactgggcctggtgccagcgttgtccccttgtggcctggcctccgtcagcagagccccaagtccaccggaacattcactcccatgggcttcggagcaaccttcaagagatctttctacctgcctttccatgtcatgagaggaagaaacaagaatgacaagtgtatgactgcctttgagctgtagttcccgtttatttacacatgtggatcctcgttttccaagcatggcttgtttgttttgatttctgctgtgcttataaatcactttcggtgggcaagggagagaggggaaaatgggtgttgactgaggaatcccccttgcttgtcttcttttgaaaccgggcatctctgaagtcctggtgtcaaggggatcaagagatgacttctcagaggttctaggtgatgctgagaccttggtgtctctaaactctgggcatgtggacaggaggggcttgcggccgtgtctctgacctgtgtgatgtgcaggagggtctcattgactcagcgcctgcgcgttgtgcctggctgtgctctcttttatgccccctctattctcctctctcccccaggggattttcatctcaacaacagagtgtcctcacccaggcctgccttccggccagtatgggcttgtacatcaggcaccttcctgcatgtgtggcctccggcctgccctcctctagccacattcaagtcctttctcaccagtttaaaaattgtgaaagtgaactgccacctatttcagaggagacatgactgccagaaacgaggtcttggtgcggaaggtctttggagtgggagggctctcaggtgcaggtggcaggtgttctgcaccttgctaggccaaggagcccgcagtcagagaggctgggaagtgggagtcaggggcagggggccttccagccatcttcccccgtaccccccagctgagaacagatggaaacgtgaagacgggtagctggggcggccagggaacccaagtccgctggccgaagccaaagcccggcaccacccccaattcttgctggtggaaagcaccgtgaaatcaaccagcggcagctctgaacgcgacgcacagcccgcgagggagcctgggcaaggacggagcgggcctgcaccggcggttgggcgggctccgggggcggggtccacctgggaccgcggcgcgcccctcaccgctcgcgccgccagggggcgccctccggagagcgcgcctaggccgcggcctgcgcttggcccctgcgggccgccgtctccgtgcccggcattcggccgctgttcggctgcgcggcggcagctcccggcggctcctggcggcgccgcagtcggaccttcgggcgcctgctggccggcggcagcagcgatggccccctgagcaggcagggagcaggcggcggcaggcgggcaagcgggcgggtgccgcagcccaggcccgggtcgcgcctctttgtttccacgggtagcggcgcagtcccgggccccgggcggaagtgagacgcgctcggcgcgggggccgcggcggccgcaccatgagcgacatccgccactcgctgctgcgccgcgatgcgctgagcgccgccaaggaggtgt

SEQ ID NO: 37686 - DNA, 2300 bp, Homo sapien
agtggtgctgtttttgcagggcctcccaggtttatgcctcccaaagtgttgcgattacaagcatgagccaccacgcccagcctagttagtcctttgtattcctgaatgacaatctcaaacagtcccagtctccttggtatttttttgttactttgcaaaccaatcctaaccttcagagagagggaattttcaagcacctaccaggctccaggtactatgccagggctctccttgttgtactgtttaagcagatggtgtgggtatcactgagctattttgtagacaggactgtgagcctgcaggaggttgtatacctgccgactggtagagttaggttctgaactgagaacttcctgtctgaaacctagtggtctctctgacactttggtgattttgggaaactacttgtggtaacacctccgggcagctttatataaattctttattatttacagagaaggataatttcatttatttaaggtgtggctgtaaggtcggagttcagcatggggttgatggcttggccgttgggacagccagttcagtggtttctactggagggtgattaagcgcaagagacttctcaggatggtcagggagcccccagcatccctgctagtgccagtgccgagatcagagcatggggcctgtgtaaagggaagctccaaggagggatcagggagctggggtccagagggaggtcaccagcagtcccttggccacctaccttccttccttcccttccttccctttcttcccttcttcctttctttctctctctctctttctctctctctctcttttgagatggactctccctctgtcacccaggctggagcacagtggtgtgatctcggctcactgcatcctccacctcctgagttcaagtgattctcctgcctcagcctccttagtagctgggactacaggcacctggcagctaattttttgtatttttagtagagacaggctttcgccatgttgcccaggctggtttcgaactcctgagctctggcaatctgcccacctcggcctctcaaagtgctgggattacaggcgtgagccactgtgcccggccacctgggcacatttccaagccacccctgcccctgcagcatttcagtttctgctgggctgctattgttactcgatccagcactttcgggctcctgctaagagcgtgttagtgtatctttgagggcagggtaaggggcaggtcctggggtctgcaccagagagcttcctgtagatctttctctcttggcttcctgccatttcttccacaggtggcagcggtgggagcgagagtcaggaggaggaagagcctcaggagaggaacagcagtccacagcggccagcagtctcggccccagtgggggccagtgaaatcgctgaggaaacccggccgggacaacgagagttgcaactgcagcagttagaacagcagcccgagccgcagcaacagccgcaacacgagcagctgcaacagccgcagccacacctagaactgcaacagcagccgcagcaagatgggcaacaacagctatctcaactacaacaggaaaaacaccaatccgtgcaccatcaggaactgaaaccagaactgcagctaatgcaccagcagcaacagttacagccacagcaagtgcaagagcaacagcggttgcagcagcagcaggagcagttacagacgcagcaagcacaagagcaacaggtattgcagcagcaggaacagctacagcagcaagtgcaagagcaacagctgttacagcaacagcaggaacagttacagcagcagcagctgctacaacagcaggaacagttacagcagcaacagtttcaacagcagcaggaacagttacagcagcagcagcagctactattgctgcagcagcagggacagttacagcagcaactgttgcagcagcagcaggcacagttacaacagcagctgctggaacagcagcaggcacagttacagcagcagctactgctgcagcagcaggaacagttacagcagcagcagcaacagcagctgttgcaacagcagcaggaacaattgcagcagcaacaactgcagcctcctcccctggagcccgaggaggaggaagaggtggagctggagctcatgccggtggacctggggtcagagcaggagctggagcagcagcggcaggagttggagcggcagcaggagctggaacggcagcaggagcagcggcagctgcagctcaaactgcaggaggagctgcagcagctggagcaacagctggagcagcagcagcagcagctggagcagc

SEQ ID NO: 37687 - DNA, 2300 bp, Homo sapien
caccacgcctggccaggtccaccctactcttaactaattacatctgtaatgatcttattcccaaataaggccacattctgaaacactgagatgggagttaggattttgacaaatctttttttctgtttgcgggaggtggggtgtggggggcgggctgctgggggcacaatcaacccgtaatacaagagaaagaagcaaaccggccaagagacagaactaaacgccgtcctgatgttgctgcttgggcccctagatctggctgtgtctgaagctagcaagagccatcctggacttttaaagttgcttaaagacagcagatttatttttttggcttaagctcattttagttgggtttctgtatttgcagcagaaaaggccctcaatggcaaagcatccttcacagtgtagcctaagtatctgtttctcaggtcttctctgttcccttaatctaatttagatttctctgttctagttttcttttttttgagatggtgtctcactctattgccgaggctggagccccatggcatgatcttggctcactgcaaactccacctcccagattcaagcgattctcctgcctcagcctcctgagtagctgggattacaggcacccaccatcacgcccagctaatttttgtatttttagtagagttagtagaaacgggatttcaccatgttggccaggatggtcttgaactcctgacctcaagtgatccacctgtctctgcctcccaaagtgctgggattacaggtgtgagtcactgtgcccagccctttttttttttttttttttttttttgaggtagggtctcactctctcccccaggctggaatatagcagtgcgatctcggctcactgcagccttcacctcctgggataaggtgattctcctatctcagcctcctgagtagctgggactacaggtgtgcactaccacaccagctaatttttgtactttttgtagagacagggtttcgccatgttgcccaggctggttttgaactcctgggctcaagctatccgcctgcctcggcctcccagtccctgttctgttcttttatagtcctctatgggctctgacttttatagttcttagctttggttattacattattatgtgttattggttgaatgactgtttcctccaagagacagtgtgatccaacaagaaagattttttttgttattctttctccccgtggaccagcacagtgcctagtaaaaaaataattatctgcataattaacatgtttgaatgaatgggtcattgaatggagaaaggtgaagtctagacctagagacatcaggttttgggtggtccccagctaacaattccttgctgagctgcagagcctcaacctgccccaaccttttttttgagatggagtcttgctcggtcgcccaggctggaatgcaatgccgcgatctcagctcactggaacctctgcctcttggattcaagcgattctcctgcttcagcctccccagtagctgggattacaggcatgcgctgccacactcagactaatttttgtatttttaatagagacgaggtttcaccatgttggccaggctggtcttgaactcctgacctcaggtgatctgccagcctcggcctcccaaagtgctgggattacaggtgtgagccactgcctgtacgggaggggatgtggaggtgggggtgatgggggagggggtggagatttagaggtggggggtgaaggggatggggagaggatgtggaggtggggggtgaaggggagggggaggcgatgtggaggtagggggtgaagggaagggggagagggaagggatgtgggggagagggaagggaggtgaaggaggggagcaggaggggatgtggaggtggggggtgaaggggagggggagaggatgtggaggtgggggggtgaagggaagagggagagggaagggatgtggaggtgggaggtgaagggggaggggttgtggaagtgggggagaaggtgtgccaggcgatggagggggtcggcgggggcggggcccgcactgtccccgccccatgtgggtggagcctcctgcccgggcctgtgtcgcggcagagcctggcgggctttgtgcgcaggcgcttgcggcttcgcggggctgaccgtgcgcttcgcctgcggggtcgtgctggggcggcgggtgagcctggggggctgcagagcgggcgcggggcgcgtccgaacagtcgcagccccgagcccctgggaccgccttccccgcggaggcttgggctcagcgcctggggcggaggtggggcgggggcggtccg

SEQ ID NO: 37688 - DNA, 2300 bp, Homo sapien
tagtatgcaatgagtggcagcatcaagaaggcaggtgtgtgtgtgtgtgtgtgtgttttgggacacgaatctggtgtgtgtgtgtgtgtggtttgggacaccactctagggggtgtgtgtgtgtagagtttgagacacaactctgttgtgtgtgtgtgtgtgtggattttgagatatatctctctgggtgtgtgtgtgtgtattttgacacacaaatctgctcggtgtgtgtgtgtgtgtgtgtgtgtgtgtgtgtgtagtttgggagacacatctcgtgtgtgtgtgtgtgtgtagtttgggagacacatctcatatgtgtgtgtgtgtgtgtgtgtgtagtttgggagatatatctctgtgtgtgtgtgtagtttgggagacacatctcgtgtgggtgtgtgtgtgtgtagtttgggagacgcatctcgtgtatgtgtgtgtgtgtagtttgggagacgcatctcatgtgtgtgtgtgtgtgtgtgcagtttgggagataaatctgtgtgtgtgtgtgtgtgtgtggagtttgggagacgaatctggtgcgtgtggagtttgggagatgaatctggtgtgtgtgcgtgcgtgtagtttgggagacgaatctggttgtgtgtgtgtgtgtggagtttgggagatgaatctggtgtgtgtgcgtgtgtgtagtttgggagacgaatctggtgtgtgtgtgtgtgtgtgtgtttgtggagtttgggagacgaatctggtactctcccatgtgcagtctggtagagaaggaggaactgggaaggtgctactggtcaggctagagggagaaccaggagcgtgcagtttctgaagccaagggaatgagaagcttcagggacaggtgatcaactgtgtcaaatgctgttaagagtccagcccaaggaagactgagaaatagtgctgggatttagctcaggggaggtcatgtgactctctgaggccctgtggctggatctgtaagggaaatcctgattggagaggtttaggagagagtggtagaagaattgaatttggtctattgagaattttttttttttttttttttgagaaattttgccctaaaggaaaaagagaaattggatagtagcaggaataggagttgaggttaagaaaggatttttcattttgttttgttttgatgggagagataatagtggggtgattctgtcgagaatgagaaatagttgttgcccatggagtgagaatggctgtggggcctcgagtcagccagaggggacagagatgcaaacagttggaggtgtcccatgaggtggttagagaagagggtagacatagcattcctatttgcttcttttctcagggaaatagctcgtcagccaagagtgaggggtgacggccgggttttgggagagagcagctgcatcctaaccacccccacacatgctcagccagccgtgaggaccatcctttccttctgtctgaaatcccagctcatttctcacaatgtaaatgtaacatactactcttttgggagcttgtgtcatgatactggtgtttctcagctgaaagcgattagagcagcagccagtctaccacacagacacctgctgttctggggcttcaggagtcccagaggaagctccctccttgcttggctctgtgtccttctgctcagctagcattttgtctttttttcttagacactaacatcatttgtcttggggtttgggatatgattttaagaggcacttctttctctcaaggtgcttatgttctccttggaggaggtaattcatggatgtaattatgggagatcatgggagtcgttctggtcaatgcctgggaaactctgaagtgatgatgaagcagaagtctgattttaaatgcatcctcagccgggcatagtggctcacaccagtaatcccaacactttggaaggctgaggcagaagcatcacttgagcccaggaatatgaggctgcagtgagctatgattgcaccactgcaccccagcctgggcaacagatcaagatcctgtctcgaatgaatgaatgaatgaatgaacaaacgaacaaacgaacaaatgaatgcaccatcaaagtattgtgattcagtcattcaaggaagggaaaggtggcatttgccagccctggaataattcgggttagtggcagaggcttgtaaaggcactcaggagaccagcattaggggcctgagtaagtctcctggagggctggtgagatttttgcttccttagaatttggacttcctgttaagagactgagggatgggaatgcagataaatacccagatggacccagg

SEQ ID NO: 37689 - DNA, 2300 bp, Homo sapien
tttaaggatcacgctatctgcgcatatgaatatgataaaaaggcttggtgctgatggctactgttctgtctgaccaaatcttgtatctatttctactttcccattttaaactttgaacccttaatctcctcctaaggtgtattgtaaatcagagtagagaataaatacatgaacagaaacactcaccagggatttattcattttctgctgctcttggaaaaatctggaggactgtgaaagcggaggcagatctggggaaggaaaacccaagccatggcgttatgagcggtctggcctgccaaggcggtcatctcccgcccaaaacctacacagaaagttccaagaagtacatcttgtgggagactgtccctttaagccttcagaagggattggaaaatgatcaggagggggaccgatctgcacatttgaaactcacacatggctaccttgtgactgagtggatgagattctcatggtgaatgaatactggatcctactgaaataatctgccatcattaaatgcaagatttaaaaaggaattctggtgaccagcctggccaacatggtgaaaccccatgtctagtaaaaatacaaaaattagctgggcgtggtggcgggcgcctgtaaccccagctactcgggaggctgaggcaggagaatcgcttgaacccgggaggcggaggttgcagtgagctgggatggcaccattgcactccagcctgggcaacaaagcgaaacttgtctcaaaaacaaacaaacaaacaaacaaaaaacaaacaacaaaaaatgaattctgtaatactcatctattttcttactcttttaaataaagatcagaaaatccacaggatgccctaaataaaggaatacagtcggcataattgagtctttatttgcagaaacttcagtgtgctactcaaaaggatcttttattgaagaacttacgctcacttaactaggatacgggggacagaacactggcctgggagataaaactccagagttctactatgagcaactccacccacaaaacctcggacaagtcacccacctgctaaggcccttcccctagcaaatgaggcagcaagagatagttcctgcaggctgttcctgcactacaacgtatgattccacaagagcagacctaagggggaatcagcacttaaatgagagaacagaggtgctgacggacgtttagatacggtagcaatctggagcagagagaggaggaagggctgctggggtgaggggggagtggagacaacgtccgcagctgaggctggtgacaccccccacgcccccgtaagcctcgtcctcgccggaccctgccttcaaacccaaacacacgtcactcctgcaagcgatcgagaccttccactgtccctcactctaaggtgccctacacgcggtgacttcacccaggcccttctcgccccgggcccgcaaacccacgacttaccctcctggggctccgcagcctctgccccaccgctcccgacaggccggggcgggattgctgtcgcgggcgcgcgtctgctcgcgaggtcccttcctgtccacctcaccaaggccgttctgctccagaggggcccgggccgggcctacgggacaaatccaggcggggcgtccctcccggagcccagatccgtctccctggggctcaccgtcctgcggagccggggccgggccgtcgaggacgcacacgggccgggcccgggtcccgccgccccttcgcctccgccgtcgtcaccgcccggccggccccttgggccccagcgccgtcggctccgggggtcgtgctcggggatccccgcttgagcctccgcctggcccgcacagccccgcgcccgcttgggtgccggcccggctcttcggcgcccagccccgcaggctccgcgattctcgcccaccggaggccaaagcctgggaactagggcgagcggtgacctggggacgcacaggaagcgagggcactgcggccgcggcgcgcatgcgcgaacacgcacacagagaggggtgcacatgcgcaggaatgcaccggaagtccgcctcccgggacccgccgccggtcccaggacaaataccgtgactctatttcccatgagcctacgcgctccccaaatttaggagccatttgaaatgtctctatctggtctagcggttaagaggctctatgctaagagaattggcaacgccgaaccccagactcaaatttctccttagtttaagggaacgtcttcatggggatgtcttgactatctttaagggaacgtctagaaagtctctgcttcctgtagcat

SEQ ID NO: 37690 - DNA, 2300 bp, Homo sapien
cttccagatatgaaagagctcttctcctcccagtgggcatgaaattcttaattgatttcagctcaaaatagacagagaaatagaataacaaatcagactctgatgtctctcacccaacagagattaggtctttgcaaacattaatctcattacagagatcaccatgtgatcagaccataaaaccaaattcctagcccagcgcggtgcttcacgcctgtaatcccaccactttgggaagctgaggcgagtctaccacctgaggtcaggagttcgagaccagtctggccaacatggaaaaaccccgtctctactaaaaatacaaaaattagtcgggcatggtggcatgcacctatagtcccagctactcaggaggttgaggcaggagaatcacttgaacttgggaggcagaagttgcagtgagccgagatcgtacccctgcactccagcctgggcggcagagtgagactttgccttgaaacaacaaaaacaaacaaagtcccaatcagtgatgctagcaatgtaaacaaatgcaaaccaaagtaaaacacaggattggtaaatggggaaattactgaaaaatgagaagccagcaaatttctactggcactttggactcattcctgggagccaagaaaagattcacctgggcttcaacagttcatgaggcactccagtcctgaggttttcctggctcagtcatgtgattccatcagggacttctgcaaagacctggaaaaccttaaaacataaaagtaaaatcatgactctgatacagatataaaaatgagcacatgctaaagattttatttaattcaagaggaaacaggcagatattataactggttcaaaagagaatctgagggctggacatggtggctcatgcctgtaatcccagcactttgggaggctgaggcgggtggatcacttgaggtcaggagtttaagaccagcctggccaacatggtgaaacccccatctctactaaaaattcaaaaattagtcgggcttggtggtgtgcacctgtaatcccagttacttgggaggctgaggcaggagaattccttgaaccagtgagccaagatctcgccactgaactccagcatgcacagcagagtgagaccctgtctcaaaattaaaaaaaaaaagagagagagagagagaatctgagaaacagacatattttcagatcaggaatattgaaatgattatgtaaatggagaaatgcagtcaaaactgcattttctctagtggggattgtgggaagtcaaccaacttccaccagacagaacataacttgcatcgattacctacagttttcaaagaggtgtaaaatacctcaaagataaggaacagggttggaatcaagtaacatggctttctaaatgtgcttcgttttccattaagacgcaaatttcttcttctgcttgcctcatcctcttcaggaagtagagttctggctaatttttttcttctttcaattctgtacatattctctgagttttctagctatcactaattcaaagtgatttggaaaagctggaattctttttctccttgttggggcgaggatggtatcctgtcccaggctaatcctctattatttcatccatgggctctatttactgaagttttcgttaaatgtgtcattgtgatcataagctagcatgatgcaccctcttgttccatttgtcacggttgcacatggacattgattttaagccttgagctctccggtaaggcaggactggcccaggcatggtctacgagatgctacaggaagcagagactttctagacgttcccttaaagatagtcaagacatccccatgaagacgttcccttaaactaaggagaaatttgagtctggggttcggcgttgccaattctcttagcatagagcctcttaaccgctagaccagatagagacatttcaaatggctcctaaatttggggagcgcgtaggctcatgggaaatagagtcacggtatttgtcctgggaccggcggcgggtcccgggaggcggacttccggtgcattcctgcgcatgtgcacccctctctgtgtgcgtgttcgcgcatgcgcgccgcggccgcagtgccctcgcttcctgtgcgtccccaggtcaccgctcgccctagttcccaggctttggcctccggtgggcgagaatcgcggagcctgcggggctgggcgccgaagagccgggccggcacccaagcgggcgcggggctgtgcgggccaggcggaggctcaagcggggatccccgagcacgacccccggagccgacggcgctggggccca

SEQ ID NO: 37691 - DNA, 2300 bp, Homo sapien
accaccaagcccgactaatttttgaatttttagtagagatgggggtttcaccatgttggccaggctggtcttaaactcctgacctcaagtgatccacccgcctcagcctcccaaagtgctgggattacaggcatgagccaccatgtccagccctcagattctcttttgaaccagttataatatctgcctgtttcctcttgaattaaataaaatctttagcatgtgctcatttttatatctgtatcagagtcatgattttacttttatgttttaaggttttccaggtctttgcagaagtccctgatggaatcacatgactgagccaggaaaacctcaggactggagtgcctcatgaactgttgaagcccaggtgaatcttttcttggctcccaggaatgagtccaaagtgccagtagaaatttgctggcttctcatttttcagtaatttccccatttaccaatcctgtgttttactttggtttgcatttgtttacattgctagcatcactgattgggactttgtttgtttttgttgtttcaaggcaaagtctcactctgccgcccaggctggagtgcaggggtacgatctcggctcactgcaacttctgcctcccaagttcaagtgattctcctgcctcaacctcctgagtagctgggactataggtgcatgccaccatgcccgactaatttttgtatttttagtagagacggggtttttccatgttggccagactggtctcgaactcctgacctcaggtggtagactcgcctcagcttcccaaagtggtgggattacaggcgtgaagcaccgcgctgggctaggaatttggttttatggtctgatcacatggtgatctctgtaatgagattaatgtttgcaaagacctaatctctgttgggtgagagacatcagagtctgatttgttattctatttctctgtctattttgagctgaaatcaattaagaatttcatgcccactgggaggagaagagctctttcatatctggaagggtgagtttttgcatttttgtgtttactcttgacccatgtctgaaattttagaattgaagctgtaagctctatttctttgtatgtctgtgtgtctgtaatttagaaaggtctttacctctgattgtgtgagtgtctaatgtttttccacctctgaatggtattatagtagatatagagtttgtttgtttgtttttgagacagggtctcactctgtcgtccaggctgaagtgcagtgtgtgcgatcacggatcactgcagcttcaacctacctgggctcaggtgttcctcccacctcagcctcccaattagctgggactgcaggtgtgtaccaccatacccaactaattttcgtattctctatagagatggggttttgccatgttgcccaggatggtctcgaacttctgggctcaagcgatctgatcacctcagcctcccaaagtgctgggattacaggcatgagccacaatatagagtctttaaaggtttgctgttctgattggcttgtagaggtgtgtatgtacttatataaattgaatttgcccaaattcttagaaaaaaagagaaattgaacttctgttgctttaatgtgctagaaaggtattttttactgaaaccaaatcaaatgttttggaaatgcgagtccgcatgtagtccacatatatgttaccgagcagtcaatgcactcgctgcccagtgtgtacagaggccaataccatggctccagcttttgagaaataaagcctttttgtaagtcaactagcaaggacacaggaggaaatgctcaaatctccctttcccagctgggggctatgtcaggttttgtacgcatagggtaaggagatgtgatttgattggatcttgagatgaagtaattaatgctgggaggtgtgatctgactggatcctgccatggagtgacaccaaaactcaatctcattggttcctggctcctgccacagggtgtccggttcttaaatgggtcccagctcctcagtccgagcacttaggttccacttcgtggttgcatgcttggttaatctgggcatgctcagagtatatgaccttcaacccacggatccatggcagttgaaaaacaactgccaactacattacataaaagttgaaatggacgtggagtgtggtggctcacacctgtaatcccagcactttgggaagctgaggcaggcagatcacgaggtcaggagttccagcccagcctggccaatatggtgaaaccccgcctctactaaaaatacaaaaattatccaggggtggtgatgcgct

SEQ ID NO: 37692 - DNA, 2300 bp, Homo sapien
agacagtgtctctcacccagtctggagtgcagcagcgtggtctcggctgactgcaacctccacctcccaggttcaaaggattcttgtgcctcagcctcctgagtagctgggactacaggcatgtgacactgcgcctggctaatttttttgttatttttaagtagagacgggatttcgccatgttggccaaggcaggtggatcacttgaggccagaatttgagaccagcctggccaacatggcgaaaccctgtatcactcttttaggcccttctgagtgtttgcaggctgagtgttcacagggtgttagcctattgagctttcttttgtggttcttacgcaggagattcctgcctttgcaggccagagcactcatgacttcagtgacctgcttctccccctctaggtctaccagccacagtctctgcacgtttccaagagcagcagaaaatgaacacattgcaggtgagttttcatgcttgtgtatatgttcctcaactttattttatgatgcattttaagaggtttgtaaggattcctacttttttttttctttttttttgggatggagtcttgctctgttgcccaggctgcagtgcagtggcatgatctcgcttcactgcaacctccacctcctgggttcaagcgattctcctgcctcagcctcccgagtagctgggattacaggcgtgtgccaccatgcccaactaattttttgtatttttagaagagacagggtttcaccatgttggccaggctggtctcaaactcctgacctcaggtgatcctcccgcctcagcctcccaaagtgctgggattacaggcatgagccaccgcgcccagccaggattcatactttaaaatgggaatgtggaaatagacattgtcctgtaaaatatagtgtggcagatcagcaccaaaaatgatttgtgaagcttgtgtgtgtggatagtagattttaaggctgttgaaattgagccacacccaggactgatattcttggcagtcatcacaaaaggaaaatgccatctgtattagtccattctcacactgctgtagagaaataaccaagactgggtcatgtataaagaaaagaggtttaattggctcacgcctgcaggctctatcataggaagcatggctggggaggcctcaggaaacttacagtcatggtggaaggcaaagggaaagcgggtacatcttccatcaccagagcaggaggaagagggagagggaggcgctacacacttttaaacaaccacgtcttgtgataagtcactgagtgtcaggagaacagcaccaaaagggaaattgcccccatgatccaatcacctcccaccaggccccacctccaacattggggattacaattgaacatgagatttggttggcgacacaaaccgaaaccatatcaccatccatgacatcgcttgcattcattataaggagaaaccaattttgttacttgtggatttaagagattttctaggactttgaaaactttcttcattccagttgatacaattgcggataggcttcctaataacaaccattaaattaccgtaacttacggcgtattcttggtgcttatgtaagcagagggcctgcctgctgcccaaggagaacttggtgcctataatttttccagggacggaaatattgtgatcccagtagacagaattctgtttttactgttgagtcctagatcatggggggaatgaatgacttgatcatccttcaaatatttgttcgtctttctgtttgggttgcacagcaaacaatacaaacagttactctcttttgaagatttcctcatttctgtttctcatttcagttctcagtgttttagttttgtccttttcacgttgctgagtcagtctgtaaagattaccaatgatttcattgcagtcgaatccagcgggcattttctagcccctacctcccaggaccctttgtctgcctttgacatctgttacttccaaactgatactttctccatggagtctctcttttcttggcttttaaaaagattcgtctgtaagtatttctgcttgtctttaaatgatgaagtctgttttgttctgttttgttctgtttcttttttcctttttttgagatagggtcttgctgtgtcacccaggctggagtgtagagacgtgatcacaactcactgcagcctcaatctcttgggctcacacgatcctcctgcctcagcctcctgcacagctacaggcgcacgctgccacacccggctaattttttttgtattttagtagagactgggtttcaccgtgtcacccag

SEQ ID NO: 37693 - DNA, 2300 bp, Homo sapien
gacatagtttagtctataactttcaacccttaacaataattaaattcatctttgtttaatttcataaatttaaaagtagggtccttttcagttagtgattctcagccctgattcacattaaatttttaaacacgggggattctctgcccggctggaagaaaatgactggatgggacaggggtcactatttgaaacattcctctgtgcggccaaggtcgcaaaatgctgtcctcgcaggggaacaaaaagagtttgatttcccataatttgatgctgtgatttggtttcctcaggatgtgaactgtagaacattccagttactggccttgaatggttctgggaatataagaatccctgtctgtcttttcaaatagttttcatggaaccttgtcctgtttgaacttggctgaaaatggaagtaaagatgccctcttgggggcccagagatgacagatgtggctccccctgctgcccccaccccttctccagactgtgggcggctccccttcctgctttagaatccttcagatggaggaggcagtacagtagtcactgtgccatcgtgtctggcactgtgctggcgtggtctgcaggatcccacttatgaactctccagattgggagctgtggcaggataacagcccccaagacagctgtgtcctaatccccagaacctgtgaccacgctgcctcacgtggcagaagggactcggcaggtgtgattgagtgaaggatcttttttttttttttctttgagatgaagtttcgctcttgttgcccaggctggagttcaatagcatgatctcagctcactgcagcctctgcctcccaggttcaagtgattctcccacctcagcctcccgagtagctgggattacaggtgtccagaaccatactggctaatttttgtatttttagtagagacagggtttcaccatgttgaccaggctggtctcgaactcctgacctcaggtgatccgaccgcctcggcctcccaaagtgctgggattacaggtgtgagccatcatgcctggctgagttaaggatcttgcaacagagagattatcctggattgtctgggtgggcccagtccattgggtgagtccttcaaaggtggagacctttccctgctggccagagagaggctgccttgctggttttggagatggaaggaggtaccactagtcaaggattgcaagcagtctctagaacagggattccaacactccggacacagaccagtagtggtccatggcctattaggaagtggggtgcacagcaggttaggggccggcaagccagcgaagcttcatctgtatttatagccactccccgtcgctggcgttaccacccgagctccgcctcctgtcacatcagcggtgggcattagattctcatagcagcacgagccctattgtgaactgcacacacgagggatgtaggttgcacgctccttatgagaatctgatgcctgatgatctgtcactgtctcccgtcacccccagatggggctgtctagttgcaggaaaacaagctcagggctcccactgagtctctgtgatggtgagttgtagaattatttaattatatgttacaatgtaataatagtagaaataaagtgcacaataaatgcaatgcacttgaatcgtcctgaaaccatccctccccgaccccaatccatggaaaaattgtgttccgcgaaaccggtctctggtgccaaaaaggttggggaccgcttctggaaaagctggaaaaggcaagaaaacgcattctctccctcagcctctggaaggaaccagcactgtgggactaatttacatactgtagggtaataaatttgtgttgcttcgaaccactaaatttatggtaatttgtttgcggcagcaatggaaaactaatgcctgcgttattcctattttatgatgaagcagttagcagagctgggaaaaccctggcctgctgcctccagcgtccagcctttcccccggccttcaggaccagcaagggcgggacacctgcttggcgctggcgcgcggcccctttaagagcacagggtgggcctggcggcgtccgcggttgcctggagaccggagccgggtctgggacgccgagagcccggcaacacctcagcccgagcccggcgaggtctctgggctcctggagcgaggtgagcgccccaggccgcggtcctgcctacgccgggacagccatggcgactgggtcctgctccttcccggccggactgacgcggcctcccaggacccgagcacgtgcgtgatgggcgaggagggcctaggccgg

SEQ ID NO: 37694 - DNA, 2300 bp, Homo sapien
gcctcccgaagtgcagggattacaggtgtgagccaccgcactgggccagtttctggtccttaagtgacaacttaccaagaaccgccctgtgcctcgttgtctcgggaaactcccggcagggggggaggtcatttttgcaggcacagacccccactccagcccagtcaggggggcttctgggcaggactcggggggctcctagaagcattctcagaggccgactggcctcatgggtcctggctggtgatcaggccacggcgtgctgtcctcttttctctgctgctgtggctgcctccagggagttcaggttcctggaagagaatccgatgctgctgggtgctgtgcactgtgctgcctgctgcccactcaggcgtcctgggcagagcgcgttccctggcaggtgcccctggggcaggctgttggctgatttgtttacagactattttgatgaccgtggcagaaagagggatttcctgaccgggcatggtggctcacgcctgtaatcccaatactttgggaggccaaggtgggcagatcatctgaggtcaggagttcaagaccagcctggccaatatggtgaaatcctgtctctactaaaactacaaaaatttgcggggcatggtggtgcacacctgtgatcccagctactcggaaagctgaggcaggagaattgcttaaacctgggaggcggaggttgcagtgagccgagactacaccattacactccagcctggggaacaagagcaaaactccatcttgaaaaaaaaaggaaaaagaaagagggatgtccccagtcatcactaagccttggagggaacagtgaattcacctccttcgagcgggttattttttttttcattagagacaggatcttgctctgtcgcccaggctggaatgcagtggtcatagttcactgcagcctcaacctcctgggctcaacagatcctctcacgtcagcacccccaaagtgctgggattataggcgtgcaccactgcaccttggtggccagcacctgtagtcccagctacttgggaggccaaggtgggaagatcacttgaggctgggagtttgagaccagaccagcctgggcaacatagagaaactccatctccacaaaaaatttaaaaagtagtgaggcttggtggcacacacacttgtagtctcagctacttggggggctgtggtgggaggatctcttgagcctgggaggtcgaggctgcagtgagctatgattgtgccgctgcactccaacctaggtgacagggtgagaccctgtctcaaaaaaacaaaaaaacaacaacaaaaaatccacaaaaactaggcatgatggctcatgcctgttaaatgcctgttaatctcagcactttgggaagccgaggcaggtggatcacctcaggtcaggagttcgagaccagcctggccaacatggcaaaaccccgtctctcctaaaaatacaaaaaaaattagcagggtgtgatgatgggtgcctgtaatcccagctacttgggaggctgaggcaggagaactgcttgaacctgggaggcagaggttgcagtgagccgagatggcgccattgcactacagcctgggcgacagagtgagactctgtctcaaaaataaaaacaaaaataaaatctttttctagagacagggtcttcctaggttgcccagactggcctcaaattcccggcctcaagcagtcctcccgcctcagtctcccaaagtgctgtgattacaagtgtgagccactgcaccttgccaaggtgggttctaagaatctgaagttccccaggtcaggattggaagccagcactttccaacatcacctgcttgtttcttcgaacttggtcaacctgcaacctcccagatatttcctcctgcctgagcttccgcccactggtcgggtcagatgagagaggatgcgatgagagcagacaaggaaggaagagagagagtgtgagggggatgttcagtgtgtccacaggagaggcaagaacagaatcagaggtcaagcagctcctggaaccgcccgcaggactagggattcccgcccccaccccccaacgcttccttctgtcaccccatggccgttctgcttcagggcgactttgtgaagaatgtcccgatgaaccacggcgtgtacacgtggccggacggcagcatgtatgaaggcgaagtggtcaacggcatgaggaacggattcgggatgttcaagtgcagcacccagcctgtgtcctacatcggccactggtgcaatggcaagcggcacgggaaggtgggcgaggtggccacgtggagg

SEQ ID NO: 37695 - DNA, 2300 bp, Homo sapien
gagtctccaagaccatcctcacttctgacacccactgcgagtttgggagtccccgtgaccacctttagggtaagagttctctagaagtactacaggactcagaaaaggctttctacagcagtacccccgagccaaaggccatgtgttccaaaacccccgggaggtgcctgaaaccggggacagtaccaaacccttcacttgctgtgttttttcctgtacatacatgcctgtgataatgtttataaattcagtacagtaagcgattaataaggctgggcgcagtggctcacacctgtaatcccagcactttgggaggccgaggcaggcagatcacttgaggccaggaacttgagaccagcctggccagtgtggtgaaaccctgcctctactatagatagaaaaattagccaggcatggtggcatgcacatgtaatccaagttactcaggaggctgagtcaggagaatctcttgaacctgggaggcggaggttgcagtgagccaagatcgtgccactgcactccagcctggacaagagtgagaccccatctcaaaacaagtaatagtaatcataattggacgatgacactctactgcaataaaagtcatgtgaatgcggtttgcttcccccttccctcaatattttattatactgtccctcacataacagaaaccatgggaaacaaaaccagggggaaggaagaatggcggcactcacagctgcggtttattacagtggaagaatacaggttaaaatcagcccggggaagaggcgtgtggggcagggcccaggagccaccaatggaaggaccaggagtccttctatttgctttaggttggtttgggttggtttggttttttgggtttttgttttgttttttgttttttttttttttggttttttggtttttgagatggagtcccactctggtgtgagcttccggctgtcctctcccgttggggtcatgtggacagcccagtgagtgtttccccatcgaggatgtgtggctgtgtctgtggagtgttgacatccagggaagctcacctgagcctcgagatccagagatctgattgggggttggccacagagacacagctggccccacatggccagccttagtctccagccctccagaggtggagcgggtgctgtgcgggcttgggtgtaagggatattggcctgtagttttgttttcttgtgatatctttgggcaatgctggcttgataaaatgtgttgggaaatgttccctcctatttttttggaagacagtgaaaaattggtgttaattcctctttacatgtttcatagaattcacagtcaagctctctgcacctgggcttttctttgtggcaaattttaaagttaaccatttatgcccagtgttccattattggaacactaagcttgtgagagttatttatatcctgctgaaggtcattgccaaggtctcatttttcacaaaaaagatttacaacctccagcataaatgggttaatctctgtacttgttacaggtttattttgattttgtttcttcttgagtcagctttggtagtttgtgtctttctaggaatttgtcagcttcaattaatttatttgatttgtcggcacgtggtttttcatggtattgtaggtaaagccggatactccttcgtttttcctgtaaagtcagtagtgatgtctcctctttcattcctggttttagtaatttgagtcttctctctttgtttcttgttgtatagtctagctaaaggttcttcatacttctggaatcttcacaagaaaaaggaaaagtttttcaatgttgggtcttttcagagaacaacttttggtttcatttattatctctgtgatttttctctgttgagtttgtttctgctctcatgctttattatttccttccatttgctttaggtttgtttgggtttttttgtttttgtttttgttttttttgagacggagtcctgctctgtcacccaggctggagtgcagtggcacagtctcagctcactgcaacctctgcctcccaggttcacatgattctcttgccgcagcctcctgagtagctgggattataggcgcaccaccacgcccggctaatttttttgtacttttagtagagatggggttttgccatgttagccaggctggtctcaaactcctgacctcaggtgatccgcccacctcggcctcccaaagtgctgggcttacaggtatgagccaccacacccggccccacttgctttaggtttagttgactcctgttgtccaggatcttaagacgaaaggtcaggtcactga

SEQ ID NO: 37696 - DNA, 2300 bp, Homo sapien
ctcaaacaaggactctgtagatgatgttaatgggccaaacggaatgcacatctgcccctaagtgtgtttcttttctttcttttcttctttctttcttttttttttttttttttttttgttgagacagggtcttgctctgttgcccaggctggagtgtagtggtgcaatcttggctcactgcaacctccacctactgggttcaagtaattcttctgcctcaagcctcccaagtagctggaaccacaggcatgtgccaccactcctggctagtttttttattttagtagagacggggctggtctggaactctgggcctcaagtgatccacccaccttggcctcccaaagtgctgggattacagctatgagccaccgtggccagccttgtttatttctaaatgaggcttcctttgtgtctctacatttccttctacaaaaaaaactgccatggcacaggggcttatgcctacaatcccagcacttggagagcccaaggccagtggatcacttgagcccaggagttcgagaccagcctgggttaacatagtgagaccccagctctacgaaaaatttaaaaattagccagccatggtggcatgcacctgtggtcccagctattcgggaggctgaggtgggaggatcacttgagccccggagttccaggctgcagtgaggtctgatctggccactgcactccagcctgggcaacagagcaaagtgctgtcttagaataaaatactttttaaataaactaaaaacaaaacaatgggcctggtgtgggtggctcacatctgtaatcccagcactttcggagggcaggtgaggcagaatagggaatgagggtaaccaagggttaaggcataaacaaaagaacagcaggtgcagccagttctaggcaagattaggcagcatagaggccacgtgttcattccctcaatcagaggctgattgacggacgacagggggttggccgggggggagggtgacagcttctgattgacgggggggcgggtgcgcgtctccacttcagcctctgattggtcacaggccaatccttcagagggtgtaaccaatcggagacctctaacgggcacctaggggcgttacctaattcttccagcttaatgaaaatcctaatgggggctcttgagctgtttgctctgtcttgctcctgctctgtgagttgtactttcgcttcaataaatctgtctattccttactccggttttttcttttgtttcttttcgttgctttgttcttttgttactttgtgcattgcattttgttcagttctgtgttcaacaagccaagaacctgggcaatccacggtcaagaccttccatccagtagcagaggcaggaggatcccttgatgccaagagttagagagcagccggggcaacaaagtgagaccctgtctctactatctatctatctattttttaattatctgggcatggtagtgcatgcctgtggtctcagctactcctcaggctgaggtgggaagatcccttgagcccaggagttgaggctgcagtgagctatgatggcaccactgcactccaacctgggtgacaaagcgagatcttgtctctaaattaaatttaaaacaataccaccaaaacaacaacaggctgggcggtggtgtctcacgcctgtaatcggagcactttgggaggccgaagtgggagaccatttgaggccaggagttcgagagcagcctgggcaacacagaccccacctctacaaaaaaataaaactggccttggtggcgcgcgcctgtaatcctagctacttgggaggctgaggcagggggattgcttgagtgtcggacgttgaggctgcagtgagctgagatcgcgccactacactccagcctggatgacaaactgagaccctatcagaaaaaacaacaacaacaaaaaaacagtgcccgctcggtttttcctgaaacgcgcagccctcgcctgtagccaggagaaaactccgcgagccagcaaaacacaaactcggccaggaaacagacaacaaggccacccgggggtgcctgaagaggacgctgcgaggcggattctttttccgggcctgcggcgagtgcttccggggcggtggcgacggaggcggaagtgcggtgttttagccggtggctgctgtctctgggcgggccgtgggaggctcccgaggtgggggccggggcgggatggctgcagcggcggccggggccgggagcgggccctgggcggcccaggagaagcagttcccgccggcgctgctgagtttcttcatctacaacccgcgcttc

SEQ ID NO: 37697 - DNA, 2300 bp, Homo sapien
tagccgggggtgtacaccccttgtgtaacattgctcctaaagggcagcgggggagaggaagatattacagccaatatcgcagggagtgtacacccccttgtgacattgttccttctatcctgggagggagaggaagatactagcggcaatgtcgcaggggctgtacacacccactgtgatattgttccgaatatccggagggggagaaaatgttgttacttccaatatcgcagggggtgtacatcctcctgtgatactgtttcttatattcatgcggagaggatgacattactcccaatatcgcaggggttgtacccacctcctgcgatacggggagtaagagccagcccctctctccccctggctcttaggagcccctttgcaggggggtaaggccccaccctggggtacggggagtaagagccagcccctatcaccccctggctcttaggacccccatcgcaaggggatgaggcccccgcgatgcgggcagtcatatcacccccctctagatatgatgattcacgtcgcaggggggcgggcgccccccgcgatgcggggagtcatatcagcaccccctctccccccctggatatgacgatccacggtggtcacacagcgtgttcacgttattgtcagtaatatcttctccacctctggaaattaccaactatatcacagacgggtgcacatcctctgcgctctttggagtaatagcatcctctttccccttgatattaagaacaatatcacaggagtgtttttatccctaggggcattccgtgtagtatcatcctctcccacgttgaaattaggaacaatatcaccggagcgtgtccaccccgtgcgatattgaaagtaacatcatcctcttctctcctggatcatgggaaccatatcactggggttgtgtacactttctgcggtattgggagtaagatcatcctctccgccttggaatattaaggatcatatcacggtggggctgtacacaccctgtgctatgaagaagagtattatcctcccctgccctgcacattggaaaaaatatcacagagtgggtgtacacctcctgcgatgagggggtgatatcatcttctcttcttctgtataatagcaacaatagtacacgggcttgtacactttctgtgatattgggagtaatatcaacctctccacctttgaatattaagaacaatatcacagactggatgtacaccccctgcgatattgggagtcatatcagcctctcctttccgtggatattaggaataatatcccaggatgggtgtacacctcctgctgtatggggagtcatatcgtcctctcacttcctggctgctaggaacaatatcagagggtgggtgcacacagcctgcgatattgcgagtaatatcaccctctccccctccggatattaggaacaatgtcacagaaggggtgtacacttcctgagatactgggagtaatagcattctcttcttccgggaatattaggaggaatatcaccgggtggatgcacacccactgctatcttgggagtaacgtcatacgccaccccctggagatgatattcggatcaatatcaccgggtgggtgtacacctactgcgatattgaacgtcatatcatgctctctccctccctggacattaggaacaacatcacaggtgggtgtacacccactgaggtattagggataatattcatattaattcttcctcttttattaacatgaatatgtattaccaatattaatattaatattaagaaatcattgttaaaaatagtgttcagattattaatattaatgttaattattaggagctaatatgacagttttctaatgaataagatcaatatcactctttaagaccatgcatcattaatcattaatattcatttattgttatcgtgagtataactctttaatacgaattatcattatcggtattgattttcagaattatatgatcagttattaatattgataattatcagtatcaattaataattaagattattaattgcggtaagtaacattgcgccattccacccctccctcggcagctcttttacgacccaaaacggggatccaaatgcccctgagagagcagcggcatactgggagagaggaggatggtcacgtggtggagaggcgtgtttttgtgtaccagcccttcacctctgccgaccttctcaactgggaaaacaataccccgtcctagagcgaaaagccacaagccctaattgatttcctccaaacggttatccagacccacaaccccacctgggccgatc

SEQ ID NO: 37698 - DNA, 2300 bp, Homo sapien
ggtgctgggtgcctatagtcccagctactctggaggctgaggcagaagaatggagtgaactcgggaggtggagcttgcagtgagccaagatcaccccactacactccagcctgggcaaaaaagcaagaccctatctcaaaaaaaaaagaaaattgaaaatttttttgagaccaagtctcactctgtcacccaggctggagtgaaatgctgcgatctccactcactgcaacctccgcctcctgggttcaagtgattctcatatctcaaactcttacctcaacatgactacaggcatgttgtcaccatgcctaatttttgcatttttagtagagatggggtttcaccatgttgtccaggatggtcttgaactcctaggttcaagcaatctacccacctcagcctcccaaaatgctgagattacaggcatgagccaccgtgcccgacctctaacttttcattatggaaatttcccatacgcacaaaaagcagggagagaattgcacgatgaacccccatgcacccatcatcccactgcaagaacttgtcaacatttcgccaatctcattccagttcccacttttcttttccttcttgctattttaggatattttaaagcaaattccagacatttcatttcacccacatccataacacgccagggtgcattcttgatgtaaggattttgttttgttttataacacccatgacattgccacacttaattgatttaacatgaagaaactaagattcttgcaggtggagaaaagatctaattaccaccttaaagcctctcctactagcgcttctcagatctgaacgtgtatgcaaatcacgtgggcatcttgttaaaatgcagattctggcccagcaggtccttccgggtgagccctgagagtcttcaattccaaaagctccctggtgacgcaatgctgtgggtccatgaatcacactagaggaagggtcggccaaacacccacaacaactgggtgcaaagtcctgactgttcctgactgcagggccttcagtgaacggggaagctggggaccattagggaaagaagggaggtttttcgtatcagctccaggccttgtagaactgccagggaataacagacacaagggcagcaaagtctaaccaacagcacgagttcattcatattccacaaccactgcagcaaagaaccatgaaatgggtggcttcaaacaatgtctgggccgggtgccgtggctcacacctaaataatctcagcactttgggaggctgaggtgggtggatcacttgaggccaggaattcgagaccagcctggccactatgccaaaacctcgtctctactaaaaatacaaaaattagccatgcatggtggcaggcacctgtagtccctgcttcttgggaggctgaggcaagagaatggcttgagcctgggaggcggaggttgcagtgaactgagatcgtgccactgcactccagactgggcaacagagcaagcctctgtctaaaaaaaaaaaaaaaaaaaaaaaattgtctggaagccagaagtccaaaatcaatcaaatgtcagcaggagcatgcttcttcagaggttctagaggtgaatccattccttgcctcttccagcttgtagaggctactagaattcctcaacttgtggctgcatgatccattctttgcctctgtgatcaccttgcctcctcctcttctgtctgggtctcctcctctggaggaagagtgtcaggcctctgagcccaagctaagccatcatatccactgtgacctgcatgtacatacccaggtggccagttcctgccttaactgatgacattatcttgtgaaattccttctccttgctcatcctggctcaaaagcccccctactgagcaccttgtgacccccactcctgcctgccagagaacaacccccctttttcctttacctacccaaatcctgtaaaatggccccacccctatctcccttcactgactctctttttggactcagcccacctgtacgcaggtgacataaacagttttattgctcacacaaagcctctttggtggtctcttcacacagatgcatgtgaaattaggtgctgtgactcagatcgggggacctcccttgggagatcaatcccctgtcctcctgctctttgctctgtgagaaagatccacctacgacctcaggtcctcagactgaccagcccaagcaacatctcaccaatttcaaatctggtaagcggcttctttttactctcttctccaacctccctcactatccctcaacctctttctccttccaatcttgg

SEQ ID NO: 37699 - DNA, 2300 bp, Homo sapien
tggccctactaattctcactgccttgatatcttaccagtgtcttcaaacacatatttatatttttttacattttgttcagtttttctgattgcacttggttgtactaaaagaacctagtcagccattccagaaatacatgaagttgttttgtttttattattgtagtggtgattgttggtttgtacttttgctttcacaaactatttcaaagcaattttgatttttagggttatatttcccagacctctactttcactgcccattgccctctgctgttagtggtgattaggtgaagagtttgagaaatgtaatggaaagggcgtgggttttttttttttgtttttttttttttgagacagagtcttgctctgtcacccaggctgtaatacagtggcatgatctcggtcctgcagtcctgcctcccaggttctagtgattcttttgcctcagtctcccaggtagctgggattacaggcacgtaccacaacgcctggctaatttttgtatttttagtagagatggggtttcaccatgttggccaggctggtcttgaactcctgacctcaggtgatccacccgccttggcctcccaaagtgctaggattacaggcgtgagccaccacgcccagccgggcatgggctttttaagcacacagacctacattcaaactgtggctccttctgattgtgtcagcctatatgaattaattacctgtttaaaattacctttttaaaatttctctttcctcatctgcagacgggtttagtgagaatgaaaaaggacattgaaattaaattttatttaaaatgaaataatgtatggacagcttctggtatataataaatgcttagtaaacttatttttttaattatcttgaggaataggaaactagagttaagaccaatcttttaaggaatttaatagaagtttataacttcaccatatagtaattgttaacaaaagcttaaaaagggcgtttatgtcaatgtttggttgtggggcagttcaacaggcatctgtgtcccaggtaccctacttaatctcgttaatattatagattccatccaaaatctagatcttgcagtatagagcagaggtcagcaaactttttcttttttttttctgagatagtttcactcttttgcccaggctggagttgagtggtgcagtcttggcacactgcaacctccgccttctgagttcaagtgattctcccaccttattcttaccaattcttcccaagtattcaccttattcttcccaagtagctgtgactgcaggcatatgccaccatgcccagctaattttttaccatgttgtccaggctggtctcaagctcctgacttcaagtgatccacccgccttggcctcccagagtgctgggattacaggcatgagccactgtgcctagccagcaaactttttctataaagggctaggtacggttttgtgagacatattgcctctattgtagctattcactctgctgttttagggcaaaagtagccgcagtcagtatataaatgaatgggcatgggtgtgttcaaataaaactctatttacaaaaacaggtagcaggccaggtttggtccatgggtcctcaaactgtgctgaccctagtcctccacaagctacaagtgtttttttacgtttataaaggattgtttaagaagaagatgcaacagaaaccacatgagacccaaaaagccaaaaatattttatttctagttctttacagaaagggtttgctaacttttgggttggagaaggggtggtggttgctaccagagaaaaagaagtagacttccgtactcagagttaacagcaaagaaagaaaaacaacacgacaggaagccctggatccacaaaggatcctggtgggaagaataggaaattctgtgtgcaatactgacatactcatccataccccaccccaactgtgactgtcctactaattaatctggttttatggattttccataatgtgctgttttagcagcaaatagaggggtaaactcatagataatagctaaatactgttagaaattaactttccgttatagctaaatgttaccagaatttttactccggttatgtatacagctttgattttataacatcctgctaatttttgttcttacagaaatacactttcgggaaatggcctctaaatcctggctgaattttttaaccttcctctgtggatcagcaataggatttcttttatgttctcagctatttagtattttgttgggagaaaaggttgacacccagcctaatgttcttcataatgatcct

SEQ ID NO: 37700 - DNA, 2300 bp, Homo sapien
gtgtgtcaggctcaggctccctgaatggactgaattcctctgcagcaggaaatgtgtcttactcatttttttcatctcctatgccagcccatgcccagtacaaagcaattagtgaatgaaaaattatttatcaagttcagcggtggacaaacctgtcttacctgaatgaaacagattggggattcctgcattcactgttctatccattcaaggtttggtatatttgtatagccaagagattgggctcctcaaggatatgagatgtctatgctttctgactgaaagtagggtgattttgtctgctgttgtccttttggattgtgaatcttgatactcagagggacatgagaatttttattttttattttttttgagatggagtctcgctctgtcacccaggctggactgcagtggtgggatctcggctcactgcaacctccgcctcccgggttcaagcaattctcctgccttagcctcccgagtagctgggattacaggcgcccaccactacgcttggctaattttttgtatcttttttagtagagacagggtttcaccatgttggccaggctggtctcgaactcctgacctcgtgatctacccgcctcagcctcccaaagtgctgggattacaggcctgagccactgtgcccagctgggacatgagaatatttttatgttccacccagcttttcccattattccctctcagttggttaactagtatattatatgcctccattgttaatttctcataggactaagcttctgtaacttgctgtttgaccttaattttaagcatatgcttcgtcaggatactgcccagaacattgctactgaaagtcagttcatagactcattctggtcctataactaaagaatgtctgcttatttgggagtaagcagaaacttttattgtaattggagtaattttgtctgaagctaaaaataaaaatttaggacttgttttatattttagttttatttttcttataattcatttttatcctatttacacagtgtagacctcttttagaaataaaaattggcctttcaccacagatagcttgggaagtactcatctagaatctcatcattgagctcttcctctgtaccggtgctactcaaaatgcggtcctggcctgacactttgtcagctgtttgtctgcacaagataatgaggttacactaggatgtaaatcagttttacgctcactgcttacttaaatggacagttttaagtttcagttttaagctcactgcttagttaagtggacattttgattggttggttctgatagtaggcctttttcaaagtaatgtgttgctttctgttctggtataagctccttatttctttgcaaacctgtagtttaaagagcactgctctagaccatcttggaattcccatgtctaccattgttctcttctgtttttgattggtggatttacattttggaatgaggtatgtgactatcagaaagtaatctcaactcctgtgctttgaccttttaccacctcagggtacttgtagaaattcttaatagtggattattgtgaacttcaaaaatgaactgccacttcagcagcatgtctttcctgctcttcagaaactcgttcagagcagtgagaaatttctgtcagtaatctattaaaaactggctgctttcttttatgaagtgccaagcagagactatttaaggcagcatttagcatgcctatgaagcaccaggagaacttattaaaatgctgattctgagtcagtaggtctgggcctaagattatgcatttctaacaggctcccaggtgatgctgctgcttttaatcagtaaactacagtttgagacgaatttagattataatgtcaactcttactagctccagtgatgtcctagataacactgacatgaaaccaataaatcagagtgtcagttcacattaggatgagtttgctttcctttggctaaatcactaatagagggataaatagggactttgaaattaggacagtgctttcttcagtataatttattaatatttggattttacatctatgtaaataaccttttaaaatgttttgtttaatagatgagaacacagacattgctgaaaacctctatcagaaagttagaattctttgctgggttatgaccggccctcaaaacctagagaaaaaggccaaacacgtcaaagctacttgggcccagcgttgtaacaaagtgttgtttatgagttcagaagaaaataaagacttccctgctgtgggactgaaaaccaaagaaggcagagatcaactatact

SEQ ID NO: 37701 - DNA, 2300 bp, Homo sapien
atttattaaatattcagtcaatatgaatcttctcttggaacttgccagactatctccctcattctttacaaagatgtcagatggagcctgaagttttgttggagtcacctggatgacaccaacattctccagataccaattctgactctaggttgactgcttaattcatctctttttctgtcttcttaattttcttgctttcttgttcgttgtattgttgttgttttattttaaactttgttctcataccaaccctattaggaatttatgagaattacataactggacaaaggtttaaatctgacctaccttagggccacctgatatgatttttcagtcaataatagctaacatttattgggcatttattttaagcaaagggtaatttacacacattgtctcctttaaataaccaccttttacaaatgtggaaattaaagcttatagagattaaataacttactcaaggtcgtatactagcccacaaaatttgggttcaaacccaagtctaggttgagagctttgtctcaaatactgtactgtttgggttgatacatatatagatgaagtgtattgggttgtagacacctaatgggcaaggctttgtagtcattgaatgccctagaggtatgtttccgagtatgagccacacaaaaaattacagtgagaaaatgaggaagagaaagcagatgttggagaaggagatttctccttgtatagctgctcctttgatttgaagaaatctcagtaattttatccgctaaagagtgtgagagaatattgtttcatttaaaaatactttccacagtttcacttggtttcaccaatttcaattggttttaaatcattaggatgtctaagtaaactattgatttcttccacaggtctagtacattaggttcctctgctttaccttgccatctttaatgtttgtattcttttaaaattagctggtcctttataagtatgtaaatattgtagctagcaatgtgctgtttattaacaatacctgtttccactacttttttagggtcctggttgctgctctgatcttgcagtttcttttcactatgttgattctacaaccatgtatgagttagaatacctcgtttatcatcttcgtccatatggttatttatacagatatcaacctaccttacctgaacgtatactaaaggaaattagtcaagcaaacaaaaatgaagatacaaaagtgaagttaggaaatccttgaaagaaaatcatgaatgaacaaaggtaatatgtctagcactgcactgaaaaaggacttctgcatttctgacatagaacactggaatcccagtgaggaattctaagtgaacattccttatagaaacctttcacatgaatgactataaactgaagctttaaatgagctgtgaagtgtgttaaaatgtgttttgatacagtaatatataaatatgtctatatatatgaggaacttgtgttttttaaatggtggccaggtagaggaactagaaaagagattttgttgcctgttttctgaccatctgtgttattgtcactgagaaactaaaatagtaaatttactaaaactacactgcaccatgttagtaataaacagatctgccttaaagaaaagaaaattttagaaagaaatattgttgctcagtgttgttaatatagctcaagaattgagtttatatttgcagtatgctataaatgatacccccctaccacacccacacacacagtttttgtctaatgaaaatgttgctgtgattatttataattggtagtatttcttccagaagaagctaaaataagactggcacttaccctgaagtgcattaataaaaccacactttaaaattatcatgggccttgactatattatatacttgattctaattagtcatcttttacgcaatctctgttgtctcttttctaaatgtgtttagccactcttgaataccattctccactattaacattaatttactcaaaccgttcatagcattctgtaaacatgtattttacatatttgttcccaaatttgcccattgttcattatgggtaactaataataaatttaatgctgtttcaggatgcttttcttataacagtgccactctcaggaattactaagtgacattttaaattgatattttaaactctttccaactacatagttatggtttatttcattctcatcctgttgggatgagaacttgtttgtgcctttcataacttgtttaaagcagagttttaaaattagtttataggatctgaggtggctattagttacagtggcaaga

SEQ ID NO: 37702 - DNA, 2300 bp, Homo sapien
ttaactataaatcacttatttatgtaaaataatacgaacataatttctatttggggttctgtttttgttattgtattttagtaaaccttaaaatataagagatttaaagcttacttataacctgagtctgccaagtgttttctatttctttgtgtatggttttaagttcttcagcctcaaatagtacttcactgggtgttttcaggaacctacatctgtttggggaggaattgctatgttataatcctctaggactttgagtccaaggatatacacaccccagcaatcatagtcttatagccactaattcaattcttcttatagcttttggggtttgggtattaccccttagaagccaagttattagctgaataaggaagtaacacctccaacaatgctgttcactcagcatgtttcttaaaaaactccttgttatccgagcaaatcctaaggatatacacccaagatgagttatggagaattaattactgactcctgagaatctaaaaatggggcagcagcccaggtgttctcatcctggagtcatgctgtttcataaatgcaacttaccttaggtaaacttagtgtttatttttgatagtgcaacaagtatagagctcagacccgtttccggtgacttcctttaggaaatctcagtatatatttgttcattaatgtgcaataagaataagctttctaaaatttggacaagtagaaaaaagtggtatttctgttctttgaataaaaagcaaatgcatttaaaacacgcataatacacaagtaggtaaatttatcaaaaggaaaaagtgatcaatcctatttaaactacctgttttacaattgcaatagtttcttattcagaaatgtattaggtcaacttaagtactatttattacatcagaactaccaacacctttagtaccctgtttggaagaccgaacatggatcagatgttagtcccaccttagatatagcaaatcatttatttccattttaatagttgaaatttagaaagcaaacggacccagaggggatatgcccacaagcaggagatgaacgtgttccaaatggcagtatatttccaaggagacttacaggctttttattccaaggattggctcaatacttcattactcagaaagtgtgtttgatcaggcgagaccttcaaatttgagctcctctgtggtcaggggaatgctaatgactgtctgacagcttgtcacagacattggattttttttcttagcatctctggccagatttcctgttttctggcagctgtgctggtgcagattgccaagaggcaccatacccacaatcttgagaggattctgtttccagcaagccttcttttactgtcatctatgtattacatctctatttcaagtctctctagaatttatagtcatactgggcatttagtttcaatttgcatttgtttgttacgtggctttacatgactttttgtctacttcatgaatctgtccgatcttcccagtagatctaagtacctggaggatctgactctctttgacatagagagactccccagagaccatgcctttgatttcatttatagccctttaggacagtgtttccccctcaaactctcttgcagactggtaaatgtcctaaattaccatttaggagtggggaatagaaggaatggagtaggaagtgaaatccaagacaagtcacagtacctgttcataaaagggaggggttgctaggcaggaaatctttgccactctggtcttttctcttagagaacactacccaggactgctcatcgatcattgtcaactatttacttttacgttagggtaaaaatgaccttatatgcaagtagtagtgattcttagagtaatatatgatgcctaaacaatatctgcaggtggtaataaattagaggtgtgacagggcagtgcttcacaaatgttccagctcaaggtacaatctcaagcttgttccagcaagtacatgcccatgtataggggttaggggctttgtcttctaccttcaccattcctaaggtatttaaatccaagtctctaataacttattctggtttttaaagagggtagttgttcacatgataataatttcaatagggctgagatgttttggagcatggtagatgggcatcactcctactgaggcttgcaggcaaagaggaagacagatattgacatttctcagcactggtacatgtgctgcaagtcacctattggtcagttgtaagagcaggtgcaggacagtgtatatacaagtcaacactgggagaggcacatgtaagagct

SEQ ID NO: 37703 - DNA, 2300 bp, Homo sapien
atatcactggtttgtcctgaccaaatagaaaaatctggaggctaataaggcttatgccaacattaaatggtaacacgtaaactccagaagattaaaaatgtttaatatcattcagtttggagggtacaatcccttgtctttattaagggttaataaatgctgagttggccttggagttaactagagtccatggtcaacagacaggaatggagagaaagaataggacttgggagtattgctaacattggttaatgttcagaaagttacctaactaaaataagggatcgagcaagccaacagcaaggcagaaaacagtcaggaaatcaaaatgaattaagaagtacctgctgaatgaaaaaaaagttatggtcatctaaagagatgagaaatgcaagtaactgggattaattagaggggatgttctattctctgtttttatgaaagcagataatgatgaataaacaggttgatatcgggaatttatctcaaaagaacaaccatttatttatttatttatttatttatttatttatttatttattttgagacggagtctcactctgtcaccatgctggagtgctgtggtgtgatctcagctcactgcaacctctgcttcccgggttcaagtgattctcctgcctcagcctcccaagtagctgggactacaggcacgcgccaccatgcccggctaattttttgtatttttagtatagatagggtttcactgtgttagccaggatggtttcgatctcctgacctcatgatccacccgcctcggcctcccaaagtgctgggattacaggcatgagccaccgtgcccagccaaagaacaaccttttaaaattcattgtacaatgccaggcacagtggatcacgaggtcaggagttagagaccagcctggccagcatggtgaaacctcgtctctactaaaaatacaaaaattagctgggcatggtggcgtgtgcctgtagtcccagctacccgggaagctgaggcggaagaattgctggaacctgggaggcggaggttacagtgagccgagattgtaccactgcactccagcctgggcgacagagcgagactctgtctcaaaaaataaataaaaaataaatagaatttattgtacagccagtgctaatctgatgggcttctctatgctaagtttatcctttcacattaactgatatttactaatgagccatcctaggacattgatctaatttaagctatgattaaattatggtcagtatgactttataataaaatttatcccaattctttggaaaccgattattcattctggcaggcctgtacctggcaagtttgtgaagtaagtgaaaggcttcagtttggcttcatccttcctccttcacccacctgggagtggagtctgatgtggctgggcacagcccatcagtgcctcatgccctgcctatgccgtgtaccagcacactggccctaaggaaagcataccattctcagaaacttttttgctatttctcaccttctccagagctttctaacctagggttctacttcatcagtaccctgctggctgactggtgggtttgtttatctgatatattcaatctcacccagctgtgaatgtgtcagaatagccaaagacatttcagagccaacttatattttaatccttgaagagctttatcattatatctggagttagtaatttgttacagcctgtaaagaatatttgcaactggctggccatttgctctccttaaaaccagaggtagctgccaattcaacttattatgggtgaggctagctcttgacaaggagtgattcacgttgaacagagacactttggatgaacatacattcaagtcattcttttgcctctttgtgtcatatatattattttagatgacctcttacacaggatgtaaaaatgcttttataagttcgttaacttagcagttgatttcaagtaatgggaaattacatattttaaggagagtgcagatctttttaaatgagttttaagtattgtttcattgcttctactatctctcttttctacttcttttttaaaagacaccctgaagcaaaaattgtttcaaaaaatttgtgaggattttgattcctatctcgttcaaatttttggttcatcgtcacctcaacctggatttgggatgtcaggggaagaactcagtgaatctactccagagcctcaaaaagaaatttctgagtcagtaagtaactgtctcacttactttgtgagcttaaaatggtgtattctctctgtttcatatcaaagatcattctgccctgcatt

SEQ ID NO: 37704 - DNA, 2300 bp, Homo sapien
gtgttgaaagtaaagaaccagtagaaatggagaggcaaagatacatggaagtgaagtaattgatggtgcaaggtcccagaagaggagatatacatggggttcctcctcttactctttgtcacctaaaagaaggtaagaatggtagtgaatcaagatgttggaggagggaaggaggaagcagtgggaggttgtgcaaattctagctaatagttttaattttcttttctgaagtaggaggcagtgtcatctcctgagtgcaagcagaaaagttgtcctcaactatgtatagtaggagtggataaggaagagatttgtattgatctgaggttttgtgtgggggtttgaggccagggtcaaaaccactgagaagattggcaagatagtgtttgaagtgatgaatactgtcatgtctcctctcagtaatacagcactttcttcagcctacattcttctaatggcaggattggaaaggcaatactttccccaaactcatcatcttatcaaaaccatctgccaccaagatcatcaggactaagctcattatgctgtttacagccatcaccaccacaagcccaagaccacccacttttaatcatgaacagacaagcaaagactgtcagacatctgaagactgcctcgaggtcagactcgtgacacctgaggcagcaccattcactcagttttgggaacaaaaaacttggaatcctctttcaccgtcattcacttggtcagtcaccaagctctgttcatcccgccttctaagtattccccagggcccccacttctctccatgcccactctccgtgccactggtaacctgcgtttctatcatccctcattctgatactctatccctccagctctctgcgcaaaaactgatcatactggccgggcacagtggctcatgcctgtaatcccagcactttgggagaccgaggtgggcgcatcacgaggtcaagaaatgagaccaccctcgccaacatggtgaaaccccatctctcctaaaaatacaaaaaattacctgggcgtggtggcgcgcgcctgtagtcccagctactcgaggtgctgaggcaggagaatcgcttgaacccgggaggcggaggttgcagtgaggagagatcgcgccattgcattccagcctggcgatatagccagactccgtctcaaaaaaaacaaaacaaaacaaaaaactgatcataccacttgcctgattaaaaactttcgatgactctaacattgcctttaggtaaatgccatccaaactcactaaactggtttccaacccgtttctgaaagcaccttaatctctccccacttcctctgctcattcatccatacctactgcctcctcactgctatgtcctctctcctgacccggcacttgctctttcccagtcctagaaggctcttctcttccagttcccactgcccttttccctttcctggctaatcccatactcatccttcttgtctcaacctagtggtccttaaggaagctttgctgacccccgacaccgagcgggcgtccctcctgtgtagcactgtgttagccctaccaagtcaaggctctccttgcctgtttcctgccggaaccatgtctttttacttcactcctgtctcctcagcattccagcacagtgctgggtacataacaggtgctcaagacaagtttgtggaatgactaatgagtgaataaatcattaaccaaacaccttggatctcctactacatcatttgcaaaaaaaaaaaaatgtttaatagaaattaaaatggacccagtgagctagagtgtgtgaccctgcttaaaaacgacagagtggttctgagaagcagtcccagcctaggaacccggggatccggcctgtggacccacgggcagggcctgcggggtgcaccggcgctttcgggcggaaggcggggcctcccggccagtgaccccgccccgaggcgcctcccgggcggggaagggcggggctcgcgctgggaaactccccttccaaggccgaggcgccgctgcgcgtcctccaggcgtggtggtggggtcgtgggtcccagcccagtggtccaggtcacgggccgcacggccgcggccgccatcttgcccgcgtccgggctcctgcggcgggcggggcggtgtcccggccggaagcggctgtgcggcggccgcgctgccacctcaggtcagtgagcgcgacccggttcgcgtctcgactctcgggagcgccgcggccgcagcgaggggccggagatagcctagttgaaaggcccgggcgtctcggcggggagcgcgttccgcgctg

SEQ ID NO: 37705 - DNA, 2300 bp, Homo sapien
acacctgaggcagcaccattcactcagttttgggaacaaaaaacttggaatcctctttcaccgtcattcacttggtcagtcaccaagctctgttcatcccgccttctaagtattccccagggcccccacttctctccatgcccactctccgtgccactggtaacctgcgtttctatcatccctcattctgatactctatccctccagctctctgcgcaaaaactgatcatactggccgggcacagtggctcatgcctgtaatcccagcactttgggagaccgaggtgggcgcatcacgaggtcaagaaatgagaccaccctcgccaacatggtgaaaccccatctctcctaaaaatacaaaaaattacctgggcgtggtggcgcgcgcctgtagtcccagctactcgaggtgctgaggcaggagaatcgcttgaacccgggaggcggaggttgcagtgaggagagatcgcgccattgcattccagcctggcgatatagccagactccgtctcaaaaaaaacaaaacaaaacaaaaaactgatcataccacttgcctgattaaaaactttcgatgactctaacattgcctttaggtaaatgccatccaaactcactaaactggtttccaacccgtttctgaaagcaccttaatctctccccacttcctctgctcattcatccatacctactgcctcctcactgctatgtcctctctcctgacccggcacttgctctttcccagtcctagaaggctcttctcttccagttcccactgcccttttccctttcctggctaatcccatactcatccttcttgtctcaacctagtggtccttaaggaagctttgctgacccccgacaccgagcgggcgtccctcctgtgtagcactgtgttagccctaccaagtcaaggctctccttgcctgtttcctgccggaaccatgtctttttacttcactcctgtctcctcagcattccagcacagtgctgggtacataacaggtgctcaagacaagtttgtggaatgactaatgagtgaataaatcattaaccaaacaccttggatctcctactacatcatttgcaaaaaaaaaaaaatgtttaatagaaattaaaatggacccagtgagctagagtgtgtgaccctgcttaaaaacgacagagtggttctgagaagcagtcccagcctaggaacccggggatccggcctgtggacccacgggcagggcctgcggggtgcaccggcgctttcgggcggaaggcggggcctcccggccagtgaccccgccccgaggcgcctcccgggcggggaagggcggggctcgcgctgggaaactccccttccaaggccgaggcgccgctgcgcgtcctccaggcgtggtggtggggtcgtgggtcccagcccagtggtccaggtcacgggccgcacggccgcggccgccatcttgcccgcgtccgggctcctgcggcgggcggggcggtgtcccggccggaagcggctgtgcggcggccgcgctgccacctcaggtcagtgagcgcgacccggttcgcgtctcgactctcgggagcgccgcggccgcagcgaggggccggagatagcctagttgaaaggcccgggcgtctcggcggggagcgcgttccgcgctgtagggtaatcgcgccgggcggccggccgcctggccgggcctcagcgggagccaccgggggctgcgggcggccgtgggacctgcggagacctcctcggggcgcagggaacacgctacagccttcgccgcggcgggcttgtggggagcggcgtcccagcctttcccgggaggctcagccaggtgcctggagcgggagagtcggactcagattcctgctttacctagaatagcaacgtgccctgttcccgttgtaccctcttaaatactatacttcttaaacggcctgtctcccggtgagctctgttctcttctcatatgagtaatgaaaattaagaggatgaatgaaacctcacacatgttgtggactttgctgaataggttagcaaatgactgcaggccttttgtatattttaagggaaatttggatatgtgcagtgcatctcctcgaagatgctgatggtggaaatttcttgaaaccgctctcgtaatttgccacggtaagaaaagtaaaagacaacatcaaaaagcatgtggttggatcctttgtacactgagtagtattttaatgtgttggacttcactgtccagtagccacatgggattgagatgtgctataagtgtaaaatacacatcggatttcccagagttggtgcc

SEQ ID NO: 37706 - DNA, 2300 bp, Homo sapien
taatccactttctcagagtgtggtatgtgtgtaccactggtcataaacaggatgctttgtagataaaacacaatcaagcctttttaatagttatatatttcagtgtaggttaaaaatatatttagcatagcataccatgattcatggaccttatgaagagattaaagtcaattttcagattttaaaaatgagtcagtttaaagaaaaatattaatggcataggtgttacatgactgaagtttgggaaatactaatctaaaccagctcctacattgtgtagatgagaaaacaaaggggttccccacacacaatgacttttctgaggcatataactaatatacggcagagctaggactagaactcaggttcgttcagtacattccagtgtttattctgccatacaaggctgatgcttattactaaagttgaagaaaccgctgtcttagtatgacattgtactttaaatctccattgttcattacgatgaccacatatggttatttatattaaaatttgttaaaattaaggtttaaaatttgaattagtcacatttctagtgctcagtagctacatgtggctagtggctaccatattggacagcatgaacatgaaacatttctgtcattgcagaaagttttattgggcagtgctgctttaaactattgcttaggaatatgattcataagttttccccccttcaaagggataatacttattaatttgcttaccacactgaagttgttataactctgaagttaagctgaaggtactagtaacagtgcaattaagataattgatcatgggaaatatagccaggatgggattctcagattcctaccagctcattttattggaagtggttgttctttctccttttttttcaataaatattttcttgaattcatagcagatagagagaagaaatacaaatatattgaaaaagagggttcttgaatagagaattttctgactttctgaatagtttattcaacgtaagaattatattttgctgatattttaaaactttttatttttaaacattttcagtgaatggacctgagtggaccctttgatcacatcagtaaacatgagcggtaccaaacctgatattttatgggcaccacaccatgttgatagatttgttgtgtgtgactcagaactaagtctttatcatgtggaatctactgtgaattcagaactcaaagctggatctttacgtttatctgaagactctgcagctacattactgtcaataaattcagatacaccctatatgaaatgtgttgcctggtatcttaattatgatcctgaatgtctgctggcagttggacaagcaaatggtcgagttgtacttacaagccttggtcaagatcataactcaaagttcaaagatttgataggaaaagagtttgttccaaaacatgcacgacaatgtaatacccttgcctggaatccactggatagtaactggctagctgctggtttagataagcacagagctgacttttcagtgctaatatgggatatctgcagcaaatatactcctgatatagttcccatggaaaaagtgaaactttcagcaggtgaaactgaaacaacattattagtaacaaaaccactttatgagttaggacagaatgatgcttgtctgtctctttgttggcttccacgagaccagaaacttctccttgctggtatgcatcgtaacctagctatatttgatcttcggaatacaagccaaaagatgttcgtaaatacaaaagctgttcagggtgtgacggtagacccatatttccacgatcgtgttgcttccttctatgaaggtcaggttgcaatatgggatcttagaaaatttgagaagccagttttgacattgactgagcaaccaaaacccttaacaaaagtagcatggtgtcccactaggactggtctacttgccactttaacaagggatagtaatattattagattgtatgatatgcagcatacacccactcccattggggatgaaactgaacccacaataattgaaagaagtgtgcaaccttgtgacaattacattgcttcctttgcgtggcatccaacaagtcaaaatcgaatgatagttgtaactcccaaccgaacaatgtcagacttcactgtttttgaaaggatatctcttgcctggagcccaattacatctttaatgtgggcttgtggtcgtcatttatatgaatgtacggaagaagaaaatgataattctttagaaaaagatatagcaacgaagatgcgtcttcgggctttatcaaggtatggacttg

SEQ ID NO: 37707 - DNA, 2300 bp, Homo sapien
tgtagaaagctgaaactggatcccttccttacaccttatacaaaaattaattcaagatggattaaagacttaaacgttagacctaaaaccgtaaaaaccctagaagaaaggcaataccattcaggacataggcatgggcaaggacttcatgtctaaaacaccaaaagcaatggcaacaaaagccaaaattgacaaatgggatctaattaaactaaagagcttctgcacagcaaaagaaactaccatcagagtgaacaggcaacctacaaaatgggagaaaatttttgcaacctactcatctgacaaagggctaatatccagaagctacaatgaactgaaacaaatttacaagaaaaaaacaaccccatcaaaaactgggcaaaggatatgaacagacacttctcaaaagaagacatttatgcagccaaaaaacacgtgaaaaaatgttcatcatcactggccatcagagaaatgcaaatcaaaaccacaatgagataccatctcacaccagttagaatggcgatcattaaaaagtcaggaaacaacaggtgttggagaggatgtgaagaaataggaacacttttacactgttggtgggactgtaaactagttcaaccattgtggaagtcagtgtggcgattcctcagggatctagaactagaaataccatttgacccagccattctattactgggtatatacccaaaggattataaatcatgctgctataaagacacatgcacacgtatgtttattgcagcactattcacaatagcaaagacttggaaccaagccagatatccaacaatgatagactggattaagaaaatgtggcacatatacaccatggaatactatgcagccataaaaaatgatgagttcatgtcctttgtagggacatggatgaagctggaaaccatcattctcagcaaactatcgcaaggacaaaaatccaaacaccgcatgttctcactgacaggcgggaattgaacaatttgagaacacatggacacagtaaggggaacattacacatcggggactgttgtggggtgcggggaagggggagggatagcattaggagatatacctaatgctaaatgacgagttaatgggtggagcacaccaacatggcacatgtatacatatataacaaacctgcacgttgtgcacatgtaccctaaaactttaataataataaaatttaaaaaaaaataaagtgctggctagtggctcgagtatctaaacctccctggtgctttgcctgcaatcagagattgcatccatccatcatgctttgtgattcaaatagctggaatttctataagcttatttaactgagagttgatatttttatactcaattgtgctttgaagattagaaatctgttgaaacagttctaacatcattataaacattataaatattatttattcaacaaatgtttatttggtacctattgttccaagtgctagaaatgttacagtaaagaagacaaaaatcgctgcccttacagaatttaacttctggacaatgacacattttttaaaagttagattatctactggtttccttcattttcttcttacattatgagttaatgcataagtgaaactctagtttcgcctaaagtgttctgtggcacttgtcttcataattcactataaatcttttaaaatttgaagtcatttgatcttaagcctttatacttggcagtgagatagaccttaatacttccagtttcgtcagaaaaatataaggatatgccttgttctgattcagtctgttatctgtttatgttagaagttacaaaaacaaagtgacaagcactaatgagagctttacacaaaggtgtaaagtagtgtacatatcagatctatattttatttatctcttccccctttcctttttgccctctcattattaattgttggtgaccctttcaggagtaattctagtgtgtttacatctttaatcattgaattacttacacatcctttcacctcatatcattagcaaaaacggatattttttaaaactattcccgactgcaagattatccttttggtcatgaaagcgtgacctgcaatggtccaagcaaaatttttaacatagttatcgatgcataatgtctttatagatagcaattaagtaaaaatattaagtctaattaagcaattgtttaagttacacaagtctcatgaagtgcattgggaaactttctgctttttctcttctttgaaagggcttgtacagatgagaattacctgtcccttgatagatttttttttttttttgagac

SEQ ID NO: 37708 - DNA, 2300 bp, Homo sapien
cattgatgtgtgtactctcccctatataatgcacatcaacttgctttgcaaaacaatgctaaagtacaaaagacttaaagctgtaatataaaatagactttactgacttgcaccaatacaaccacaacttttttatacaccactgacacacattctacatctgtttaatgaaatcctttaaagtaccgttagtgagtaaaactaagacaaacctattaagtgctaaggaaacactaagggagactatcatttaattatcgtacatgagattccaatcttaaattgccacgtgaagtctcaaatcggatcttttttgcttaagggaatttgaacgatgacaattctgtagctttgggccaattcacagactcagtttccacaacgttataatacccaattaaaacttctgtccaatttccaccgtaccgtttgaaggtatttttatgtgcactcattctagaatactcctggcaaggccgccggcttcgggtcacaagatgagccagggacagattggagactacccccaaatctcccaggaatcggttatcttccagacctccagatcgccctccagagtctcgcagtgtggagggcaacgacagaaagactgctgagggggtttaaactgttgagtcaaacatatggccaaaagtcagagtcaactgggaccttgcaaatcattccgcctaacccttcgttttgcagatggggaaaacacgcctcagaagggagaaccctagctcggggaaccctagctcggggtctaacaacgatttaagcttgtctcccctagtactggccagtggttcttccccgttacccatccttaagtgcttctattggctgccaacacggaggggttagcggggtgaaagaaccggcgcctccgcagtgtggccaggttgggctaaaaaacgtcttagaagtaatcggatcaatctctcttcttacaggtggagaaagtggagaaagtagagtgacgcagctaagggagtaaatcgaccctcagccaacaagtggcaaaagcctgaagaaagtgatcaagatcactgatgaccccgctgcccatctccaagggggcgggtatcacaaccccgacgccacaccacgtatcattccgcaaaactcccgcgcctcccacgcagaactggcaagagggaaggcgagacagcagtgaacagctggtacgcagcacccacagcaccgcggcagcagctagtgccgactcccgcctagctcttttgactctgttcgcgggaagaatggggaaacagtaaggttgcggcgcctcccgcgagacgaggtacctgaggctggccccgcagtcccccgccgcaccagcaccggagcttcacaccccacttccggggtcaagtcaccgccgggaatcctgtgatcgcagaaaggtagtctcaggttccgcccctatccaagtcccgcctccactgcctctcgccctgtatctgtcaacttccgggacgccgcgcgtcactaagcagccaatctccacttccggactcatccagccccttctccacccctttcagagacagcgcgattgcgatttaggtttccgcgcatttaattggcgaagctggagcgctagtcttcgctgattggtgccgagaaatctgccccatagacacccgcggggcgcacagtttcagtcgtccgtgggtttcccgccagccgcagtcttggaccataatcatggtggacatgatggacttgcccaggtcgcgcatcaacgccggcatgctagctcaattcatcgacaagcctgtctgcttcgtagggaggctggaaaaggtgtgcgggttcgcaatcatgggctcccaagtccgtagctggagggagggaccccgcctggataacgggggatgaaaaaggacggaaagcctccgatcactgcgcccccgactcctttattttgcacaaggaactttttggaaattctttagccgttgtagccccattttggcgctcttttatggcacggaaacaaagtgttttcaaatgctgagttctaaattccagtgcccgtcgcctccgttctagccgtgcttacgtaagggaaattataaacaccactcccacatctaccttcagatttcttagtttactcagacgtgacggacgcagacaaaactaatctgctggtttccttctcttctgaaattacttatttttgcaaacctcgtttcctcgttgtgatcgcttctctgtaaaacatgccttggttgtccgctttgggtcccgtagtaacgagttatttaaccccagtattaaagtgaagt

SEQ ID NO: 37709 - DNA, 2300 bp, Homo sapien
aaagcctttgcttaaaagtggtctttctaactgcaggtaaacaacgacattaacatctggtactcacaggagtgctctttaaaaaaaaaaaaaatcactattacagggtacgcaccaaggctcacacctgtaattccagtactttgggagggagacgggggagggagggatcgcctgagcccaggagtttgagataagcctggtcaacatggcgaggccccatctgaacaaaaaaaaacaaacaacaaaaaaaaaatctttattagctgggtgtggtggtatgtgcttatagtcccagctacttggcaggctgaggtgagaggatcgcttaagcctacgagttaaaggctgcagtgagctatgtgcatgctactgcactccagtctgggtgacagagagagatcttgcctcaaaaaaaaatgctattaaagacattgatgtgtgtactctcccctatataatgcacatcaacttgctttgcaaaacaatgctaaagtacaaaagacttaaagctgtaatataaaatagactttactgacttgcaccaatacaaccacaacttttttatacaccactgacacacattctacatctgtttaatgaaatcctttaaagtaccgttagtgagtaaaactaagacaaacctattaagtgctaaggaaacactaagggagactatcatttaattatcgtacatgagattccaatcttaaattgccacgtgaagtctcaaatcggatcttttttgcttaagggaatttgaacgatgacaattctgtagctttgggccaattcacagactcagtttccacaacgttataatacccaattaaaacttctgtccaatttccaccgtaccgtttgaaggtatttttatgtgcactcattctagaatactcctggcaaggccgccggcttcgggtcacaagatgagccagggacagattggagactacccccaaatctcccaggaatcggttatcttccagacctccagatcgccctccagagtctcgcagtgtggagggcaacgacagaaagactgctgagggggtttaaactgttgagtcaaacatatggccaaaagtcagagtcaactgggaccttgcaaatcattccgcctaacccttcgttttgcagatggggaaaacacgcctcagaagggagaaccctagctcggggaaccctagctcggggtctaacaacgatttaagcttgtctcccctagtactggccagtggttcttccccgttacccatccttaagtgcttctattggctgccaacacggaggggttagcggggtgaaagaaccggcgcctccgcagtgtggccaggttgggctaaaaaacgtcttagaagtaatcggatcaatctctcttcttacaggtggagaaagtggagaaagtagagtgacgcagctaagggagtaaatcgaccctcagccaacaagtggcaaaagcctgaagaaagtgatcaagatcactgatgaccccgctgcccatctccaagggggcgggtatcacaaccccgacgccacaccacgtatcattccgcaaaactcccgcgcctcccacgcagaactggcaagagggaaggcgagacagcagtgaacagctggtacgcagcacccacagcaccgcggcagcagctagtgccgactcccgcctagctcttttgactctgttcgcgggaagaatggggaaacagtaaggttgcggcgcctcccgcgagacgaggtacctgaggctggccccgcagtcccccgccgcaccagcaccggagcttcacaccccacttccggggtcaagtcaccgccgggaatcctgtgatcgcagaaaggtagtctcaggttccgcccctatccaagtcccgcctccactgcctctcgccctgtatctgtcaacttccgggacgccgcgcgtcactaagcagccaatctccacttccggactcatccagccccttctccacccctttcagagacagcgcgattgcgatttaggtttccgcgcatttaattggcgaagctggagcgctagtcttcgctgattggtgccgagaaatctgccccatagacacccgcggggcgcacagtttcagtcgtccgtgggtttcccgccagccgcagtcttggaccataatcatggtggacatgatggacttgcccaggtcgcgcatcaacgccggcatgctagctcaattcatcgacaagcctgtctgcttcgtagggaggctggaaaaggtgtgcgggttcgcaatcatgggctcccaagtccgtagctggagggagggaccccg

SEQ ID NO: 37710 - DNA, 2300 bp, Homo sapien
tgtttaaataaaaatacacaaaaaaacaaattggcttcttctacaaaatcactattgaagatgcttttttttctcaaaaagtctttttataattaccatgaagaaagtttatttcttttgatgacagtgaaaatttttcttttgtttggcaattaggaagcttactagtcagcactatagtactgtactaatactcagtagtctatagtaccataatactacagtagtctgggtgtttctcaagtttagatggggagagtaagttagggggggaaatgattaaaaacacagatgcctgggacacactccaaacctataaaatcagaagtgatggggaagaggcccagggttattcgcttctgacaagcagccaaagtcattctgctgtataccaactgtgagtgccaccagcctagggtttttacatcccatttccccctttattctcagagatgtatagtttgtgacttttatattttaatgctcttgtgtcctttattgcaagctatattttttttagctatttacaattaagattaacaagcaatttctaagtattctacttctgaactatacatttgaaataatacttgtgactgtattttaggttctgtagcacttttccaaaaatgacatacattttcaaacagatggctttattcatgcttaccaagtccctctgaggtacactggaagaagaaactttattcccttcaaaaataaaggctcaagtccaagtcaaactgagtacttattaaacacctttaatgttcaagacccagggaggtacttctctgaatatggaaaggttagtgtaccacttaaacacagtacactgatttaccatctcttgtttgtacagaattaaatagtctagacaatttaattattttaattgatcagtgtaagttgttgtgaacaattcagaataaaagctccaagtacaagtactttctttccacattattcttctcatcttcagttcacatatgaaaactaaagcctcctaaacttaagattataaagtactgcaaagtacagtagtcactaacgtgaaaaaaaaaactactactttccatggctgtctatagctcaactctctgaaaaatatacagtcggtttgaagtcttttgtgaaatcccttgtgagactctactgttgactgtggttagaatacattcaaaagtataatcagattgcatcatcaccatcacctgctcagaggcaagttgaagaaacatgtgctcatgaggctgaagctggcttattgtactacactctcatgtgggcttgccagagagattagtcaccattttgcagctggtttcaaattcagttgctgcgatacaagtgcagatgcaatggcttaccctaattatattgctccagtttaatctttccatttgtagcatactatatactggatcaaattcaagactctggattggtttcaaatagaagagatttcaaaatcacacatttgttatcctctcctaaagcttgctgatcatatttcatcattgtatctgctagatcttctgaattcaccctaaaggtgtttttagctctctaaaccatcactaaatcttgataattaataaaaatgcagaaaaaaacagttcttaaagctttttttaacacaataaaaggaaagttatgtcatctccaaaaatactcatatgttttttaaaatttcaattttcttcctctttggaattaaatatatgagcaaattctaaggaaattaattgtaatcagtggtttctaaacttaactgatggtcaaaatcacttgggaagctttaaaacacacatacatttcccccacttcaccctgtacctgttgagtcataatttaaagaggtttctttttaaattaatctagaagttaaataaagctaatgctggtattgcttctgagagtcagaaagaaaaaagaaaggttcctgcctatctcatgcaggtctttttaactgcctgctactgtccatatttaataaatgccatctgtcaagaatgatgtctatacaaagagatgatgtaatcagaagaactttaaaataaaagaaaaaataaaatcctagcatcatcagatccacagaagctactcagataagaggctccaagaggacatttttggatgtgaaaaacaatgagaaggaggacaacacacatttacaatcgtcttaattttgtaagtatctgtttgaatttgttggatacatagttttttccttcaaaataacttaaaggtattattttgaagacacacatagtcaagtttagattatgcatttttac

SEQ ID NO: 37711 - DNA, 2300 bp, Homo sapien
taatatttcttcgagtaaaggactttttatagtgcgttatacgtattttcttagaaacatcgtgcatgtgcattgttaaacacaacgttgaccttgttgtacagacatttgtatcaccttgtccactcaggttcctgtggtctcatgcctgtagctaagcaaaccaaactcctcatgcattggtttttccagtgtaaattggaggttctcttatccctcactttcagacataggggatttcttttgcctcacaaatatgtttttacaaacacgtatgctcaaatataatttttattatgtatcataaagtcttatcttgtcactgtttttatctgagatggagtttcgctgttgttccccaggctggagtgcaatggcgcgttctcggctcactgcaacctccgcctcctgggttcaagtgattctcctgcctcagcctcctgagtagctgggattacaggcatgtgccaccatgtccagctaattttgtgtttttagtagagacggagtttcaccatgttggtctggctggtctcgatctcctgacctcaagtgatccacccaccttggcctcccaaagtggtgggattacaggtgtgagccaccatgcctggccttgtcacagttttaccatcaactacaaagagaagttcactaatttattcatctaatgtttattgaacacctattgtgtgctgggccctgcccaacaataataatgttgcacaaaacagagaacaaagtaatagggtggaatatgcattgtaaacattttgtgggttaatttatcttaaatatataagctaccaatttagttcttgtttcatgattttataatttaacaggcttataaatattttttattactttaatcactttttttttattgcaataggttttgggggaacagatggtgtttggtacatgagtaagttctttagtggtgatttctgagattttggtgcacccatcacctgagcggtgtacactatacccaaagtatagtcttttatccctcaccctctcccaccctttcccctgagtccccaaagtctaatgtatcattcttatcaacaggcttatattaaatccttcacaattttcatgagacttttccttgattatagccatgagtaaactaaacttttgtgttgcatatggagaaattaagcttagacaagattttcatactttatctccagtcaagactcatgacttttccttacattaacaaatttctaaccattagtgtcagctaagccatcatccatttctttggtaatcttccctgctgtggacattcctaagattgcccaattttatagaaaaagcaatttacaaatggctaaattagcgtctgattatgcttcaaagaagtaggctaataggtagtctctatcatgtgttaatcacaaaccattagtgataattaataaattaaaatgggccaattatgaaattctgcttatacttacccaagtgtgtttgtgtctatcctgtgtccttcaagccagcctactcaccaacttcatttagtaatgtaacccagtcaggcactagccttaggaatcaaagtattaagtgaaggctagtttatgcatttgttcattattctttcctgctgtaaggattatctgtcatctggttaattattacatataaacatacacatctactccaaggcaaatccacaaacgcttacaaagagtaagccttatgaaaaactaacttggaggacagttatccatatcataaaagagtttttatttcaacataatttgccttaagtcataagctttccaagtttgtttgaaatatgacttgatttataaaatatgaatttatttgatttttccagagtaaatctagataaaacaggatacatttaggttgtgtgtgtatgtatttatgaatgatatatgagacctgtttataattactgttcttaaaaagttagcttgtttactttgaaacaagggaaatagtggtttcttccatgatgtgaaacatataataacaaaagatacttcaaacaaatagcaagtagtttggcctcagtaatatggtcaagttttaaaaatagacatatattttacttcataggagatacaacagatgagcaaagaatgacagcaagaggcaaaacttcggacatagaggccaaccaacctttggaggtaagtgaaacagagtaagtccttttcggtgaaactgaacaagtcactatgattacttatgcctccgaggataaatagtaacttctgctcttgctatgccataggtgcctgaatacagggaaa

SEQ ID NO: 37712 - DNA, 2300 bp, Homo sapien
tgtaaaagaaaaatcttaactttttttcttcttcttcttcttttttttttttttttttttttttttgagacagggtgtcattctgtcacccaagctggagtgcagtggtgtgatcaaggctcactgcagccttgatctcccggccttttgggctcaggtgatcctcccacctcagcctccctaaccgcgtccagctagtatttttacatttttagtagagatggggttttgccatgttgcccagactggtttcaaaatcctgagctcaagtgatccgtctgccttggcctcccaaggagctgggattacaggcgtgagccaccgcacctagccagctttacatatttttaatctgtcagattttttgttcttgctattctgagaaaagtcactgaaaagaaatcatttatcattctttttacacacaaaataatgcagtttttaaattaatgagataggccatttatataaaatttgaaagagtaaagtttttattcataattaaaatatatgttattctggaaaacaaaaaaaaagtagtggtctgtcttcatttgtaaaatttcctttgaactgatgggaacttatctcacagatgagatttgtgggccattgtgaatactctacagattatgtaccccacagctttgagctgccaggtactatagcagagtgcttcctcagactcttgagccagtctgtctgggtgaaatttttagctccccatatactaactatgtgatctcaggcaagacagcttatttatgccacaactgagaccacagtaaggataataatagtatctaccttgtggattatatgaggactgaatgaattaacacacataatgttcttagaatagcggctggcacatggtgaataaatgttagctcttattataatatgtggtaaactgaggaactatcactagttttacttggatgaagtactgcatgaaatttttgtatttttattgagtttcatcaatttttttactgaacctagtatgctttctcgtctgaacacacaaggaagaaaagaaggatggctcctgtacgtgaaagtgacccctgcatatagtgcctgaaatcagaggaagcttgtcagtgtgggcagacaccacgagcagaccaatttgacattgtgcttctcttttaacctcttgaaaattaatgaaagttatctgatgaagatccttacattaattgctcccgattaaggtttaaaaccttggtttactgtggggtaaatttatgtttttgatagtcatccaaaatctttgtacgctttcagtttcattacagaataaaaaacaaatttaccacaatggattattacattacatctggtatttattcctcccaagaagctatctgcttcggaaaagccaggggcgcccttcattaatatatctaactgatggtgtaatgacataaaattccttgttgacccctgctattcagtgttattgtcttggaacatagaacttgataatctcttttcactgcataactacaaatgttaggctgtaagagtattttactttgttcagtgcaggttccagacatttctcctgatcaccagaagttcttttgattaataaggctactggtcacgaaaactcagcttactaaaagagatccagtcttctggttctaactaaaacatcccaccggatgcaggtgtacttgcaaattaaagtttgcctcatgtgtcctgtgtctcaagtcatacagacggcccaggagggtggagcccctgcaacctgcctagcggggcgtttgcgtgtctgggggtgtcgggacacgcgcaggacacacacagtcccactttcctagtctcgcacttacctcaaggctgtcaacttttacgctcctccctgcgcgcacagcccccacctcacgctgccacccctcacgccccgccttcaaagtaggaggcaccattgtcattggacactgcttctctcactcctattccagaaccaatcactcgagttctagtggggagcgcctaagccaatggaaatgctcgctgcggcagctgccgggtcctgggcgctgggaggcggtgccgggggcggggtgcggctggggcgaattagttgccattcggagtgaggagtgggtagaagcggcggcggcggcggcggcgtttgcggtggcgcggactccgaggagcgccagcacctcgaggccctttctctctaccctggtccccagaagcaggggtcccggccctccttgcagctgccgggttctcccgtgcgtgcagccctgcgagggctgaggagaaggctg

SEQ ID NO: 37713 - DNA, 2300 bp, Homo sapien
tttagggatgccagtgcatcgtggatttagtctctttacatagtatttctcagaggctttgttcattcttttttattctttttaaaaaaaattttggctaggcacggtggctcatgcctataatcctagcactttgggaggccaaggcaggatcacctgaggtcagaagttcaagaccaacctggccaacgtggtgaaaccccatctctactaaaaatacaaaacattagccggtcatcgtggtgggcacctataatcccagctactcaggaggctgaggcaggagaatctcttgaacccaggaggcggaggttgcagtgagccgagattgtgccattgcactccatcctggcaacaagagcaaaactccatctcagaaaagaaaaaaaaaatttcgtcttagttcagagaaccagtcttcaagctctgagattctttcctcagcttggtctattctgctattaatatttgggattgcattatgaaagtctcatagtgtgtttttcaactctctgatcagtttggttccttcttacaatggccatttcatcaatcagctcctgtattattttatggtaatcattagattccttggattgggtttttgctttcttctgaatcttgatgaccttcatttctatattatgaattctttctgtcatttcagccattccaacctgtttaagaacctttgttgggtaactaatgtggtcagtgggaggaaagaagacgctgtggctttctgagttgccagagttcttgcactggttctttctcacctgtgtgggctgatgttccttcaaccatggtataatttgtacagtcggttgacttttcgggatgtttttagagtctgaggcattgtacaaggtttttatttgtagctgacttattgtccttagtttcacaggagggtttattaactaagtattttcagtattgaagtttgcactctgattgaagtttgatgcctcttaagcgtaatggccagtaggtaagctcttgctcagccacgtggctcttctgtatttcctcactattgcagctgcgctccctgtcagtgctctgaaagtgtgggctcctctcctactcaagtgctggctgcagatcttggcttggcactcccaggctgcagccctggggtgagctaaggctttatgttctctcccagcttggaggcagcaggggaagggaccttggcagtggctatggcagagggcctttcccttgtctctggggtccaccccagagaaatagcagaactgctgccagtcggtgtgattggctttgagtaggacagctgcgttgtgggctcaagctggggggatcctgggggagacagactgacctcttcttagggccgtggcagcttgctggaggtgtggttaaagcactctgggtctttgctcctttcctagtacaagggtagcaagggcagtaccactgcagtggcagtggcagaggggctttcggttgcctctgggagctccactgcagaaacacagatccgttgctactgggatgttcagccagggggtggggcagctgtgctgctggcctgagccgggagccccaccgggtgaaaggtggggtgccgagggctcacagggaggacatgggctcctctctgtatggtgagtatgtcatgctagcagtgcaagtaaagccctcggcctctctgtttcttctctactccaagggcagcaggggcagaactctaaatgaagttttcatttgcatagtttcagatttcggccttcacttgtttggtatagaaaatattgatacattttgaatttcacctgattttaccttccttcatttcccctcttgacagtttttctaaaatctctgaaatgacaatgatcagagtaagagcagtagacacaataaatagtgaaaataaattataaataaattaacagcatattggttcttttccctagcactgcagtcctgtgtgtttaataacaacaaatattttcaattatataacttaatatagagaattttacttgttaacctcactttgttagcacacaaatgaagaatatggagtaagatctatttttacagaagcagagtagtaaagtagaaagagtccactgcagcagaatctctgatgccacttaattagctgtgccactgaactataggttcctcatttgtgaaaacaaaacaatggaccagtgagctctgaggtaccctcaagaccaaaatatgtggctctatgatgatggtttcctttttttccttctttttgctactgagaacaaagtattcaaactaaggaagattat

SEQ ID NO: 37714 - DNA, 2300 bp, Homo sapien
ccatttagctgtggttctcatactttaatgtgcttaagaatgacttgcaaagcctattataaaactagattcccagaatcattctcagagatgctatttcactaggaaaggagtggggtctaggattctgtatattagtatccccggaagatttcaatgcaagtggctgttaaacaataccttgaggaacactgccgtatggtatcatgatctgggaatagcctggaaatctaggtagaaggggcaatttgctcagcaatttttgttaactataactataaataacacatactataagaacttacactatgaaggatttaaattaaaaggcattttaataagcaaaaattaattaaaaagtcatagtaaaggaaatagtcaacagagtgaaaagctaacctacagaatatgagaaaatatttgcaaaccatatattggataagggatcaatatctggaatatatagagaactcctgcaataactcctgcaaattaagttgggtcaataacaaaatgacccaatttaaaaatgggcaaaagacctgcatagacatttctccaaagaaaatatacaaatggcaaaaaaatatgaaaagatgcacaacatcactaatcagagaactgtaaaccaaaaccatgagatatcacctcacaatgcttcggatggctattatttttaaaaatggaaacaaacattaacaaggatgtggagaaagtgggacccttgcataccatcagtgggcttgaaatggtgcagctgctgtggaaaacaataggcagtttcctcaaaaaattaagtagagaactgtataatccagcagtccaaattctgtgtatttgtgcaaaagaattgaatacaggatctcagagagatacattaagacctcatttaatgtcattgatagttcttggaaactgcaactttaggcaaaacgacataagccatttttttcttatcaatattattatgaaacagtgttattctggacctgtgtatatcactttgcctatagttgcagcttccaagaacctgtcaatgaatttgacactgtatactgtgtttattgcagcattattcccaatagccaagatgtgaaagcaacctaaatatccattgacacatgaatggttaaagaaaatggtgtgtgtgtgtgtgtgtgtgtgtgtgtgtgtgtctgtcttcaacattgcatatacaatgcaatatcattcagccttaaaaaggaagtcctgtcatatactacaacacagatgaaccttaaatgcattatgctaagtgaaataagccaatcacaagaacacaaatactgagtgtttgcatttttatgaggtatctaaagtagtcaaattcatagaatcagaaactagaatagtggttgctgggggctgtgggaggggaaaatggggagttgttcaatgggtgtagaatttccatcatgcaagatgaaaaagttctagagatctgttgtacaacaaagtgtatattgttagcactactatactgtacacttttaaattaaaagaataaacttttttaccataataaaaatattaatcaaaaagtaccaactatcctaatagttcatggtgacattgaactcaagagaagaatatgataattccatttcctttgaacaccctctttttatgaaaaaatttgttggaaatttcaagctaactaaagtaaatgtgtacttacagtgaagctgtctgggtggtgagaggactgggtgttggtagcctctccatgatgcactgagtggagggcagagcttacttacttaccctgaatgtcattcccaaaagcagctcgtccagatatttggatgctctccacaaggaagagagatgttcactgcaggatgctgtcatatcagaggcatctgacactctggaaattctcttcttcctctctcttgtctgcatacctgaagcgtgggatttgcacatcgtaattttgtccccttgaaatgtttttaaatagcctaggaaagctttaatcactttaggagtactggttgccaggatcctttctgagaccaaaggagaatgattggattgattttgtgaagcagtctgggcattcatatgctgtgagcactcactctggcagctagaggttttgcctctggccagtgaccattcctttgagtagtgagctttctgttctttccagtaactgctggcaagtgggctaatgtggctgggctggtgggccctggggtgggctagcttccatgagtggagcaaatggagtaagggcagagacattgactccagtatttactaacgagataaat

SEQ ID NO: 37715 - DNA, 2300 bp, Homo sapien
tatccttctacgttatggcataactaccagacctccataccgctaatgctgcttgcacctgaaaaaaatgtactatttagtcaaataccttgaaaacgtactgattttgaaggctctgagtaacaaaattttctatacttttcgtgagattgatctttatgcactgcggtaaagatgcgtagagaaagcagtcagatagttactcaggtgttccaaatgggggaaaatagttacaaaataaaccacccaggcaattaccatccagtatctttagcactcaatgatccacgggtggaggatacagggttaacgttttttaacatcaggtctctccacaaatagcccgctgtagcttaactgttacgttttctaaagattcatctttataaacagtacaattatttccctttgtaatacaaacagaaacaattagaaagcaacatctcctgcaattaagatgtatgtacagtattagtataaaaccaaagagtgatatttgagctattcaggattataaattgattttgtccctgtggtattctctacaaagggtgtttcaaaaataaagactgaaatctaaaaatatatctttggtttgaaaacttacttaaaagcatttttagagagtgtgtgttttaaacagggggtatgaaattgcatcgggagcctagatttcaaactaagcatttcttatttcactccctaaccacagaacagttcagatctcagattcaaaccagagggccacagaaaccaatttgagattttccgaagagacttcactgaaacgtatggacaaaaacatgtttgcgatgagtcatattttataggaccttaatggccaataaatgccttatgtgtctttcttcctacattcagtatcactcccaagcaagctggtgacatattttccaggccttgataatttttataccgttaccagatctcggttactaagattcatgaacaaaaccctttcttgcgctaattttttaatgccatctaaatgaagagaacgcgattctttccaaactaactctccccaaccaggcagttaatgcccttcgccagaataagggcgcgatacttttaagaccccaaagagaagctcaggtgctttgggggtactacaagtaaaaagacagtgggaaaggttcctggagagccgctttgggggaaaggcagacataacaacaggatatgttcgtttctagaggaagcaggagctgcaatagccccggagcaggaaaggcggagtcagcagcgcccaaaggaaacgggcgcgccagggtttgctggaaccggggttgcttaggggttctcgccccgtctagtccgagactgctgagcacctcgcccccgggggaccaagctcaggcctcctggcactagtggttataaagaggtacccatatgctctctgccgcccctgccaaaaaaagggccacggaggggaagagaaaaagcacacaccaggcgccgcggcaggtgaacttgtcaacaagtcaaccctggacgcaagtccctgcccaccagggagctcggggtcctggggccggagccgccgggaaggcgaggcgcgcggtgggtgggtggggtgggctggcatgggtgccggtgctcccagcgctggggccggagcgcggaacgcttccctaccgctcccccggggctgacgcacgctctcacggcgcgcgcatcctccagaccttcccaggccggagggaggaggggaggggaaggggctgatgcggttcccgcaccgggatccgggacccgaggaggcgactcgcctatcacgcgccgcccgcggagggcagagaaggcagctcctaccaggcgtccccgaccgtcccggctgccgggcgtctcctgctgcttcctgcagcccgcccggcgcgcccccgccccgaccccggagggcaggtacctcggagccccggcccccaggagcctcccggccgcggtcggagcgtccctccggatcactcatccgacgtcagcgtcagccgaaggcgagggaaaggggcggggggagcgcaggaaccggcccttcctgcggcggccgccaccagccggaatagcaaccggcggagcccgtgcgcaccgcagcgcagcgcagcggccggggggtgcgggcgccctcgccgcccggctacctaccgccgcctgggcgccgccgctgcctcccttccccgcttctaccctccagcagacgcccgccggagcgacccctcccagggtgaccgggggaaggtgggtggcgttgacctcaccttgcttggggagggtcggggact

SEQ ID NO: 37716 - DNA, 2300 bp, Homo sapien
attttgaggggatactttgaacacacacacaacctcccattctactggctgttttgtaacagatttaaatatttgccccaaagccagcctttgaccaatggggcttctgattaagttttcatgtaactggtagaaaggagaacattacagagtcaggaaaaacttttcaggtgatttagtcctttctcaatgcttcaattaactgatgataacgctcagtcaacatttatcgggcacctatgatgttcattacggcacttcattctgttaaagaataataatctctttatccttttaactcccgataatagctttttacacataaatttacagttcttggaatcaatgtatcttaacatatcttaatcatctttcttttgtaaggaagactttctcattttaaaggctttgggttttttttcttacagcaaaatcatttggcttgcgttgttaacacgttagtttgaatttttttttataaaagccaaatatatataagcaatgcttttctctctgaaaatttctcctgaatcttagcttttcaacaatttgctattttgtagaccatattcatgatttgtttactcatacacacttactaaggagatgtttactcagctccaaaattcgtgttaagactaggacaggctcaaatctatgacaaacagaatccccaaagaataactttaaaggttatgtaaatttctggaggtatcttattatctttctattaaaatgtcaacatattctatactttttctccatccattctggcaagacaccatgctatcttgagattaagctaagtctcctggttcagattcaaatccctgctcaataatctctttatggcactctgggcagtgtcttcatctgtgaaatcgggataatgattttatctacagtattgggttgctgtaaggattaaatataaagcatacagcatgtgccggacatagagctagcactccatccatgttagcgcaggatttctgattcgtcagcatcattactcaataactatcattcggcccttttaaattgtttcagcgacgactgaatgaacttatttataaatgtataacataactagggatgaagtcatactacattgaggtttcatttccacatagataatattaggaagcagctatgccaacactttttcttcctgtgatctgtatactgcagggtctctagaaacaatggtttggttctttcctggtgacaaaggataagagaagatgaaactgctacaaatggcaataacttaaaaataaaagatacagaaatatatggaaatgaaaaacatatacctatacatacacagctgtttttaaaacatgacctttattctcgaagctcaaacttgatttccaggtacagcaggcctctgtaacttttcttggcagtgaagtcatgaagtctcctgtcctctaaagctacagaaatttaacctggaagcaagcagtaggcactacgcacagcacagagggaaccctggggtgtacgctgtggctcccacctgtccgccaggtcattgtgacgcaaacgctatggccacgtggaacacctgccggagagcaggggcggggtcactctgggcggcggatccgagcgggggataccccaggagatgggggtcgaggagagaccccggggagtagagagagagaaactcactccccgagtccccgaccctccccaagcaaggtgaggtcaacgccacccaccttcccccggtcaccctgggaggggtcgctccggcgggcgtctgctggagggtagaagcggggaagggaggcagcggcggcgcccaggcggcggtaggtagccgggcggcgagggcgcccgcaccccccggccgctgcgctgcgctgcggtgcgcacgggctccgccggttgctattccggctggtggcggccgccgcaggaagggccggttcctgcgctccccccgcccctttccctcgccttcggctgacgctgacgtcggatgagtgatccggagggacgctccgaccgcggccgggaggctcctgggggccggggctccgaggtacctgccctccggggtcggggcgggggcgcgccgggcgggctgcaggaagcagcaggagacgcccggcagccgggacggtcggggacgcctggtaggagctgccttctctgccctccgcgggcggcgcgtgataggcgagtcgcctcctcgggtcccggatcccggtgcgggaaccgcatcagccccttcccctcccctcctccctccggcctgggaaggtctggaggatgcgcgcgcc

SEQ ID NO: 37717 - DNA, 2300 bp, Homo sapien
agcctctgtaacaggttagactcacagtcatcgttttcaccttggaattcagaaagcataaaagaaaactgcgtaatcagttgcagctcagctgtccccgttttttcccttcatgcttttgttccaatcatctgcattttgaggggatactttgaacacacacacaacctcccattctactggctgttttgtaacagatttaaatatttgccccaaagccagcctttgaccaatggggcttctgattaagttttcatgtaactggtagaaaggagaacattacagagtcaggaaaaacttttcaggtgatttagtcctttctcaatgcttcaattaactgatgataacgctcagtcaacatttatcgggcacctatgatgttcattacggcacttcattctgttaaagaataataatctctttatccttttaactcccgataatagctttttacacataaatttacagttcttggaatcaatgtatcttaacatatcttaatcatctttcttttgtaaggaagactttctcattttaaaggctttgggttttttttcttacagcaaaatcatttggcttgcgttgttaacacgttagtttgaatttttttttataaaagccaaatatatataagcaatgcttttctctctgaaaatttctcctgaatcttagcttttcaacaatttgctattttgtagaccatattcatgatttgtttactcatacacacttactaaggagatgtttactcagctccaaaattcgtgttaagactaggacaggctcaaatctatgacaaacagaatccccaaagaataactttaaaggttatgtaaatttctggaggtatcttattatctttctattaaaatgtcaacatattctatactttttctccatccattctggcaagacaccatgctatcttgagattaagctaagtctcctggttcagattcaaatccctgctcaataatctctttatggcactctgggcagtgtcttcatctgtgaaatcgggataatgattttatctacagtattgggttgctgtaaggattaaatataaagcatacagcatgtgccggacatagagctagcactccatccatgttagcgcaggatttctgattcgtcagcatcattactcaataactatcattcggcccttttaaattgtttcagcgacgactgaatgaacttatttataaatgtataacataactagggatgaagtcatactacattgaggtttcatttccacatagataatattaggaagcagctatgccaacactttttcttcctgtgatctgtatactgcagggtctctagaaacaatggtttggttctttcctggtgacaaaggataagagaagatgaaactgctacaaatggcaataacttaaaaataaaagatacagaaatatatggaaatgaaaaacatatacctatacatacacagctgtttttaaaacatgacctttattctcgaagctcaaacttgatttccaggtacagcaggcctctgtaacttttcttggcagtgaagtcatgaagtctcctgtcctctaaagctacagaaatttaacctggaagcaagcagtaggcactacgcacagcacagagggaaccctggggtgtacgctgtggctcccacctgtccgccaggtcattgtgacgcaaacgctatggccacgtggaacacctgccggagagcaggggcggggtcactctgggcggcggatccgagcgggggataccccaggagatgggggtcgaggagagaccccggggagtagagagagagaaactcactccccgagtccccgaccctccccaagcaaggtgaggtcaacgccacccaccttcccccggtcaccctgggaggggtcgctccggcgggcgtctgctggagggtagaagcggggaagggaggcagcggcggcgcccaggcggcggtaggtagccgggcggcgagggcgcccgcaccccccggccgctgcgctgcgctgcggtgcgcacgggctccgccggttgctattccggctggtggcggccgccgcaggaagggccggttcctgcgctccccccgcccctttccctcgccttcggctgacgctgacgtcggatgagtgatccggagggacgctccgaccgcggccgggaggctcctgggggccggggctccgaggtacctgccctccggggtcggggcgggggcgcgccgggcgggctgcaggaagcagcaggagacgcccggcagccgggacggtcggggacgcctggtaggagctgcc

SEQ ID NO: 37718 - DNA, 2300 bp, Homo sapien
ccatcattcaatagccattctccttagaaactgtttcgggttctcactagcaccttactggtgttctgcaagatggaaacaacagctggttattcagaaacaaatgcaagtgttattgatggagccattttatttaaggggaaggaaaagtactcattgtggtgatggagaatgagcaggagttgtctattatttcctttctcaaatattatgctaagtgttaggacaataattagaatgaagaaaaatcagttaaggttttctcctaaactctccgggagcccaaagaatttcagtgccatgttgactacataatgcttgtatcatgtatttgttctcttttagacattgcttttgaagccacttttagcctctgtaacaggttagactcacagtcatcgttttcaccttggaattcagaaagcataaaagaaaactgcgtaatcagttgcagctcagctgtccccgttttttcccttcatgcttttgttccaatcatctgcattttgaggggatactttgaacacacacacaacctcccattctactggctgttttgtaacagatttaaatatttgccccaaagccagcctttgaccaatggggcttctgattaagttttcatgtaactggtagaaaggagaacattacagagtcaggaaaaacttttcaggtgatttagtcctttctcaatgcttcaattaactgatgataacgctcagtcaacatttatcgggcacctatgatgttcattacggcacttcattctgttaaagaataataatctctttatccttttaactcccgataatagctttttacacataaatttacagttcttggaatcaatgtatcttaacatatcttaatcatctttcttttgtaaggaagactttctcattttaaaggctttgggttttttttcttacagcaaaatcatttggcttgcgttgttaacacgttagtttgaatttttttttataaaagccaaatatatataagcaatgcttttctctctgaaaatttctcctgaatcttagcttttcaacaatttgctattttgtagaccatattcatgatttgtttactcatacacacttactaaggagatgtttactcagctccaaaattcgtgttaagactaggacaggctcaaatctatgacaaacagaatccccaaagaataactttaaaggttatgtaaatttctggaggtatcttattatctttctattaaaatgtcaacatattctatactttttctccatccattctggcaagacaccatgctatcttgagattaagctaagtctcctggttcagattcaaatccctgctcaataatctctttatggcactctgggcagtgtcttcatctgtgaaatcgggataatgattttatctacagtattgggttgctgtaaggattaaatataaagcatacagcatgtgccggacatagagctagcactccatccatgttagcgcaggatttctgattcgtcagcatcattactcaataactatcattcggcccttttaaattgtttcagcgacgactgaatgaacttatttataaatgtataacataactagggatgaagtcatactacattgaggtttcatttccacatagataatattaggaagcagctatgccaacactttttcttcctgtgatctgtatactgcagggtctctagaaacaatggtttggttctttcctggtgacaaaggataagagaagatgaaactgctacaaatggcaataacttaaaaataaaagatacagaaatatatggaaatgaaaaacatatacctatacatacacagctgtttttaaaacatgacctttattctcgaagctcaaacttgatttccaggtacagcaggcctctgtaacttttcttggcagtgaagtcatgaagtctcctgtcctctaaagctacagaaatttaacctggaagcaagcagtaggcactacgcacagcacagagggaaccctggggtgtacgctgtggctcccacctgtccgccaggtcattgtgacgcaaacgctatggccacgtggaacacctgccggagagcaggggcggggtcactctgggcggcggatccgagcgggggataccccaggagatgggggtcgaggagagaccccggggagtagagagagagaaactcactccccgagtccccgaccctccccaagcaaggtgaggtcaacgccacccaccttcccccggtcaccctgggaggggtcgctccggcgggcgtctgctggagggtagaagcgggga

SEQ ID NO: 37719 - DNA, 2300 bp, Homo sapien
tgtatgtttacatagtgtgactgcctaatggcattaaaaaaatctatagtgcatggttcactgttttcccttcgctgagaagagcaatgagtaagaatagaaataggaatatattttatctgatgaaccagggtgaaaattagcaaaaaatttgtgacagtggatatataaaataaaatttccccttaagttatataatcatgtttacactttttgcatatgtaactaaatgaatgtatactttcttctagtggcttactggtagaaaataaacacagatgtttttgttttatattttacagcaatgctttcagtaacctggagaggtacacatggctggtataacaattatcttcatttaatgatgtggaaacacctaccacaagtcctggcacattgagggtcttgaataaattctgtcagatgaacggacaagcgcacaaaaggttgaaagagtgaatgaggcaggttaaatgaccagttctagatttgttactaagtgacacagcctaactgagttttctaatgttccactaaccctgcttccaagcagcttcagaatgcagcttacatttctgctataaatattttctttagacttttgctgatgaattgaagtttcataacaagaagaaagcagatggcttttgggaggggtttatacttgctcttttaactgtgtttctgttttgcttgtttatgcagagtgtgcacaaaggttgccagagccttaatttcaaactgcatcatttaataaaatacaataaggagaattaagaaagaaggctgcaggggaacatcctgcttattatctctgtaatgagaggactattttttctcccatcagttgccaatgatgaggttttttgtttccttttgtgcaggcacaattgtgatattcaacgagagtagtgcgaagtgccactttacagccaaacattcaattcctcctaattcacaagggagagagggatcaagttgtgcagctgggaggtgatgtttcttcccagcagctgtcattgaggagacacgtgcaaaccatagaagtcatttgtcacaagaaccccatccagaatttgctatgtgcgtctcacttgctaacgtgacatgaaatactgaagctttcaaaaatcaagtacagagactttgttgtgttgacatgggcaaaatgaaatgaagagctgaggcaattatgtggataaatcaggccaaaaatatccaaccattgagaggaaaaagttcctttggctcaaattattcagagtgactgtccatgttcatcaatttatcaggataatgaattttatcctatactttactttgtcactatagatatatctttagtctatgaatttgaatgactttgtgatattttacttcactgaaaattataataggggttgaatgagcaagcaccgtgttaaaagattgctactgcagctatgataatagtccaggagattttaaaccccgttattcaatagctagcagacatagttattggaatgggggtagagagggagacacgaaatctgttgagaatcaaatgcttgtaactaatctgtctttcccatttagcatcctattatccaaaaatatcttggtctgtagctcccacctggtttcctggtcatttgactactggttaaatgagcctgaaaatttcatcaggtttcatataaagaataatatattatagttacatacatataaatgtatatctttgtgtatttttaatatcccttatttatctacaaagagatgaatgtttgaaatatgtgacggataagcaaggtcaattcttgtgtctgctcatgcattggcattgagctttctgcttggagtccttagcatattccgcacttgagccatccttcttgtttcttcatacttccagagccactagaatcacaggcaaaagggcaggagcttctccttggggcagagggagaacctctgagcattaccctgggtggtttggtcctgccagagtctcttaaacattagagacaactcaccatttggaagttacaaatcatgaaagtgctcactgaagcaaaataataccacataagaaataaatgcctaatgttgatgaacattttaatctttattataaaattataacacaaagaagaatcctgaagaatgaccctaaagcttttgtcacaatagcattgtaatggaaatacaggtgtgttttcttttctttcttttttccttttttgagacagggtcttgctttgtcacccagggtggtgtgcagtggagctatcatggctcactgtagcctcgacctc

SEQ ID NO: 37720 - DNA, 2300 bp, Homo sapien
aagagtgcattttagagtaggatactacttgaaacagaagaatgtaagaaaatcatgcttttattgctccattgttctttataaagcaaatgataggaaaaaaggagggtgaatgaaccattcttgtccacttctcccccaatattatattattaaaactggagtggtttagcagaaacgatacatttttctgtgttacttggtggctcggtatccttttctggttgagtattataggagatgaagacccctgtgaaatatgaaaaatgacaatccgccactgttttatatcacaggccaagtatctcataggatccagcgaaggttgaatgtctgggcagaagatctcaggtcattaacagaaaaagctctttggcatcctgtgtcatagaacaaagtgtcaaacctgttcccattactaggtgcctgtggtgcttttcttaaataatcagtcccattcagacagacattttaaggtctctgatcatctttctatttcacaagcagtatttttttaaggctaaatggcactagaagcagaatgtttttaaagtaaggtttagaaaagaacttggtatattccaaagctagccggattctttctcattttcccaaaggtcagacagaagttcagctctgacagcattgtagctgggaatccagatagaggcaggcaacatttgctccagctctacactccagtctgggaggcctgggagctcctgtacaaataggaatcaattttaggatagccttatgaatcctagaggatggaattagacaaagctttttttgcccctgctttgaccatttggcctcagatacgggtgccccaatactttaatttttcttctttaaagtttaaagtttttaagaaaatgaaatagctggtaagtgaaaatagtcaagaaaacattgtaattatgctatatgtacatgtgcgttttttctgaagtggattttcagagacacagttagaaggtgtgcttcactgctttattctgcatatgccccaatgaattccaggaggtcacagcagcagagtacaacttttaagattagaagagcttgctctttaaagagttatttttagctggaagggagagtgtagacctcaaagtgctggtaggtatgttctacagtggggatctaatttggaggtctttggagatctgattccaggggaaggtctcagtggggctcctcttgcctctgctgcaggactgggtggctctgctgattgtcactgccttgtttgaggggtggtctccatcatccaggggaattcagcctgggacctattgtctagagtgtacattgtatctaggcccagacctgccagagtgtccacagccacacttgaggaaaggacattccagactcattaaatatcacaattcgattttgatgtcactaactcaggttcctgagataaatttccatacaattcctacagattgatatggatatgtgcatcaccccaggagaggctctggtgaagggcaggcttggagatgcaatgggcaaggttggggaagagataccctcttccgggttccgatttgtgccctgaatttgggcaagctcaaggagcactggcaaccccaccagcaccagaagaagctggtcctggctgtctcccgagactggtgaaactgctctggtggtggtgcactggaagggtggaggaaaaaaaacaaaaaacaaaacagggtttgagggggaatggcagggacacggtagaggcacagagatacagagacctagagtcagaaatcctgagtgagacacacagaaaggcagaaaaaggcagaaagatgctgagggacagagacgcagaccacaagaatgacagaagaaggagacagagagagagagggagtgagaaagatactgagaaatagggacagtaagggagagactgagaaagacagagacagccagagtcggagcacagaggccgagtctgggagacgctggttgagtgggaggtgtcagtagcgagggaggtggtgacggctcgaagcatcccccgtcctcctcctcccccttcacgctcagcccagccggcggcgaggagtccagaggccaaggtcgcccagtcctctcggctgtctcgagctgaatggctggcagtctgcggctcccccgcctccggcccggcagccacaggtcggaggcgcccggcgtcggcgctcgaggccggcaggggcgccctgcaccctcccgcgcccttccccgccctacgcgactcccggctgctcttcccgccactcccctgggctttgcgatcttcccta

SEQ ID NO: 37721 - DNA, 2300 bp, Homo sapien
tggtaagtgaaaatagtcaagaaaacattgtaattatgctatatgtacatgtgcgttttttctgaagtggattttcagagacacagttagaaggtgtgcttcactgctttattctgcatatgccccaatgaattccaggaggtcacagcagcagagtacaacttttaagattagaagagcttgctctttaaagagttatttttagctggaagggagagtgtagacctcaaagtgctggtaggtatgttctacagtggggatctaatttggaggtctttggagatctgattccaggggaaggtctcagtggggctcctcttgcctctgctgcaggactgggtggctctgctgattgtcactgccttgtttgaggggtggtctccatcatccaggggaattcagcctgggacctattgtctagagtgtacattgtatctaggcccagacctgccagagtgtccacagccacacttgaggaaaggacattccagactcattaaatatcacaattcgattttgatgtcactaactcaggttcctgagataaatttccatacaattcctacagattgatatggatatgtgcatcaccccaggagaggctctggtgaagggcaggcttggagatgcaatgggcaaggttggggaagagataccctcttccgggttccgatttgtgccctgaatttgggcaagctcaaggagcactggcaaccccaccagcaccagaagaagctggtcctggctgtctcccgagactggtgaaactgctctggtggtggtgcactggaagggtggaggaaaaaaaacaaaaaacaaaacagggtttgagggggaatggcagggacacggtagaggcacagagatacagagacctagagtcagaaatcctgagtgagacacacagaaaggcagaaaaaggcagaaagatgctgagggacagagacgcagaccacaagaatgacagaagaaggagacagagagagagagggagtgagaaagatactgagaaatagggacagtaagggagagactgagaaagacagagacagccagagtcggagcacagaggccgagtctgggagacgctggttgagtgggaggtgtcagtagcgagggaggtggtgacggctcgaagcatcccccgtcctcctcctcccccttcacgctcagcccagccggcggcgaggagtccagaggccaaggtcgcccagtcctctcggctgtctcgagctgaatggctggcagtctgcggctcccccgcctccggcccggcagccacaggtcggaggcgcccggcgtcggcgctcgaggccggcaggggcgccctgcaccctcccgcgcccttccccgccctacgcgactcccggctgctcttcccgccactcccctgggctttgcgatcttccctacgccccccgggaagggggcgctgcggccaccgaagacaccgcgggagccacttgtccctgtgggcccagcccgcgagagcctgagagccggatctgtttacacagggtactaattagtctttgaggaatcattcacccacgtgccaaagtaattgtccgtgtcaggaaggtaggcgtgccaagccgcggctctgcggagaaaccacgaccaccgcggccgccggaaacccaaagcgctccagagcgtccccgggtggccgggcagcaccagggacagcgcccgggactccactggggaccggctcctgggcttcccagcgtcgcgggtagaggtacagctgctccgtgtgccgcaggctccagattctcgccaccccacccctccctcagaaactcggactgctctcgtctgccgtgtggttctcttttcttccgaaaggccagtgtcttatctctccacttcaagtccagaggacttgctcagtctcctccccttaagtcatttccaccatcctcaggcagctgtgggaagccgagagtcctggactgttcgtccgggtgccagcgctggcagtcccagtccgtccggtgcagcagcccggcgcattcccctctctccctccctcttgctctccctccctttctgtcttcctctctttcctcctctactgctccctccctctcttgcctcttaagtttcctgcaccgtgaatccaactgtgccaagccttggctcccgcgaaccaatcctgagcgcgacccgggcactgggacggcgactccgccaaagctggacgaggcagccggacccgtctgcgctcgagcatggagacggagcgcctgggagggcacgtccggggcgctggagacgccaggcccgagtagctt

SEQ ID NO: 37722 - DNA, 2300 bp, Homo sapien
aaaccttcaggtcatttcacagaatatttcctacctcttaagccaatataaacactgtaggaaacaatttaaaacaatctaggttataccttcttcagggaatgatgcttccacgtggttaaaaatatccacacacacaggcccaaacatgagcaaggtcttctaggaattagatgacaaacagggccgtaaaaatattacaccgtcatcttcatacttgagcttttcaaaaagcaccgttcacactgaaaaccatctctacttggagcattcacttgttgattctgctatctttcattctgcaaagttgcctacctttagacatccctgtcaaatcagttttttttcttggttaactctccagagaacttaatatattgtcataccaccgatgagcatgaattcagctctcagctgataataaacactgagcaaaagtaaaggcactcttttccaggtcaaaaaagatttcagacaacctagaaagttactaacaaaatcatatcaattatttcaattcactcattatcccattcttccattattactaaagtgactatgagcatactaagttatttcatgcattctactttgagaaattttattaaaatgttaatatacacaaaaatagcatggtttcataaactctcacatatccactaacacctctagccgatttcataattatcaatatattaccatttttccttcatccataaaatttgttctctctgattttaaagcacatactataaatctgaaaattatatggaattttttacatagtcataatagcattattctacctagaaatattaataacaattccttggaattatcagatgccaaattgatactataatttatcttgtctttttatgatttattatttgaataagaaacaaacaggcctataaattgaatatggttaaaatattccgtaaacacatttcgatctagagaaattatttctacttttctattcttttgtgaggaaattcacatttcattgcaattatttatttccataagttatctccttacccatgtcttttcttactttctatctttatagatatagaaaataacaaaaggagcatgtattagacgctcaattaaaaaaaattatttccataggttttgggggaacaggtggtatttggttacatgagtaagttctttagtggtgatttgtgagattttggtgcgctcaccacccaagcagtcagtatacactgaaccgaatctgtagttttttatccctcacacttttcccacagtttccccctgagttctgagaatccactgtatcattcttacacctctgcctcctcatagcttagctcccacttacaagttagagcacgcaatatttggttttccattcctgagttacttcatttagaataatagcctccagttccatccaggttgctgcaaataccattaattcattcttttttttatcatggagtaatattccatcatgaatactactgtgaatcaagaaatgaataatgaaatgaatgactaaatgaataaataaatgaatactactttgaataaagaaatgaataaatttgcaatgagtgaataaataaactgtggtccacaattttttatgagttaaggagaaatcatttaggctgatagtgagggtaggggagtcctcggtaaggttttccttttagtgaaaaacaaccccaaaatcattttattttctaacaaacagcagcctatgaaatcaagctgcagacatagactagcaagctggaagctttcacacatgaatgccggcagttgtgccaataggaaaaggctacctgcgattaggcatgttcaaaatcgcagctccgtcttctcttctctttgccaaaccatgtgtacagtaaggagaagacaatacggtgcaggccgggcaaagacccaatttgcataataagattagggtggggcgaccacccatcccttcacgctatgtaaatgtcacacttggtcgaaccaatttgtgggccctatgttaaccacacactgtctccttaagcctgcctataaaatctggtgctgtctgctgcaggctggatttttccttttgggagcccctctctctcacacagggagagagctgttctcctttctctttcttcttcctattaaacctccacgcctaaactcagtcctcttgggtgtctatgtccttaattttcttagcgagagactacaaacccggggtatttaccccagacaactaccccgcttcatattgggaatctcagccaggatcccaaggtacattcatc

SEQ ID NO: 37723 - DNA, 2300 bp, Homo sapien
tttttattataattttgagtctatgtatacaaaagttcacctgcaagtaatggtaattttaccttttcctttcatatatatacatatatatcttatttgttttcactgagtgaattatttaataaatattaatattaatataaaatataataaataatattaatatttattaaataataattgtaaaagtggacattcttctcttgtgactgttgaagttttccaagagctcttatttggcatctattgatatagatctattttattctcttctagcttattaatatggtgtggtatatgaatagattttctgataccaaatcacctttaaggcaaacggattttaatgaagccaatttaaaggccacataaccagtatcacatcttaacaaatgaaaaggaaatgttttgttttaagaactctgtccaaggtgaagcagaaatgtcattctcaatagttgtaagatttaagcatccctagagctctgtgtgtgaggatcattatctcctctttgttgtcttaagaaacattattaccaaatcctggccaattagctactttccttttattttttttcttcaaagaattttatgctcttatttaaagaataatattgtacattttcttatttgagtccgtttgcaaacaataattatttttaatttttgtcatggctttggaattctgtaatttagataaaacctttgtataatcaagatttgctcatcataaaacataatcaaaagagtcagtctgtagcttgtttattgtggaaaagggagtctactttactctgtcattatcttctttctttcaagtgtggtatcaaaagaattttatacaaataagaaggcaaatttgggtcaaatttcccataaaaagaatgaaaataatgccaaataatgtgttattaaagggaaaaaaaaccctttcaaatgtcttaatatcatagtatcagacaaacctactttccaaaataggctctcagagttgtaaattgtaatgtatattcattttgatggagagatttattagaataacaaatttcaggatttttaaattgaagagaaagatctttatcaattatcatttttacccttcttttggtaaacaaagttaaggaaaatagcatgatatttcaaagtataatttcacaaaacacatcaaagcaatacctattttataaaacatgaggaaaaatgacagtctttcctttcatctaattttagtttgtcatattcttttttcaggttttcttttttctttttttaaagatattaaaataatttatttctgtcacaaaaggtctttctcagacacatcctccactaatggtgacatggggactgtctgttcccagtgtttctggatgcatgagaatggtagggtaagagagagaacaaagcctcttagtccctttctttctgctacaaacaccttagggatgcgagtccggggtgagaggagagagggaaaaccgcggctggccttgcatgtgcctgactcagtgtgcatgccccttgctgcccaagtcccttgttgtccatgtgccttgctgtctgccttctgtccccgcagagctgtgcaaggagacatcgtgacttctttctgtgttgctgactaggagtcagccactaggtccgcagataagtcctcccagagttgaagtgtgagagagcgtgaggagaagcccgcggcgcagtctatggcctcctagggggaagggccttgaggtccctgtccttctcctaacaggcggcgacgcagccatggccttgctgtcgtgggagtcccagacagggtaggaaggagggccatagaaaggaggagggccgagtgaacatggagttttgaagggggaaaccatttgtggtatttgagtcccggaggcatatgaaaccgcccacagaagacacattccaaagtcttcagtgggaacctgggagagggcagaggactgcgcggcgctggatggggtagagcgaggagggtcgaggaggggcgccacagcccacagagcaggcaccgacctcactgcgcatgtgccctgggcgtcttcccgtcggcccctttgcccacgtggtgaacgcggcggagctgtgagggtgtgagggtcgcgctcctgctgtctggactttttctgtcctactgagacacggccggtaggtccgcaggccagtcttcccaggggttgaagtgtgagtgagtgtgaggaggagccagcggccgtctggagcatggggcagcgtggtccgtggcctcagaggccgatgggtctcaaggtgatcgtccttctcct

SEQ ID NO: 37724 - DNA, 2300 bp, Homo sapien
tgttcttcccacatctttaccaggttacttccttcctttcatttaggtttcaactcagaaatcctcagacggaccttccctgtcctgtctacttaaagtaacctcctctcctccacctcttccatgtcattgtctgtctcattattctattttattggcttgtcactgtctaaaaattatctcatttgtttattgtttgtcttcctcaattagtatgtaagctccattagcaacgcagagtaattttcttgttcactgctataactctagtggctagaacagtgcctagtggagagtaggtacttaagaaagatttgctgaatgaatgaaaaaagacaccagtcttgataagcttcatgacatatcaccttaacagttaccatctattttttttttcctacctactggccatacctcctcttctaagcattgcatgttggaattcctcggctctgtgtcctctgtctaaattctcagtcaactttctctccctaagtaatctcattcagtcacatgggttcatttcttatcagtaaactgagtcctaaatttatacttatagtgtagttctcttctgccccatagagatccacttgaattttacataggcacttatacatcattctctacggcttatttcaataactggcatcaacaaccacagagctgctcaaaactgaacctctgaaattattcttaacttctctctcctcactcctggagagccaaccaccaagtcctgttggtgccaccttctaaacatctctggaatctttttttctcatcattacattctctacactagttcaagctaccattatctgtcacacagattatggactattgcaatggccccttgataggtctttcccctctcacgcttatcccttctaatcaattattcacaaagcaatcatttaaaaacacaaccttcccaagctctcaacataaaacccatgatgtttaagcggttattggcccagcagatctgatccccaccttgctctcccttttactttccagccacactagacctcatacagctccctcgggttttcaatagcttcagaccttcacgtgttattacctccgccctgtacacctgcatcctccgttttcacctggttaatgtccgctcctccttcagagctagtgtaacttccggtggagccttctcctatgatttctagtcccaattattaatacttgcttgatcatttgattaatgctttaagctacgtatgagattggagagggttcagagtgtacattttatcccaatccccccaccctcccccgcaaagcctgtcctatggaagtccttcgggtaaaaaaaacaacgaagaaaacaaaacaaaagacaaatgaaaattcgactggggtagtgggaaagattatctgtagctacacgaccattgaaaacacattttaaagatgcaatttgggaccagggacgggggatagtggcgtgttggaaaggtctttgtggcgacgaactttcaaccgagggccaggatctgagggttcagaaatacactgccaggactattatcacctttaagtcatttactagtttttaacttctgcttgtctgcgacagcgtaacacaggaagcagctgcagtcttctcaaaccgcagccgctgaccttagcggcaagaggcccgacctgccctccaggcgcccggcgctcggctcccagaggcgccgcgcagctccctcagcggcagtcacagctggccagcgcgcacccggcacgcgcgcccccagggcctctgcgcgcggacccggctctcaggcgccgcgggagaggccccctactcacggagcgcgcggcccgtgcgcccacgctccgaccgcattcctcagtacgtggcacccttggaaagtgcctgtctggtcaatcgaagagtcctcgtttcgaccaaaaaaattcccctcagaaatatgcatggcacggcaatgaaggcatttcactatgaagtggaatgatgatggtccgaccaggtcaggacgaacatatgaggggttagatctaagcaggcactattaaagacagtcgcatccgggccctcctgccgcaagctgccctcccagccaagggtccttcaggtaggaggtcctgggtgactttggaagtccgtagtgtctcattgcagataatttttagcttagggcctggtggctaggtcggttctctcctttccagtcggagacctctgccgcaaacatgctccgccagatcatcggtcaggccaagaagcatccgagcgtaagttcgtgaccgctctcctaatgttt

SEQ ID NO: 37725 - DNA, 2300 bp, Homo sapien
tattattattgcactttttggtaaatctgaaattacttcaaaattaaaagttaaaaaaaaatgattgctgatatccaatggccacaggtttggaaaactagaaagaattcttatccactcttggtggtatatatattagtacagacttttttttttttttttttgagacggagtttcactcttgtcacccaggctggaatgcagtggcgtgatctctgctcactgcaacctctgcctcccaggttcaagtgattctcctgcctcagcctcccaagtagctggaattacaggtatgtgccaccacgcccagctaatttttgtatttttagtagacacggggtttcatcatgttgggcaggctggtctcgaactcccaacctcaagtgatccacccgcctcagcctcccaaagtgttgggattacaggcgtgagccaccgcacccggcagtacagtttttctagagcaactaggtgttatttattaaagtaaatgaattaatacattttgattctgaaaatctccttctagaaattagttttacataaacacgaatgccagattttgaatttctcttttagatgattcagcataattgctccaaataaatctaaaaggctattgtcaaacagtggaatatttggatttataatttcatagataagactatcagtccatgatatggttggtgtttaaagtagaatggaagtgaaattcccagagtggagtttttaaaataaccaagttcctaggattttaactggaagaataaatatctgaaaggcaatgaggagtattaagcatgggatgccacttctgcaccttgagaaaatgaagtatggaaggatgagtggttttcatttgagagggctgcagggtaactgtttctatttcagatgaggaggtaaaaagaatgggcattgaaaaggaaaaatgtttactaagtaggttatacattttggaatagaagtttctatagcacaatagaaaagtttgagaggtcacatggcaatgatagtttgggtgagagtgaggcaggagaatagggtgtggaggcagggaacctaaggatgtgtcactccgacttcctaagaactaaattgaaaggaaacccctaactttccatgcctaagtaacaaaaggaccagaggctactccctttgcaaacccccactttttctgcagggcagatgggaaattggctgtgggcagcaaatcagactgattgcaggagagtcttcctttgcatagaagtatcactttgtaacttcaccatctgcaagaaatcaaactgattgcaggggaaatcttcctttgcatagaggtataccactttgtaacttcaccctagcctctgattgattgctttttgcaccaatgtttgcacaggagcatgacctttgtaacttcacttcagcctctggttggctgctttctgcaaccaatcagactgattgcgcgttacttcatttacatgaggtgagcattaggtggccaataggaagcttctagagggtatttggactcaagattctgtatccgggcccttgagccgctgctcaggtcgcttccgtacagagcgtgctttaattttcaataagtccctgcttttgttgttttgttgcttcattctttctttgctttgctgggcgttttgtccaattctttgttaaaaacgccaagaacctggacaacttgcagtcacgatcctctaccggtgacaatatcatttaaatattggtagtggcttaaggtagcaaacatccctttgtggaacgtttactcagtaaatccttaaaaaacagatcagaaacaaaaactggcctcccagggatttggactcaggaggtgaattaggcgcggagagggcggagcctttggggtttatgggcggaattgcacagggtttggcggggatctctgctccgccttggcactactcggctccgctcgcctccgcgcggctccctgggctttcactcggctctgttcggctcctgctcgggaagggtgcgcgggggcgagtcctgcgcatgcgccctcaattcctgctgctctcagggctgcgctcagcctcgtgttttcacttccttttcagagctgtatccgggtcgctgctttccctattgtctgaggcagccgccctcgcgctgtgcaatttctggtctttcgttgcttctggtccaggctaataaagtttttctttctttaattttttttcttctagttttaacgggagaaattaactccccggggccgccgggttgactgcgctgcctgggccggaggtcttctccggcca

SEQ ID NO: 37726 - DNA, 2300 bp, Homo sapien
gaaaatccaacccatcagttctctggatatttagttttttttaagtggacagacataatagtctatattttcagagtccagtttttgttttgctttatataaacttataggggctacaagtaaaatgttccattggcataaaagataatgtgattatcacaatcaacttgatcataaaaatgtacatccttgttcaagtctatgttatggattttgcttctttctaaagtttagcttacaaatggctataaattatttgcataggaggtgcacttaattgtttcagttaggttttaaaaagtagttgtagtttactcctctaatgaaattagagatgttaaaccctttggaatactgacttttggcctcttaggcattcgatgaaataaatcagctgcttctttttacttgtttgcatattctcaatagtcaggtaaacacctgactaattgcttgttatatggatcatagcacatatgaaggtaaatcatttttttccctcttctttgtttagggtgctattcttaatcatatactaagtaagtattttacatacatatagactgtgtttatttggtcactacattttgttaatgggtaaaagaccatatattaagctactttgttatttacatctatatctgttattaatctgatagctaggaagttgtatttagtaagaatctaattaggtttgcttttatcttataattgggattcctttatgctctatagtgttaatgtgtacagtgtttattagaggcttaaatgatacttctttaagcatccagtttttattttattaaaaaatcttagtgtttctttacaggttagttttgtattcttttttaatattttaagacattgccttcctatttaataatgtgctattcgtataataatctgtttttattacatagacatttgtgttatttaataaagtatattgtgttatatccctatacttttgtgggtcaatgactgcttctgaaaaagttttttaaaacattttattcactatttattttgataaattttgtcctatattatgtgctgcatgtgtttccaagtttatgtaagaaataaaggtagaaaccataaataggtcaataactactttaactccattgcagcttttaggtagcagatgattatagtcccttacgagtttttttaaatggtctaaatttgcaacatagctcagggtttgttgggtgacaggatttgatgaagattacaaagtggtatttgtgtgtaaaattaataagccactattttggccatccacattgttctttgatttcttgggttcttaatggtatctcttatatttgtccacagtttattaattcttgcaagttctgctagagttcacttgtgtccagtaagatgtttctgtgattagcacatagagctatggattttttcaattcaatattctaagatagaaacaacagatttttttcacattgaaataattttgggacatctttacaaagatcttatatttgtatatttgtttatcaccaaaactattgacttcaagattggattcttttctttttttccccttctgttttttggattttggcagttcctaagggtactactactttttgctacttagtcttgaagctgaagcttttatttacttttgagtgagctagaacctcagagaacttgcctatcacccctaattctgacaagcaaattctttttcctttggaatgcatcacaaatacatgagagttccacatgtcgactaagtaattctgaaaggtatcactaatgaaggaatcaatcagcaaggattaggtcatttttaaatggcatgtatttgttatcttctgataagctagcatataaaatctttctcttcctcttttcattagttcttgagctgaaagataatttaattgtacgagtagttgaaatcagcaacagattggaactgtgttagtgtagcaaacttgttcttggtttattagctggaatttcatagctatatcaacaagaattatttatgtacattaaggtgataaataatgaattatgatacacatgcatcatgatagttgcctcaagttatacactagaaatcataatttgaaaattattatgacacagagttataaagtaaatatgcagtaattaggtagtaaattgatgtgaactaggaaaatgttaatacttcatcaagaactttgattattagcaatctgaactctggcgcactacccaaaaacctaaagttaaggagaaaagactatagttaacaaacaaaattgagcccatttact

SEQ ID NO: 37727 - DNA, 2300 bp, Homo sapien
tttgtctttttgttgttgaatttttcttagaaataaagtacagtttataaatgcatgccttctaacactgcctgctgttcaggacaggtacataactgtttcacacctttctttgtgctgaggatttgtcttaaaacatcttgccttttatgctgttaagtcacttatataacaaataagagccaatctctttcttccttttagaaggatagctgtaacctaggtgcagaaaagcattatgaaggggtgaaaaaggcattccactctaattgctagagtataatattaaaattgctataacattatcaaaataacagtaatagattttatcataaataacattaaaatttgatctaataaagctctagggaagtctttttggaaatgctaatttatgtttttcacattgcaggtcaatttttgtaagaatttatacgcagttccagattaataaaaatcattaaagtaactcagacagcaaataaaatataattgataaatgactgcataataaataaaattgcaaaggaagctttttaccaaagcatttctttactactggatattataggtaagcaaaaatttcttctgatatacaggagggtttttttttttctctctgctgagataagacatctgtttgtttcccaatgaaagaagaccctggctacatggatcattttcttagtgacagccctgacaagtttgacatttgtttcatgaagtgttctgaaacaatcgtaaagaaaatgtatcctttgaggctactggaaagtagacaggcttacctcttaatgtttaaacttgttaattcatactctaaaaaaatacactgactataacaactttgcagatctgctagttatatgtgaaatttcaagaatgtgcactcaattaacagtaacacctgtaatatcaaatgacaaaatttggttccttagccttgctctttttacacggacagaattgtagtgagaatggtaatttctaggcacagatggaccatttaataatgggctgatactccaggtggcaatatgagactgagttattctaacagagaaattaagtaaacacactgccatgtttatcttatcactaaataaaacttgcaagattttgcttaaatgttagtcagcttgcactatcaatttgtgatagaggagaccctcggtttttctttatttataaatgtgatttagttctcatgatagttcaaataattgatgccaattaataaaacctatccattcttttccttcctcttaggacgtaaccaactcctaacaatggccaactattttagcatctggaatttatatcactcaggtaatacctggatacaaattacactctatgagtacagataactttgtttaccttgtagactgccaagtttaaaagatttcttaaactcttgtaatcctttatataaaaggattacacaaagaggcaactctccctattctttatatctttatagatgttgatgtaagtacctttataatggagaaacatggcaaacaacaccttaaccaaatggtcaaggttaatatcaccaataatatatattaacaccctgatacgatgtattaaaaacggcacatcacctctggtttgtggtatccttcccaacagggtataacctaattctaatctgagaaaacatcagataaaccctctacaatataattaaacagtagtcttcaaaatgtcaaggtcggccggctacagtggctcacgcctgtaatcccagcactttgggaggccgaggcaggcggatcacaaggtcaagagaccgagactatcctggccaacatggtgaaaccccgtctctactaaaaatacaattattcgctgggtgtggtggcgggcgcctatagtcccagctactcgggaggctgaggcaggagaatcgcttgaacccaggaggtggaggctgcagtgagcggagatcgcgccactgcactgcagcctgggcaattgagcgagactccgtctcaaaaaaaaaagaatgtcaaggttatgaatgacaagacttggaactatcacagaccacaggagactatggggacatgatgactgaatgcagtgaggaatcctggactacataaaaaggacattagtgagaaaactggtaaaatttaaaaatggttcttagagtagtagcagcctctcaaagttaatgtcttggtttcaataattgtactatggttacataaaatggcaacactacaggaagctggataaaggcaaatgggaaatttctacactatttttgcaaattttctgtaaattta

SEQ ID NO: 37728 - DNA, 2300 bp, Homo sapien
cttgatgtttactccataccatggaattattaatcatggggtgtgactacaccctggaagtctgggatagaggactggagaggaggcacagagacctggagaatccacttgcggtaagttgtggagtatcggcagcaaaagaggagcttggggttgagagtttgcctgaggttgggaatgaagcgagcaagataaaactttgctgattttcagttgcagcccttgttgaagggaagaggaaaaaaaatccctgtagaatacatatttcataaaccgttattttaaccaccttttatatttcagttacaagttttaagatgaagggcataaggatataggaaaaatatcatgatacattgcttttcttttctgccatttctggtcccatttggaagtcacgatagtccttttctaaaagctgataagtcctttaaaaatgtttaaattgcagttgattgcactgacctaggaatcttctaatatctaattcttgcatgaaaatgtaactagcaagatgactcctgctggcttataatatgcttattacaaaaaagcccacttgtcagacacagatatttgaacattatgaaaatgaattcataagccaaatctgtctgtcagatgtctttaatttaaatgttctgatgggtgatgagactcagcatgatgacatccaaaattgtcgtgtgaaattaaaaatgtcagggaagaagaaggctagaaaaaaatttgacatttagttcaaattagttcacttgacgtttggaatttaaagtttctggtcaagaacagttttgatttgtcaaatttggactttaccacttatgaatcaagtgccatcattccattggtgttttctcttaaatgactgaggttatgtattttaccccagatcacctgtggaatgctggcgaggttaattcagtaactatagaaatactctttccagagcttctggggtgaacagtgctacagatttcactttctaaataaatacaggtaggtagaggtcattctaagtgggatattaaacaattttttttttccggtgaatgttgaacttcttgtgtggcacaatgctctagtgtgcgaccttctacttgacagctgtgccttaccctagctcctgcatagactcattatgcaggcttcttgctcatgcccgagtggtccacagctgtttggaagcccatagccggatgactgttaactgtggcccacctgcctcagttcaaggcttagagaagctctgtgttgctgcttttctaattcctgaagttcaactgtgctgtcaccatgacagttacatccttcttaagaccaagtaggcacactagagaagtaagtaatttgttggaggtggtgaggatgataatgatgcaggctgctttcagattaggcagtatcagtgtgcagcacagattcagaaatcagatctagagatgggttctcagtgattgtttcattttggatctttctctagccctctgagtttagccttattcttaactttcagacattacccaatttctcaagaagcctttccttgatcatagggtttcataaacatgagagataacctctttcctttctgttttgtttctcaaaatatgttgaagtattattcaatgagatttttatagaactgtcactctgcaaaactaggcactgaatgaattgtaggattaatgaagcataatctagttggggctattagatttacatgtttgaaacattgaagtagcatggcagtgtcaagaactgtgaagggttttatattttaccttatttgtaaacttacaagtaggcttgtcacagtttctcataccctggcagaagacacaagacagctcagattttcttacttacagaacagcacgctaaatgagtgttagcatatttaagtcacttcccctttcctctgagttccccagaagtgatgcaggaggccagataaatgccagctcactttctggattttgctacagaagagaacaccatgtgtagggaacctgaattttttgtaataggccgtaagcatgcctgccctttggcctggaaagagacactatatcttccagggctgtttgctgtgtaaacatccttgaaaagacagccttgaacaaagggcagtcaatagttctactcaaaagacatggagaaatgcaaaagacccatggagatttgtcttctaatcggcagcatcttgcaaggtaagttgcataggcagtactagctagagaaattcagttaaaggaactataaacttgatcttcaattccaaacaccctaatttagtt

SEQ ID NO: 37729 - DNA, 2300 bp, Homo sapien
attttatattttggttcatggtaagataacttagagtcagtaacagtaacagtaatttacaaaacagtaacttgtaacagtaatttacaaaattaatctttttattttaaaattatttcagacttacagaaaagctgtaaaaattacatgaaggtataattttcatatacctttaacacagatgctgcaaatgttaacatttcaatcacatttgcattattattctttctatatataaacttatacctaagtattattattttttgaagcatttgagaacaagttgaggacttgttgcctgattgcccataaatacttcagtgtatatttccgataaatgagggcattcatttatataaccaaagaacgaatatcaaaatcaagaaattaacaccaatacaacattattaactaatctacagaccttattcaaatttcactagttgtcctgctgtccttcagaatgcacaagaaaatagcacttttgtttttttctagtacagaatccaatccaggaacacacaagttgtgtttagttgtcatgtctttttagtctcctttaatctgaaaaagttcctcagtcattctttttcttttgtgcccttgatatttttgacgtgatattcagtcatgtggtagaatcttcctcaatttaggattgtctgaagtttcatcttggttagatttgggctatgcaatttgtcaagaatgccaaggaagtgatgttgtgttctcccagtgcatcctgtcaggagccacatggtatttagttttccttttgctggtaaagtctattttgatcacttggttaaacgagtttaaccaggtttacttgtaaacatgttggccaggtttcttccctgaaaactttcagtttcctttctgtagttaaaaaagtctttgagggggatttactctgagatgacataaatatcttttttttttccatcaagcttacagtcactagttttagcacatattgatgatttttgcctgaaggaattactaatagagcgcagccaaatgatgatttttctaattccagtgtttcttctatttttattacttggcattctattgtaaggaagagcaatcttcccctcacccgcatttgtttatttattcatagcagtatgaactcatgtattcttatttaatggttcataatccattactatcattatttattttgatgctcaaattgtcccttctttggccagtgagaactcttatgctcttttgctatgtctgcattcatctttcggcacttccttataatacagttgaattaaagtattttaaatagactacacaagagacttgtgccatcttttgaggaataccttatccccatcttatagagcaggcacgatgagaaattttgccgctgtttgaattaaggacttctctaagatgatttgttttggtcatattaaaaaagactttcagtggccatttgtgatggattaaatacggccatagagtctttgcaggcccttgcatcaagctttgtgacttgctttgattggcagaatgtgcaacctctactttcaccttcttggaatttggccctgagattgtcatgtaaagaagccaggctagcctttgaaggatgaaattctacctggcggaataccaatgtacacagtgacaacaagttccaactgttcgacatgagagtaaagccattctggatcttcgaacacagctgccctccaactgaatgggctgcatgagtgagctcaggcaaaatcagcagaagaaccatttggcaaacacactgcactgtgaaaaagaataattaatcttttaaaaaaatcctttaaattttgggatcatttgttacccagcaatagttaactaatgtaccattgtaaattcaaattatttctagtttaatagtaccgttttcttaagttattgagagcttttctcgataatgcataaataggtagaatattctctcgagtctccttatctggtcaatctatttgttttgagttagatagccttacggtcacaaaaaggataaaccctgaagcgttactcttgatttttggagatgttctgggctaagtgatttcaatgtgggccgtacacctctggagttctatctaaaagggcaaaactatttttaaaataatatgaaactatttgcctttttcactgagttggcatgaggcaaaagcaatggaggataaaattgctccaccaaactgttccagtgcttgtgttgctggattttattcatagtaaaacaaaaaatgtgtttgacttaagaatattcttaatgaggcagt

SEQ ID NO: 37730 - DNA, 2300 bp, Homo sapien
gcctgtaagcgtgagggatcctaaggaccccttgaaggaggaagagactttggctcaagataggtagtgaaccaccaagcaaatttcctagaaagaaatacaagtcagaaccagaaccttaatttcaggcacatggacccagaaatctaagcctttccataagcaatttctttttataaatctaacttataggaattgccatagcatagcaacagcaggagtcttgacagttaactgctcaggcagacctgcttacttgctgctgttttgaccctgctgcgggggaaaaaacagtgtgcatttggatgcctctgagtgatgtttgtttagaaatttaactttaatatatacagtaagaaacaggagcaaggatcaatatggtttttgaaaactatccatctttatattgaattttaaattacctggatttattgaaacccaattacttatttcctccatatgggagctggatcaggatgtcaatttttttcttgtgaagatatgattttatacatgagaaagctctctcaagaaacccttaataataacaactccctgtggtcacatacggaacaaagaaaagacatctagtagaaaccctttgctctctcactgtattattttttgggagaaaaatctgctccatctaccccactctaagaggtatggagtgagaagagtcctgagagggatagacaggctttctgaatgaggaggtgttacagaagtcatccattgagctcagagattggaaacgaatgtctccattcttttttaaactattcaaagaaaatttaacagcttctctagatgatcctgtaagtttgcagttttttttcaataatggatgcaaataatatttacctgacttttcttctacatattcaaaactctttttccactgcaattggggctattcccccaatgcaaaggtaagtcgaattttaaaagacttacctataaaatcatatttttaatttcttttcaattcagcaaagtgtacaatggattatttctaatgctattcagtaccaaaaggccaatgtgtaaatgatttgtgttaagctctatatgcattcttctttcatcttttaggagagatgagattctttatgacaaatagacaagcatgtaaagtatattacctatcttgatcaattgctttaatttatgaattgtccttgtaagaaactcaaaatactgctttgtgtgtgtgtgtttaataataacttcagtgtggccaattaactgcgattgccttgcaatgactaactgcttttctgtgacaatttttctatgagtattttgtgattataatattgagagaaacacagacaattagcaataggcgcctgtgattaaattccagagaatcatcagttccataaataaagaaaaaattttgttttgctaaaattctgttaaactgaacaagtatagtttgaaaataggagcttccttcacgtcaccaatgttttttatgacatctatttccatcttaaaacctcacttgagacaaattaggcacagttggtactacacttgaaaataaacgagataaacagctgtaatatcaagttaaaaccatagtgcaaaacaaatgatttcgtagatacatttgttttcttctctatatccaaaaaacaccatgaattagcagaaattgtgacttttctgaaaaagaaatatgcattatttaaagaaaacatttatttaacataaagagctgaagagttatttcaaagtacgtgaaaactattgttttgaatctccaagaaagaattttaacttgaaatgaaatcagcttttcaattgctggacttggattcatgtgctcctgacagaaaaagcttgtgtgcaattagtattttcaaaatagcagctataaaatcattctttcaacaaatgcttgttgaatacctgctgagtaccaggcactgagctagctcccctgggtaaaaagggcctggagtcactacataaggtggtcaaggttaaccaaatatttcacagtcaaccactgacagaaaaattcctgggattcccaaggtggttcaagattcaaagacaagtcactaaccacagtgtattttcatcatagcaaaatatattatttgtcaaaacatgattttctgttccgcagggggctgcttggtgatgagccagcctgatgccgacaggtcttgtaacccaccgtgtagtcaaccccactcgtactgtagcgaggtatgtgaaaattcatcagggcagacaagccagctccatcatgtgtcaccccactgtctcttatgcagtttatc

SEQ ID NO: 37731 - DNA, 2300 bp, Homo sapien
agttgagttattattataccaccatgggtaaatataaaggtcagaatcttaaaatttcttttgacaataagctattaagtatagtgtcggatggctttttgaagggctaggtaaatgaccttgcacattaacttaattcctcagactctctgtcctctgttatataatgaattcccacttggtgaattgattggcgcttcccacgaatgcgtagaatggctgctgttagcagagtatgtccagtttgaaatacttcctgtgccagagttagaggatttcaaggtttagggcactaacagtagctgagaaatacaagcagaaaggatgggaaaatgattccttgtggagtggacatggaaattttcctgaaacgacagaacccaggaagcaatagcaggtcccatttccttctgtggtgtaactgtcaaaagaagtgatccttcagggaaccatacattagttaagatcaggcttcctttttattccttatcaacctataatcttttgattgttgcctgtttttcacgagtgaagaaatagtaagccacactagcttatctctcctaatcacagactcacagcgctcgggctctctgagcttttaattccttcttagaggcctaacagagcggaaagtaaacaaagaccaaatttgcaaccttcaacgtagctaatttcctctgatgtcagaatacttaaacaggcaggacctgggaattatttgatcaaacccgcttttaatctaatgcatgcagaggggctgtgtctggaaggctttgcaaaatgacaagggtcccaagggagccttatggaaggtttcctctttcagaaagagtagcttcctcatcttaaactctagggtagctatgttggagtaaattcataaaaagtagttttcctgcttttaaaattttattttatttggctgaaaattgctgatgggatagtagttttctttggctttccgtttgctgaatttttaatggttaaatgcctactattttagctttactgtgaaatgaattaataataaaatatattattattagctaaagggagaaggagaaaggggaaagcattatccgacttcacacacattcttctattactactggtagaagaaagtgaaaacacaaaggacaaaagatgcaaacacatgtggttccttatttagattgcgacaggcattttgctacagtaagagttaagaaaaatcggtgtcagggaaattttaaatgaagaatttactaattccaagatatccagacagcattactgactcagtttgactcacaactatctgaatacttagaagtagcatatttttgagggaaagaagtagatgaagggacagaactctatacctgaaatataattttaattttaagggttttttttttgtacaattgtatttatgtaattaggtagcattgcaaatactcattaacactaattcagttttaaaggctattaaaagacaatttaatttgtcacagagcatcaatattgctcatatttttattgataatagattaagttaaaaacaacatttaaagaagggtttaagtgcattttgacaagtcaacatttctgctctcgtgttttcacacctgatctcaaatactgctccccacacaaagtaattcagaagccatggcttaaaaatagataataaacactgatgctttgtgtaaatacgtactaagaatagcatgccactagatctagcatttgactccttggatgacagtgaatatcaatgcctgttatttgtcattctgaaatctgccgggtgatgattctttttattggtgcatccttccaaacatatttcatcgcaccatgtgcaccggagttctttaggcgggtatgtcggaggtgggtgtcgcctggctggcccctctcccctttgctcgccccctttctcgccctcgcgctctcgcctccctctgcctccagccccctctgctcctttgggctcacgcccccctcctccccctccagctggcgggggctgcgctgcctcccagacctagcagacctgctcagtcagctggggccccctgaggacagttgcctccggagccgccgggacctgccattctgcgaggaatggcagcggcagcagcatccccgccagaggcggcggcggcggcggcagcggccacggccaccaccgcggacgctattgttccctggtgttagacgcgctctccctccttctcatctgaagcgaacaatagcaggaaagagctttgctttctgtactctttgaaaagacgttccaagagcggagaaaa

SEQ ID NO: 37732 - DNA, 2300 bp, Homo sapien
gataaatttgtaatcataatatctaatatttactgattgctctgcaggtatcagctcccatccataaccctttgagacagacattattactatcttcattttgcagataataaaaattaggtataaagaaggctaagtattttgcccactcttacagagattttgtatatctctgtcaggctgggctcattttcaggccatatggctcccaaggctgtgttcccaaccctgctactgaactgcttcttacagcaacattctcccaggaagacttattcctatgtgaattccaggaatttggataaggaactgtgctatatggccagcacgttttaagttaaatgatgaggttgagaaaatactaaatactcccttaagaattaaagaaaaaagtaactttttcacttaagaataatatatattacattatagaaccatttgcctatttaacaataataaagaaaaaacatccatgctctcaaactacaggcaactgtttatattttgtatatttctttccatttcaaggcagatatgtaatatatttatatctatatgttatctatatgtgaatatagtttacatcctattacaatacctcatatcctatactttgcatcctgattttaattttatatcactccgcgtataacagccttataagatggtttttactggctttataaaaactcaatagatggctattccataattttaaaaactcagtaattccaaggggaacatcatatctccacaggtggactgtcaataattttgagaaaaattttcccccatgattctgatttgttttaaccaacctattaattttgaaatttcaaacagtgttaatggaagacaccctgacccttccctttggaaaatatgggctaaataaaagcggttgaaaaataatgattttatcaatgtcccttgttggacattcagtttatttaaatggatacacctcatacccaaatctttttagagttctcattaggtttaggatacttctgaaagggtggaattgctggaccaaacgatgtgaacattttaatagtcttgatacatactgactgtctgccagaaaacttaggagttttaaatctccgacaacattgtatgagaaagctcattatctcacatatggatctacagtaatcctcttaaattgtatatcgttctgacttgtatttcctacttttacatagcttcatttcccaattcctgttagaattccctgattctaacaggatcacactgatcctgttagaagagagaaatatatgactctcacttccttgctcctgtgactgtaagaatgcctaccattcattaaacgttaaactctccgcaggaatgagactagagtgcccttaatattattaccggcatctcattgatccctcaaaacgactccttgtcgttgttcttatcttctaagtgaaatgacctagacgttgggggagggcagccccaacccacagcgaagagcttaagtactgggatccgagacgggatttcacacacctgtaactagcaccagagttaaggggtggggaggggcagcgtgggcaaagcgaaacgaaaccgagcaaaaacaaaaactacggccttgccgcttgctgtctccttctagttggccagtttctaaattaaaatagaggtagctttgctgctgtcagcggcgtgtgtacggaccagtttattccattcctaaggaccagactgtcagcgacaactcgcattgcgtgagcgaggaggctgctcagctgaaagctgaggcagatggtgcacatttataccctttgcaaaaggaaatggtctgatatgggaaataggaggagcgactgttcctaggtaattcgtggctacagtggacactttgaagtctgggggacgcgaaggtaatgaaacctgaagagcgcacaatctcacacgatcgacgcctctgggctcaaacaggaggaagaaggacgcatgcgtcacgcgcacgccaggggtgtccctccgggagcgctctgcgcaggcgcggacgcaggttacagcagcgcttggcctctgctgatgccgtcgttatcctacccctcccccgtcccagctctacggcggccgcgcgctccaggccggtcgctccaccccccggctcccgggactgtggactccacgaccctgtcctcggccctgtccgcgccgaagcagcccgggactgcgcagcgccccgcgtgccggtgagcgaccccggacgtgcagtccccaggtccccttccggagcgaggctgagcggctgcgccgcggcttga

SEQ ID NO: 37733 - DNA, 2300 bp, Homo sapien
tctgtgagtaaactatttgtattttcaggtcatagccaccttccattcatctttcaaacaagtaattccaagtaaatcaaatttaaatttaaataaaagtattaaaaatttaagtttctgtttgtataatatttactgaagtgaaaaatcatttttgaaaatatgttatatatttgaattccatcactgaaaaccaaaatgcaaatcaaaaattaggaaaatatttgctacgtataaaacaggtcagatagaaaatactcatgcatcactaatgtataatcagcactccgattaaaatgagcaaataatataaaaaaaccttttcacaaaagaaatctgatatgttcaaaagtacaaaaaccaacaaaaatatgaaaactttaacctcgttagcagtcaaatagataaataaaggttgaacatctttcatacaatatcaggaagcgtagagatagtacatttagtaacagtctttccagggaacatatatatcatatataacctgcacctatgtgtgcattttgccaagaaattttacttctggaaatttattgtaaaaaaaaatagttaaggatgtgcatacccccagtgatgtttattgtatctttccttgtaagatgaaaaagtcatagttaagtggtgatcaataaacaggtttaactaaaactctaaatataatgatgtcatatagtagaatactttgtagtcatgaaaatgctggagtaggtgagtgtgtttattgacaggcgaagatatgcccaaaatataaaagaggcttttgaggaatttgcacaaagatcttaatattagctaccttaagttggtttggaaagtaaaatttgtttttaaaataatttaatgtaactaacacagaccatttttgtaaaaagagaaaaaaagagttatttttaaattttaagaaaattaaaaggggaaaaacaaccagaagagcaaacacagttgtgtatcttcagtgatttttagaagagatagcttctccacatacacagtacatcaaagtggctggtctggaagaggtgatattcctgtgatgggagagatggttcacagttagattgcacaggctactagggtcattcagcaaactctccttgctcagattgccaactccccaagctaccttctagttataatttagcttctgattctgtttgtctactggcaactagagaatgctaattagctgcgggaacatgtactcctctgaaattatattcatctgtgtaaattaattatttggcaatctaattctgtattaaataattattatcagaaacattacttggcaaacatcctcctcaatatttgtaatgtattaattgtataaattatcttatttttgtttaaattatttaaagaagttgcaagcaatatatttcaataaaaagatcagtatggtaatcaaatttcaggtcagcaaaatgcaaaaacccatattttgacatagaatgttaagaggaaagttgtagtcaagaaaatcagtattttattctttttttatattgagggaataactatttcttattttttaaataatagatttttcttaatccaggttgaatattgcttcaacatcttttatttctgtatttatttctgtttttcagatctggttttcttctggggcatttatccgtgctgatcttggtgaatggggcatgagtctaacgatcagagcccctagtgtagattacagaaacactctgggactttgtggaacctttgatgaaaatccggaaaatgatttccatgacaaaaatgggatgcaaattgatcaaaattttaacaattatgttgcttttattaatgaatggaggtaagacactatttttccacttgcgattatattaatattagacttaaaacgggtggtggctcaacactctgcttttttgcaacacatattaggaaacaaatgtttatgtacaaaattactattctttcctgttttccatctggaaggattttaccaggaaaaagcatgtctgacacactgccagtttctatgacatcacctggaaagccatcctattgtagctgttcattggacactgcagcgtatccgtcttccgaagatctggacagtgtttctcgatcagaaattgccttgggttgcaaagacctcaatcatgtcagcttatcttctttgataccagaactagatgtcacctccgaatatattaattcagacactcttgtcagagagataaacaagcatacatctccagaagaatataatctaaatttatttctgcaagaaaaaaaacacataaacctga

SEQ ID NO: 37734 - DNA, 2300 bp, Homo sapien
ctctgtcgcccaggctggagtacagaggagctatcttggctcactgcaacctctgcctcctgggctcaaacgattctcctgcctcagcctcccgagtagatgggactacaggcgaacgccaccacgcccatctaatgttttgtatttttagtagagatggggtttcaccatgttggccaggctggtcttgaactcctgacctcaggtgatccgcctgcctcgacctcccaaagcactgggattacaggcgtgatataaccagcatttaattgatacattcttgcagatccaagccaggttactgagacttgaaaaaaaattcttaagttgcttttagttttttccatctttagtcacatggagggaagttgggttttggcacaagtttattgtaaactcataaactcataaacaatcaaaaactgaagaaaaaaataaggcccacgatacctgaaattgtattttgatggaagtcagataagtaatgttgtcctccaagaaagtataaaagtttactacatttgtatagatactgctagaaaataaattcacaaaagtcctgctatgatttgattcacatcaaattactttgttcctggtgatttcacaaatagattgagaaaactgacatttaatttcttgtctgttttattagaattttttaagcggaaacaaaagacttaactgtacactaagaaatctctgggttttcattgtgcctacattatattgcccttccatacttaagccttaagataaaaatcacctgtctaccgtccaccaaaaagtaatattttatttttaatccagaaaattgggtgcccttgctgcatttgaaagatggctacacacaagtattgtgtaccaaaaagaaattatttccaatatgggttaatatttttactatggagatgataagctttaaaattttaaatggtaatttacctttcaaattaaaaataaagaattatatgaaattaaaaaaatacttgtttatgcatttggacacctcctgtttccaccaccatgcctaggccaaccttgaacctccaaatttgtgggtggaaccttggtgcccacttggacccccaaactatcctcttcaggtaaaggctctgtgagaaccaagtgcaaggtgatggatgggagactcaaggaatgagacagccagggaaaaactaggacagtgaggtttcattttcagacataaaaagatgtagaatcagttgaaaaaaggaccctgttcctctgcagaggcaaccacacttctgaagaccttagacctggcacggtggctcacgcctgtaatcccagcattttgggagactgagggggaagatcgcttgacgccaggagttcaaggctccagcgagctgtgactgtgccactgcactccagcctgggtgacagagtgagaccttgtctcgaacaaaacaaaacaaaacaaaaacgaggttgggggaagacattagagccctctgatcttctaataactcccaggtcaaccttgggagtcgtgtggccatgtgctaaagcgtcctgggacaactgtaagagctctgggaatcactggcaaatacaggtgacaaacctcatggtttggctagtgtctaaatgcggtcctttccacttctgaaaacctgtcacagaggcagaagaaaaggcatctactgttgcaacgttagtgtctactcctcctcctgtcgttcatcactgagatctaaggtgacaggagcattttcagcgccttcgccttggggtgcaaaccagtagcgcccattacgcagttaggaatccgtctgcagatacaatcatgggaaacttccccttccaacggaaccttgtgaggcttcttttatgcgaggtccatctgagcagtttctaggattaccaagttttcatacagcctctgttagaacagcaagacgcagcgggcggagagctacatccctgtagcttgactcctggctgtgcgactgcacggtgacatccaaggcggcggagccactgccggtacacgctgggctatggggacaggttgggcgtggctttcaggtcagccagcagccaaaatgggaagggaggagtcgcagacggattacgcgaaggctctatcccacgaaaggactgggtgcaccccagaacgaggacgcggagcttccctgttccaagcagcaacagactgagaaaatccaagaaaggaggcccgaggggctgctgtggccccatcctcctggcacccgcggcccgggctctgcgacgcctttcgccccacctgcggaagcagcgatgcctggcgg

SEQ ID NO: 37735 - DNA, 2300 bp, Homo sapien
atagttttatgttaatgtaggctatttatttcatgctgctttgagcagctaatcattaatgttctcagcaagccttaaagttaagccggtatttgtctggctctgatgaaaagacatagacttaccaataatttaagcgcaagcatttccttaaaagtttcattttttacctcatgtggtggtatttctacctcatgtggtcgtaattctactttaagttcaatgaacaagaatcttaaaattttaacattcctgacagatgcaaaacagtggaagtacatatgactccacagaggtgttaatttataaataaaagttagtgcttacctagaaatcaaacttggttctcttcaactgctagtggatgactttgatttttgtgggctccccagagtgggaatcaataactaagttatctatattttatacagctctcagactattggagtgaagtcattcattgaaaactatttataagcatctactgtacatcagctactctccttggcactgggacacaacagcaaacacatgacaaaatcccttccttcatgaggtttctctattatttggagaggcccagtaattggaaaagggtagttggagatgaacacaaagaaataaccaggactacataatgaagggcattagaagaactttggcttaagatgtaaagacattggagggttctaagcagaagagtaatatgataaaaattgcattaaaaaaagtcagacagacaagtctgctgttgtgttgaggatagactgaggtgggtgttacctccagtggacatgtagattggagactattgtaataattaaagcaagagatgatagggtttggactggtgtatttactggaggcagcagaaacttgttgggctcatgatataacagcttataggctgtaagataaaaaatgaaaaaaagggtgtctccattttatttttattttttgccttagcaagtacaagaatggaattgctattaactgagataaacaagactgtgcaggaattggcaaataatatcagggttaaattttggatctggtgagtttgagagaatgtctaaaaagagatcacggggagatgtcaaggaagttgtcctaggtgagcgtctaagagtctggcgttcagaagatatttcagtgctgggtatatatattaggaagtcttgggtgtgaacgtgttattggtgacatttaaaccaataagaatgaatgacattaggaggaggctgaggtgggagaatcaaagccaggagtttacagtgggccatgactgtgtcactgcaggagtttacagtgggccatgactgtgtcactgcactccagcctgggcaagaaagagagactctgtctctaaaagaaaaaaaaaaaaaataaaacgatgagattaccaagagagtgtatatagataagaaagagatcaggcctaggactaagtcctggggcatttcagcctttctactcgcataacctgagtaaattcaggtatctgatttatttaatccagtatttgctgcatttctttttctaaagagcacatttcttttcaagaattacacattaaaattccagggaacttaaattatgcaaaatatcctttgggaaatgatttaatttcattgcctcatctttccacttaatgttgcttatgtcaacaatgctattaaatacgtacttgcctttatttcagtagttttcatagtgaaattggaaaggtgataggataatccatttgataaaactggcaatagcattaaatcctaccctccccttttattaattttcaattataatcatcaaatcttgatcagaagcaaagaagtttcaagtcatttgttttctttccctcaaaatatttaaacaaaaatttagaaaattattttaacatgttaaaagacagacctttccttctagttggaactataaattctccaagcctggtgttctttaagaaggacatttattatttctgttacttggagatcttctctcttttgatatacttgagtgtctcagagaagcttcttaaagtgtattagaaaaaactgaaaaatgaagattcaaatattgatttcaatatgccataaacatactaaataaatgttgattatttcaacctatgccaccttgtatatgtgaacacaaagctcatacatatactctttttcttttcttttctttttcttcttttttttttcagaaataaacactatcactaaccatctggtatcctatgattcctgaaaataaaatctatttctaggaacaatttaaaccgtagaagaact

SEQ ID NO: 37736 - DNA, 2300 bp, Homo sapien
tcaaaataatgcaatatagaacattattagccttaatcatttgaacttttttgtgatgttcaaatgatttgtaagtttgtaaggctgcaggatttcaggtcttaagaacaaacatttttctacatgttgttaaaccaaatggcaataaaatagtaaattaataaccgaggttttacagttcatgtgaaacacttccggagctaaagatttttctttgtgtcataggagctaaaagtatacacaggaaaaagtgaacccagaaccactacactaatctctaataattctttgtattattcttccggttcccaaaatttctttaaatccgtaagtatttttattatatcaggtctaaattttatatattgatatactaatattttttaaaatctatcactaaaatagagatataaaatcgatgttgaaattgatgttgcaagttttattttgttttgctttgggatcttggatttcaagtccacagaattaaattggcattactgcttagttcatgactggcttttattctaacagtgcacctcccttattttatatttcatttcgagattcttcccattaattattgcatcattcatccccttcccatctccaccaggcatccacttacatgcagacaatgaacactcttccaaaccacattccacatagttgatggccatttgcaaatacattcttccataaaatttgtttttattaatatgggtgtgctctaaatggtattgtgtccgaattggtgggttcttggtcttacttacttcaagaatgaagccgtggacccgcgcagtgagtgttacagttcttaaaggtggcgtgtctggagtttgttccttctgatgtttggatgtgttcagagtttcttccttctggtgggttcgtggtctcgctggcttcaggagtgaagctgcagaccttcgcggtgagtgttacagctcttaaggcagcacgtctggagttgtttgttcttccccggggggtttgtggtctcgctggcttcaggagtacagacctttgcagtgagtgttacaactcataaaggcagtatggacccaaagagtgagtagcagcaagttttattgcaaagagcaaaagaacaaactttccacagcatggaaggggactggagcgggttgccactgctggcttgggcagcctgctcttagtctctcatctggccccacccacatcctgctgactggtccattttacagagagctgattggtccgttttgacagggtgctgattggcgcatttacaatccctgagctagacacaaaagttctgcaagtccccaatagattagctagacacagagcacagattggtgcatttacaaaccttgagctagacgcagggtgctgattggtgcatttacaaaccttcagctagatacagagtgtattcactctgaatacagccgattggtgtattcacaatcccttagctagacataaagattctccaagtccccaccagactagctagatacagagtgccgattggtgcatccacaaaccccgagctagacacagggtgctgattggtgtgtttacaatcccttagctagacataaagattctccaagtccccactagactcaggagcccagctggcttcacccagtggatcccacactggggctgcaggtggagctgcctgccagtcccgtgccgtgcggccgcactcctcagccattgggcggtcgatgggaccgggcgccgcggagcagggggcggcgctggtggggaggcttgggccgcgcaggagcccatggcgtcggggaggctcaggcatggcaggctgcaggtcccgagccctgccccgcggggaggaagctgaggcccggcgagaaatcgagcgcagcgccggtgggccggcactgctgggggacctggcgcaccctccgcagctgctggcccgggtgctaagcccctcactgccgggggcggcggggcggtcccgccgctccaagtgcagggcccgccgagcccccgcccacccggaactcgcgctggcacgcaagcgccgcgcgcagccccggttcccgccagcgcctctccctccacacctccccgcaagctgagggagccggctctggcctcggccagcccagaaagtggctcccacagtgcagccgtgggctgaagggctcctcaagcgtggccagagtgggcgcagaggccgaggaggcgcccagagcgaaagagggttgccagggctgccagcacgctgtcacctctcagtataactggtattgcattctgtttcttactactttatt

SEQ ID NO: 37737 - DNA, 2300 bp, Homo sapien
cccaaagcacagaatgaaggtattctctgaagttcccttatctgcctaaagtctcgacttgccaaagaagaaaacagttacctctggtctcttccctgactttccacaaactgaactcatattgcagaaagaaagactgaagtctgtcaacacacacggagagctctgcaggcttaacatactttgtctcaggccactgtatgttcttcaaacacattgaattcccctaaaaatcattttctaaccccccaaatcacccatacatcacccatctgcctttcctctaataaggaggtacaaccctctgtacctcattgggatattggccaatcactctgtgattctcccccatgcccgctgataaatttgtatgccatttgtcctgttaatctgccttttgtgacttgatttttcagtgaaacttcagagggtagaggggaagttttcccttggcccctacactatgaactgagatagacaaaataaattagtatgtttataaagtggaataccatatggtcagtaaaaaccggtagctctatgagtactgtgtgttgatacacagacacacacacacacacacacacacacacacacacacacacacacacggggggggattcgaaaaggttatatgttacattttctgttaaaaatttaaaataactacattacctatattcttgttgacaaaatttgagtgcctggaaaaatacataagaaactggtaacgtaattgcctttggggaaagcaactgggtggcagggtgaaatggagataattttttattgcacacattttgtacttttaatttttttaccatggtcatgtaataacctattaaaaacataatttaattaaggaaaaaaatctaattttgcattattattgaccttccagggattcatgtaatttgagaaattgaatgaaaacaattttacatgcatgaaattcagctttcttactctatacatcctgagtgatttgcctttttcagtaacagaatcctttgctataccagcttgttaaatgaatgccaaatcaagagtaaaatttccatctgtattccatagtgttttagccatgctgcaaaagcaaaacctgtaggtaaaacaaagaaaattatcaccttgaagctaggtaacaggtaacccagaagtccggccaagcataaaattacagccacaaacagccctgcagagaacatctcaggacggcggctgctgggtttttgttgttgttttcatctttcttggccaaaggaagcaggtgttaagagagctcaaccacagctcctgaactctgagatttacagagctctgtcacctggggtaatactgccattcttccaggttttcttcctgtccaagaaatctgacatgctgtttttcatggtattttcaaactggaagatcgagacagaaactttggtcgtcaggaatgcagagattgcccaatgaaatgacagaattgatcattaggatgcttgttactcaaaaagcccattttttaaagaaggatgtattaaaattattccagcatgctaatgtggcacactcctctgctgcctaacggcaggtgttgctattagcagaggaagccttgttctaagaattattctagagggccagaaagaacaggtattgctccacccgagtaaacgctgactcaactctgcagggctggcgcgctctttcctcacctcacccctcctgccaggcacaactgagatccagaaataagaggattagcgagagaaggggaaatatgcaggacggtagtgatgggtatgcacaaaggagtgccaagcagttttaaccgttaatgttcttcgtctattgctagagaaaatgtctttccttggaggaggcattggcacgagttactataaactccctctgaatctcaagacttctgggacgccgattccgctcctggcctggggcaaggcgtgggagcttggaagccagcgctgcgctccccgtgggaagcgatcgtctcctctgtcaactcgcgcctgggcacttagcccctcccgtttcagggcgccgcctccccggatggcaaacactataaagtggcggcgaataaggttcctcctgctgctctcggtttagtccaagatcagcgatatcacgcgtcccccggagcatcgcgtgcaggagccatggcgcgggagctataccacgaagagttcgcccgggcgggcaagcaggcggggctgcaggtctggaggattgagaagctggagctggtgcccgtgccccagagcgctcacggcgacttctacgtcggggat

SEQ ID NO: 37738 - DNA, 2300 bp, Homo sapien
aaataatctgagatatgccaagtgttatggaaacactgagggagagaccaagaaagacgactctcctgctctgttctctcttgttctaggtccaacttcttcctgtttcccctttttgcctcccatttggcctgtttcttcatttctatgctatgcaccttttttcatctcagtttaactttagtttctctttcttccggctgatttcctttaaccaaatgttcttttcccctggaagttcagctctctctcctgtgactttctctcaatctgtctctctgatgaatcctcatggattcatcctaatttaggtcttagactacactattttggatgaaattctgttttcttagggaactgaagtaggaagagctgttgggcaatcccatctgaaagtcctgttgactattttacttgaagctttttttctctccataattctctcttgacacaagaacacttccaagtactctcattttttttttctctaaaggcttctgtttcccaataaccacagaaactttgtgctttcacagtaattatcacattctacctgtgttatatcactttttgtctttttgcacctttgaggtgatgaacttttagagaagtttcattaattattcatatccacaagtgccttgtacagtactggccatattgaataattactgaatgaatttgcttgttattaacatgttattgacttcagttttagcatgtctttaagattataaatgtttctgcccaaaccattttctattatatttttgaaatttatgggcatcaagtggataattaagtagataattaagtgaataaggtgaatctgtaaaccctacaaaatatagtagttaagaggacaacttggataaaaatgtatagaattaaagaattgtgttcaaatctcccttgcggtcatctgacaaagtcaaacttaactgctgtctacagtaagatatggcattatttcacattttaatttactcaaatggcaaatgtggcatttcaaacactttcattcatgctagatttaagttctgcatggaaagtcctctgtaaggacatcattattctatctggcatcattcattcttgaacatgggttataaaagtttcagtcttttctggcagaaaatacaaatagatgactgtgtattacaacattataataggaataacagcaatgcatcaagaagccaaaatgtgttcagaactcaggctgagccttctctgcctcctcaagctaacacaaatttttgactccaaatgttataattaaaagtcttatcttcatctacgtatttttcatttctcatttctcaaatgcctgttccaggtgtttgccaatgtttagacagtcactactcaatgttttctattattttgtttcttaaaatcttcaaatgttggaaattacagtgttggctttcagggactcaaaaatgtgtaagtgtgtgtggttttgtgtgttttcctcctaagctcagggataaaactaaacaaacacgagtactgggcaggctagctagttttaaaagaaggcaaaaaggctcagagaatcggcatgttgttagacagggtgtgcccactggcacaagacctcctggggagaggctggacattcaggatgtttatgagtaaaagtagaaggtggaaaaagaacacacaaggcccagtgtcctgacagcctggcacgaacgcagctcaaaataattactactgctgaaggagccgtttctgttccatcttgtgtccttgctaaaataaataataaataataacaataaagcagtctacataaatatatgaaatacccatatagagctatttatttgtatataaaatatctgtatttttttcttacttctatctgaggacgccagcttccgaatgaagcggagtttttgtctaccagacccacaagcagcatggtgcgggtagaatcctgttttaaagaagcccagaacaataattcccgcaatcatagagaaaataagccagtgcccgaaagcaacaaataaaaataatgtgtgaagaaaaagaaaaggacttcttcctagcggcggcagatgcccccagactttatgacttcctctccatcccgacagggaaagcaggactgagtttgtcggaaggtgagcggggcttggccagagacggtgtgcgctgaggcagcggccctggacaagagtggcgtttggatacttgacggtgaaaggggaagaagccagtcaccagctccaaagtccaggaactacacctggcaaaggtcaaagcctgcgaggtaagtcaattgc

SEQ ID NO: 37739 - DNA, 2300 bp, Homo sapien
tgaggtgtagtcattccattaattcttgagctttcggctttggcctctgttccccagacatttgctagggaatatccatagcctcattttagtcttctgatgtcatggccacatatcactacaacaccctttctggttctgtcagccactactgcattcttctcaggaactctgctttgtttttcccagactaccctagaattgtgggacacggtatcctcatcgtaccagtgccccttggcccagtggcttggatgctaccctcagtcatttctgctctaatgcttaggctcatggaggggtgtaggacaaatcaattggaagggaagtgtgctgggctcttctcaaagattgattgctttgggttagatttcctacttttttcagtcttcttttttactttttgaaccagacaaactagtcttacaccacctcacattcttgcctactctgtgtttcctgcaagatacactccagcccctaagacccacaccgtactgcttaagatgcaaaaccagctttcgaaacagcatcctcacttactcctggccaaaaagctgtagcaaaatcaaatttcttttaaattaaaactatgttggctttcagacttttgtctctgctattacttaaaaatgcttattttaaaactaaagactgaactaaatcttctctgttctggataaatttgtccttacccccaaagtaatgcataccactagatttataagaggagagccttgaggcaataagaatggataatgggaaagatacaccaaatcttagatctctaaaatgtaccctgaagtaaaagtagggatgaatggcatttattctgtgcctagtgcgtgccgagtgaatagaattgtaagggtaaacagcagataggctttgaccttcaggtactgtcaaatgctgggaggcatagacacatacacaagtaagaggatgacaaggtaaaatgtgagacatgcaggaggaaaggtgtaaacacattataattggagaatggatgagggcgctgtaaggttagccgagagaaaggacgagagagagacccaaggtcaggagagtaagtttactaacctgccaggctgcttcaccacagtcaaaggaggcagccctgagcttacaaaatgagggttttatatgggggagagagaccctggggttgtttgttggttaaccttaccacatatcatctcgtgaccaggttacaatataggaatttacaagagggtgtaacttaggtttatccacgtttctcgtgacctcccccatgctgcccgtagggctgtaagcaagtctggtgaccttgctgtagtgcctagataagggtccaggaatgcagctgcagagtattcagggtaagggacagctgcattgggtgggggggggggggtgcgggggcgggtgggaagggggaggggttctggtgcaacttgttcctaacattccagccttttaataggtaatagaagaggggcgccgttgtcctctggctgcttcttgctggataggggcgatggttggggggagaggctgggtagtagggactgctgttcctggagctgtcggtattctcggagtagcatcatgtcttgtactgttccatgggtgaaggctctaacacggccctgtaaaaactgggtaaggagatgtaagagacatgggccaagtgctaaatggaggaagagggtaatggcagggcctaggaagggcagtagccagggtgcccaggagttacgaaatcacctgggccgggaatctgaaaggcgctgcctgatttcagcagctttttttttttttttttttgagatggagtcttgctctgtcgcccaggctggagtgcagtggcatcatctctgctcactgcaagctccgcctcccgggttcaccccacacgccattctcctgcctcagcctcctgagtagctgggagtacagctgccggccaccacgcccggctaattttttctatttttagtagagacggggtttcaccgtgttagccaagatggtctcgatctcctgacctcgtgatccgcccgcctcagcctcccaaagatctgggattacaggcgtgagccactgcacccggccagaagctttttcatttattcgtccagcagcatcttgtactagtcctgactggttagtatagaaacagcactcctcttctaaaaagatacacaggccgcctttctcggcagtgaggagatctaaacctcgatggttttgaagtgtcactgctgcttaaagagtcttttggaattggagagcaagtctatttgggattggag

SEQ ID NO: 37740 - DNA, 2300 bp, Homo sapien
tctagttacccaaatatagaaattcattaagatgtatctttagcctagaggttctctaagtatagtttaaaaacaatgatttgtgagataactccacgaaccttttttattttaaaagtttaaaatatgacatctcgtttttgaataaacaaatgtttctttatatctattttgttgtctcctcaaagccagctcaactcaatatccttcagttacgtatgtattgaaagatattgtgtgtgtttttcaaactacctctgaatgaaggacacaagatgaatggagtggtgtgcagggccactgaaggcttggtgaccagaaaggaagcaactacatttgaattagggcagatcagtggtgatagagagaagagaaataaatatttagaaggtctaagcctataggattggtcaataatgccatttggatgtgcagtagagggacagggaaaaggaaaatgacttggacaattctagcttggttgctggtagtgatgccactcatcaggaccagatgaacagttttgggagggatctttgcgtagcaccagtgagcacaggtgaaattatattctcttactactcaaagtgtttgccaaaccaaaaaaaaaaaagcttacagtcatactttaacaaaaagcatttctgccagccacctaagttggtgactcaactgctcaatcaacatcaagagttactgcttcttcatgcgtattgttacaggtagttacgcaggcatgagtggggcaggagagggccctcccccaaccactaggaatgtcagttgatggttcagcaatgatcacattgcctctctaaaagtgataaattggcagctggcaccagaaagaggccatttcctgaaggttcacacctgttgcactaaagtgaatgcagacatcagggaggccatttcctgatggtccacacctattgcacttaattaaacgcagacgtcagggagaagcaacttcttggggatgtgcaagatgagacaacatggtggagtatgaccttctggggacacgccactggaaaaaggaagaaagactcaggttggcatgtgtacgacttcctagacacactgcatattctcacctcccaagggtaaggagggcactgcacatgaaggcagcccaccctaagggaagaatcatgggaaaggaatctataaaatcctaggatcaaagtaaacaccgcgcttgaccttggtacctgcttgggtctcttccaagcatacgttcctttcttttccttcctgttctaagctctttaaaaataaacttccactcctgctctgaaacttgtcttggtctctttgtctgccttatgcccgtcagtcgaattctttcttctgaggaggtaagaattgaggttgctgcagacccatatggatttgccactggtaatttggataccttctactggtaacaatacgaccctgaattgtccagcatctttagacattttcttgaagtgatttacaacattcagtgtaccttatgttatggtatcctggagggaaggagtcttaagaagtccaaacaccaaattccaaaactttaaaatcagaatcttcaggggtcaagtcacagttaccagtactttaaaaaacttttccaaatgattctaatgtgaagctatggctgaatattaaagtacaaatcgtaacatcttaagagttgtctttcctagtgcctgctcctctcccctcaaccattgcccctatccagcaagaagcagccagatgacaacagtgcccctcttatattacctattaaaaggctggaatgttaggaacaatctgccccaggacccctccccccaccccaatgcaacagactcttaccccaaatactctgcagctgcattcctggatccttatctaggcctacagcaaggtcaccagacttgcttacagccctacgggcagcatgggggaggtcacgagaaacgtggataaacctaagttacgccctcttgtaaattcctatattgaaacctggtcacaagatgatatgtggtaaagttaactcacaaacaaccccagggtctctctgccccatataaacccgtcattctgtaagctcagcgctgcctcctctgactgtggtggagcagctcagcaggataataagcttactcgcctgaccttgggtctctctctcatcctttctcttggctaaccttcattttggtgccaaaacccaggaaggggataggctctggctgggcgtccttagaggattctctctctctctctcctatcatcccttacccagccaacctccccttcccgaa

SEQ ID NO: 37741 - DNA, 2300 bp, Homo sapien
tgctctttaagggatttttggctccgaaactctgtgattttacatgaagaccaaattaataacttgtttagcgtaatttccttttcataatgaataagtggattttttttcttctagatgcaaaaggaaatatggttaccatttctgctaaatactggtaattttaatatgagccatacagaaagtgttagctaaatattttgtgactgcttttaaaaattactatttctaaaactcattttcaacagcctaacagatatcttttatttcacatcatcaaccaaaactgttctccctcctggacagcattatgaactaaagaagtatttttaaatgggaaaatattcatcctgagtcatagcttcctctagtggagctatgctgtattacatggatataaagtataaagttcctttgaaaataattcgggtttcttaacaaggctggcaagcaaaatcacctggggcattttcaaaactacagaattcagactccaccctggtcctgcaaaactccactaatctagggagggctctggaatctgtataataggtaactaaactgtagcatacaagctggccattgaaaaccagtaaatcctaacctgcacatgaatatcactttcaattttgtaagaccacttaaaaatttgttttaatagtctgtagtcatttctaaatgtgacagaagaaatttactttgataatttatacaaagtttacttaaattgcaggacctatgttgaaaaaatctttgtgcataaactatatcaatatcctccttaacaaagcgactggtatatggtagacagtaaatgttgactgagtgattgtttaaacttcatcttgtgtgtatgtaatgattttaagattattacctacttgaaaagattactctaaaatgtacaagaaataatcatggaaagttaattacatgatgcttagtacataagagcatctgaatagacctcagccattattattatcactattcttttctgatgttttaggcacagtgtcaaaacttaactttttatttgtagttcctttaccccaaaggactttcaaaaaaattagagtataattagtcttgtggattcttttcattttctttgaaacagttttattgagatataatttatacaccataaaattcttgcatttaaagtgtacaattcaatgctttttatttgatgacatttaccgagttgtacaaccattaccataatctaattatagaacatccttatcatccccaaatgaaaacatggaggtcatggtttttatattaggtttcagatgcaagtggctccatgagagtgactgtggtggcagaagaaaaccccttctcaatggcaatgctgctgtctgaagaatgctttattttggaccacggggctgccaaacaaattttcgtatggaaaggtaaaaaattccattgacgatgctgtatttcagatttatagatatttcctctataagggtaaataaaatatattttttgattttaaaaaaaagcccaccttttaattaagacatgatctataaatgtctcacataaaatgcagccattttcctcctaccaacatcatataccagggattatggagttaaaaaaaaagcatttgggcaatataaaaagaattgttttacaaataacgttttttcctgtattgttaaatacacttaatataccaggaaatttttgctattcttttttttttttttttttttccgtcgcccaggctggagtgcagcccgccaccacgcccagctaatttttttgtattttttgtggagatgggctttcaccgtgttagccaggatggtctcgatctcttgacctcatgatccacctgccttggcttcccaaagtgctaggattacaggcgtgagccaccgcacccggccaattttgctattctttcactgctgtatttaacttcaattataatcatgtttattatggtacacaagtatttcttaatcatagaatgtcttccttctctgaagttctttctctttaatttaccttgtattttaggtaaagatgctaatccccaagagaggaaggctgcaatgaagacagctgaagaatttctacagcaaatgaattattccaagaatacccaagtatgtgtgaaactgaactggctagaaaaaaatagaaaacattggagctcatgacatctccacgaaactcatgaaaaagtttgggtcaaagtaacgtctgtatgtgaagtgattctccacctgcctgtctgctgcaatctggtgtccctcttctttatctgcgtgggg

SEQ ID NO: 37742 - DNA, 2300 bp, Homo sapien
ttgtttttgttgtttttgagacggagtttcgctcttgttgcccaggctggagtgcaatgccgctatctcggctcggcaacctccgcctcccgggctcgagcgattctcctgcttcagtctcctgagtagctgtgattacaggcgcccgccaccacgcctggctaattttttgtgtttttcgtagagatggggtttccccacgttggccaggttggtctcgactttttaaagaatccggtatgacaagtatgcatgttcctgtgctagtcataaaagaaataaatatcactggcaatagcggtcttgagaaaaactaggatatttcttgaggaaactccaatccatatttaaaaagaaaaaaagcacacttttaaaaaagtgtaccatataggttcttccaagttacagtcttacagccttcaccaaaaagatgtttgtcgattaaagctttcctacaacttcaagtcattacttcttttgcaggttgtcataagcaccctgaaattaccgctgaaaacattttataaatttagtcatccatagagactccaatattccacaagggcagggacagtgtattttgctcaccattttatccccaagcacacagaattgtgtctactgcctattaggtgttcaataaatatttgtgaacttattgatcaaagacaaaatttagtcagaatcatccaatgaaaagcattttgcatttgatgactagtagacttagatgaacagttccaggaccaccactaattttccttgggtcattagaaacatccctttggggctgcggagagaaaatccaatctggccgctgccccacagcccctttctgttctgcgcgtttgcctcgccgttctgatggaggaggaggtggaggtggaggagcagcagcgattttcttagccattttcttaccaacagaggccaaaggaggcagcagtggactacactgtgggttgtctttgcgaggaagtggcattgggcagagatgcagttcagcaaacttatcattgcagcaatttcggagctgacttttcgacagtgcaagatctagaaatgtgtgcaagacatgcgaaaaccaccaccattaacactgaagatgtgaagctcttagccagaaggagtaattcaccgctaaaatacattcagacaaaagtgaagagcttgcgcagattaacctagaacgaaaggcacagaagacaaagaagaggatggaaacaaaaatgcaagggagccagcagaggctggagtacaggaaagttaagaattaaactctcccgctgcttggaaaatgcagctttctgcaggtagagccacctagtatgtatatggccacaaagggaattttgaagggataaatagagattaaaaaaaaaaaaaaggctagatggctttttgtgttgtattttccaagtcgttaactgcaaacgctagttttaaagagaactggacactcaatcaaaatactcctgtctcactccagcacatacaaatggtgtagttgaatggtatattggaaattatatctattgcaattaaaattgtgtgagcaatttgaaagaaaagaaaaaaagaaacatccctttcatctttcagagtgtatttccttatgtgtcaaactggaatatttctatctgtggccagttccccgggatgctgctagaaacacgtgagacagcgcgttcatttgctctacaaaaagcgaatgaaggcgcagttaccaggccagtcaacccaggctgtttaaggtcaactactgggggacttccacgtcacctcgatatatacgtaacgcgtgtgtgccgtaacccgtgaactatggaatccctaaccgcgaatcacgtggctgctgccccgcggacgccctagacgacgtgagggaaggcggtgccgggcggggcctgtgccaggctggcgggccgccgcagacagagctacccggagcaaccgttcaggggtgaggccggaagtcccatccgacctcgcgggcagccagcgctaggccgattcgaactcgaccttgttttggcgttgctaggagacgcggctcctgcgcgccccctacaggccggcgcccgggcggcgcgcgggcagggggcggggactgtcgcgtggagctgccgggcgagcaccgttagggcagcctggcgcgcggcgcccgccaggcgcccagtcctctgccatcgcccacgcctccctggtgccagggaacaggtatcagcgcgcctccccagcggctgggagagacgctgaatgaagaagagggaaggacggttagtcaggtgagccgcggc

SEQ ID NO: 37743 - DNA, 2300 bp, Homo sapien
ttaacataagctttcactgtcaaataagtgagaaaatgaatattagagttgatactatggacttctatttttctattcagagaagatccattagacttatgtatgcatgtctgtgtgtgtgtgtgtgcgcgcgcgtgtgcgtgtgtgtgatctgaggtttacattcttttaaaggattttatctttccctttgtagagtcagcgtgggagaaattgtaacgagaaaccaacaaatgtcaggaaaagaaaattcattaacagagatctggctcatgattcagaaggtgaggtttgattttgggctgaatccccatttttttacctacactctccaccctgctaaaagaaaaggagcacttcagtcttatcttaaaaataataaactttgaaattactgaatctaactaagactttaacttggaacgatttacataatgcggcagtttgcatgggagactattttatggtcctatcacaaagtaatgaaagaaggaaataaaaacttctcaatgacaaccttcttttaatcattgttttgtgtttaaatacctttgtccatggggcatataactcaccccattcactaagataacaatttaaaaatatccaatacagtgggacaaattcagcagctatgtacactgcttacttttttctttctcctttattacaagttaaacagtattagtgattgtttggtttcccacctcctttacactaaaaccatctactattaacagaattttcaagggtgattttgatgactaaattgtgaggtcataataccttgtttatcgaccataatgtgttcactgaatcatacttaaggcctccttaataattataatactatttgggaaattagtttgcagattctttttatgaactgttgctaggatgtcagtatgttacaaattattttagccatatgaggacattcataataaacttaatatacttagatttaattatcaaagtttagttggcaattttaattagatatactgaattctgaaacttcctcaaatcttcataccatttaaatacctccctctctccctccctaacatgaccatatagtttagaacttgatgagaacctggtgccaaagaattatctttctgacttttataaacctattaatgtagaaattttcctctaaaaacttgtatttgaagtggtttcttttagtttcgaggtattgaagttgaaaacataatactttgacagttgtaccatgtaccattatatattttatgtaagattcagaagatataaataaaatgcttttcagtctttctaatcttccccctactactattttagcaagagttaaatatatttaaggaagatttcagtgaacagacacatattcacctcagcctttttgtgaattctggtatccctgagcttatttattaagctgtttgttaaaaagaagaaaagatgattgactttattctttagttgactaaaataatttcttaaagagttgcttaataggcatgaaaagtaggcagtattattgagatatttaagttatgcctcttttttttatttttatgttgactgcgtctcttgaaattaaatttatatttaataccaatttcatgacaaatatttccatttaatgaagattaaagatttgcaaatcttatgtttatgtctttgacttgttttttagaactctttcaagatctaagtcaattacaggaaacatggcttgcagaaggtaaggcaaaatttgctttaaaaggggggaaagcaactctagaaggagaaagaaaagaagtcctgaacttgctgtcttaatattcagcccaattaattgagctctaaaagagccacctcatgtgtcatgcatacattagagcctctgatgagtttgtctttggggactctggggctgtactacccagtgtcatcacaaattaccaggagaaattgcttccagctcacaatcacatctgcttttggcaagaactaatgcaccaagacttcaagttctaagcctctgttcagattttaattgcaattgatcaggtttatattattgtacctccagagacctcctagagccagaacccggctggcttgctgtttcctttagagcagcgcatatcattatttggtgttctggtggaggacttttctgatggcagaaattagtttctctgggttcatcaggacgggatgcttcaagatttaagtgcaagtgtcttctttccaccttgttcacaacacagaacgttaggtgtgtatctaatgcttaggaaatctatgggtttaaaataaatggg

SEQ ID NO: 37744 - DNA, 2300 bp, Homo sapien
tggttgcaccctcagatagtacccatgagcttcactgttcagcctcggggcccaggcgcttcctggaatctctccttggccggggttaaaatgcagttcccgctcaaaatgcttataggtgcgcgcgttgtgaactccgatttagtagtttccgggaatgcgcggggtctgtctttgctgtccatagttattggttgttttcccagtaataagtgttgattgtttgtttgtttgcttcttttttaagtagatctttctcctgcccaggtccggggttgagtgctgtgcgctcttacactccattttaatgtgtctccataacgttctatttaaggaaggaaactttcaaatagaaattgagaactgcagcacgtttcctaacgggcggaacagctgccggaaacgtcttttggtcactagttctggtcacaaatgaatttcaacagcattgagtccctggtcctatccccgcggcctcccgtccgctgttggacactggctccttaaagtgacgctttactgttctgagtcccataggaggatcagggcaagtggcttcagagatgcagccctcactgcttaacgtcctagttattgtccttgaaacccgagccatctcaccgctcgcccccaaccctgggctctggctgtttaaaagctggagaggaagtgaaagcgtcaagtacagtaagtgacaccctccgcctccgtgtatacataacaaaagctcaggaaacgtgcgggttctaggatatacgagcaaccccaagcactccctcctcctccccacagccacagtggactggaagtaccttttcccagtgcacacgtagggaccattttgacttatactttttcacctagcttgctctgttgtcctcccatcacaacctctgctaatcagcaattctgcatctcctaggtgccttccttatagattctttatgtttctgtcccacgaacgataggatctaattttagttgaggatgactgtttaaaaaatgtttcgataaaccataatggtgatggtgggttttgaaaaacgggaaaataaattgggccaaaagctgagtgggaatgaggatagagagcgaggtgagctcctagtcagggcaagagtagagaggttggagatcctgaggggagggcagctgaataaggcggtacgggctttgtggatcgcggctctaagggtataccagaaccgcacaacagtactttaaggaaaccagcccaatagtggacctaacaccccaataatgggaactggcgactcgaaacacacggtttcagtatccccaggcgccttaacaataagcagcgggttacagaggaaatcgagtctctccgtggcgcttccaggctgaggacccagcgcctaccggccgagcaccccctagggcagaggggcgagggagacccgcgggaaggggcagcaagccgcctgattgacagcccgaaatctgatcttgtgaaagagacgcggagccaatgggaggcagcgatccatcagtttggattggaggcccctggaggagaagtagaggaaaaaccaccgaattgagctctgtcagaggcgctttcggcttccaagggggaagtgctgggctataattaatgtttttattaaatttggagggaagtttttgcagcctttcgcctagcgtggccttcaggtgggtctttccaacaactttttatgtctctccagataattgcatggttgtgggtcgcaaaaactatcctgatgaaagaggtgtctccgtctctttagtcccgttaggtgcaaagcaagtctcgttgatcgccattgctagttttgcacacgtttgcgaatcagagctgcccggggtacaccgaccgcgcagggaaacatcgagagtgtaaataaatacatcgcctcttgttcggatttttgctactaccgaaaatatgtaaattgtgaactctgttggctctctttggatccaggtgaaggaggcggtgtagggagggttatttttgtgaatgggactgtcggagggtaattagctatgcaaattcaagagcttcattcatgatttttttttaagcctaaaagccatcttgttcccctctaggttgatagaagtccagatcctgaggaaatctccagctaaatgctcaaaatataaaatactgagctgagatttgcgaagagcagcagcatggatggattttatgaccagcaagtgccttacatggtcaccaatgtgagtgatcagtttgaaagttgctgtttataaacttgactccgtcgggggtggggagagggagaaaa

SEQ ID NO: 37745 - DNA, 2300 bp, Homo sapien
tcctttaatttcggtcttaatttttttctctcttgttattactcccagaccccaacctctttttcctcatctagtatctgtttcagggacaggacaaagaggaggcagcgagctgaaaaaagttttgtggtttgggatacttgggcctttgttgtgtcatttcctctacccctccacgcccccaaccacgtgaccaagaagggccggaattttgtgaatggagacgaaaggtggctgttggggcgggcgggactccgcccccttccctaaagcggccaatctcctagcggagcgctgaggggtcagcaataaacaacaatgggctggggatttacggctcgttattggctgcgggaagaacctcgccgggacctaacccgaagctccgccccctcgcggttaccctggatacccgtcaggctcgggctgcagagaaggtctttggaaactgttgctcagattacaggcgctgggttattccaggagtgcagggtggtggaggacccttgttattgaccccctgcttggttgcaccctcagatagtacccatgagcttcactgttcagcctcggggcccaggcgcttcctggaatctctccttggccggggttaaaatgcagttcccgctcaaaatgcttataggtgcgcgcgttgtgaactccgatttagtagtttccgggaatgcgcggggtctgtctttgctgtccatagttattggttgttttcccagtaataagtgttgattgtttgtttgtttgcttcttttttaagtagatctttctcctgcccaggtccggggttgagtgctgtgcgctcttacactccattttaatgtgtctccataacgttctatttaaggaaggaaactttcaaatagaaattgagaactgcagcacgtttcctaacgggcggaacagctgccggaaacgtcttttggtcactagttctggtcacaaatgaatttcaacagcattgagtccctggtcctatccccgcggcctcccgtccgctgttggacactggctccttaaagtgacgctttactgttctgagtcccataggaggatcagggcaagtggcttcagagatgcagccctcactgcttaacgtcctagttattgtccttgaaacccgagccatctcaccgctcgcccccaaccctgggctctggctgtttaaaagctggagaggaagtgaaagcgtcaagtacagtaagtgacaccctccgcctccgtgtatacataacaaaagctcaggaaacgtgcgggttctaggatatacgagcaaccccaagcactccctcctcctccccacagccacagtggactggaagtaccttttcccagtgcacacgtagggaccattttgacttatactttttcacctagcttgctctgttgtcctcccatcacaacctctgctaatcagcaattctgcatctcctaggtgccttccttatagattctttatgtttctgtcccacgaacgataggatctaattttagttgaggatgactgtttaaaaaatgtttcgataaaccataatggtgatggtgggttttgaaaaacgggaaaataaattgggccaaaagctgagtgggaatgaggatagagagcgaggtgagctcctagtcagggcaagagtagagaggttggagatcctgaggggagggcagctgaataaggcggtacgggctttgtggatcgcggctctaagggtataccagaaccgcacaacagtactttaaggaaaccagcccaatagtggacctaacaccccaataatgggaactggcgactcgaaacacacggtttcagtatccccaggcgccttaacaataagcagcgggttacagaggaaatcgagtctctccgtggcgcttccaggctgaggacccagcgcctaccggccgagcaccccctagggcagaggggcgagggagacccgcgggaaggggcagcaagccgcctgattgacagcccgaaatctgatcttgtgaaagagacgcggagccaatgggaggcagcgatccatcagtttggattggaggcccctggaggagaagtagaggaaaaaccaccgaattgagctctgtcagaggcgctttcggcttccaagggggaagtgctgggctataattaatgtttttattaaatttggagggaagtttttgcagcctttcgcctagcgtggccttcaggtgggtctttccaacaactttttatgtctctccagataattgcatggttgtgggtcgcaaaaactatcctgatgaaagaggtgtctccgtctctttag

SEQ ID NO: 37746 - DNA, 2300 bp, Homo sapien
cctctgctctgccattctatgcctgaaatcctgccaaaatgaaattttccgttcaaaagggctggcatttactaaactgatgttttaaagacattctcaaaaagtagtggaaactttgtccagctttttatgttcctgtcttgtagacagaacagctgcctttgcagatattttccaagatcttacattttctgaaaaacaaattttcagcccttccactgtcttcagcaagtgggtctattggtttttcccagtgccaagcagagaagataaacaactgccaaactagaagctagtgtctgagtatcaaggcatagaaaggacagaagagatagtgtttcagtaagtatcaatgcagagaaaggacagaagagaaagtgggagaaagaaaagagggtggttcaatcgttcacagtcaagagggacacatttatctcaaaattttaggctgtttcaacaaaaccgagctgtagcgagactagctgcttattcacacgagaacatcattttcagttactatgaagatcaaagagttaaaagatatgagttcgtttaaagaactcaaaagggaaaatatgaagccaccgcaatacgtagtaaaatctgaggcttaacagcgcagcgcctgagagtgccagtccactaaagggagggagaaggggcgcagagcttatgggggcctgggaaggagtgataagtctttggaaatggaaactaaagctatcagccagcgaaaaccatcaatattcctaaaaatatataatactaataatacataaaagctttaaaaaactaacaagacactgtgggatacaaaaaaaggtagaaatgaaaattacagaatgttaagtgaaaaaactgaaatccatctacagtcgaacagtttgcacctttaaaagcaatgacttgaagcagcaagcaaaagttcccagtccttaagactttctccccactctcaattctttctttcctctagtgcaaaagctgtctaagcagtgcacgccggaattatccccacgtgagccttcctttaatttcggtcttaatttttttctctcttgttattactcccagaccccaacctctttttcctcatctagtatctgtttcagggacaggacaaagaggaggcagcgagctgaaaaaagttttgtggtttgggatacttgggcctttgttgtgtcatttcctctacccctccacgcccccaaccacgtgaccaagaagggccggaattttgtgaatggagacgaaaggtggctgttggggcgggcgggactccgcccccttccctaaagcggccaatctcctagcggagcgctgaggggtcagcaataaacaacaatgggctggggatttacggctcgttattggctgcgggaagaacctcgccgggacctaacccgaagctccgccccctcgcggttaccctggatacccgtcaggctcgggctgcagagaaggtctttggaaactgttgctcagattacaggcgctgggttattccaggagtgcagggtggtggaggacccttgttattgaccccctgcttggttgcaccctcagatagtacccatgagcttcactgttcagcctcggggcccaggcgcttcctggaatctctccttggccggggttaaaatgcagttcccgctcaaaatgcttataggtgcgcgcgttgtgaactccgatttagtagtttccgggaatgcgcggggtctgtctttgctgtccatagttattggttgttttcccagtaataagtgttgattgtttgtttgtttgcttcttttttaagtagatctttctcctgcccaggtccggggttgagtgctgtgcgctcttacactccattttaatgtgtctccataacgttctatttaaggaaggaaactttcaaatagaaattgagaactgcagcacgtttcctaacgggcggaacagctgccggaaacgtcttttggtcactagttctggtcacaaatgaatttcaacagcattgagtccctggtcctatccccgcggcctcccgtccgctgttggacactggctccttaaagtgacgctttactgttctgagtcccataggaggatcagggcaagtggcttcagagatgcagccctcactgcttaacgtcctagttattgtccttgaaacccgagccatctcaccgctcgcccccaaccctgggctctggctgtttaaaagctggagaggaagtgaaagcgtcaagtacagtaagtgacaccctccgcctccgtgtatacataacaaaagctcaggaaacgtgcgggttcta

SEQ ID NO: 37747 - DNA, 2300 bp, Homo sapien
cctcctgtgaggactctatgttctcctttggaattattttcacttgttcattttcttggccaattttgctgtttaattttatatctttttcttatctatttgatgtaactgtgcaaactagatctttaacaatttgccttacatactgttttaatacaacaaattttaaaagttactgttttacttaatactctactcaattttgagcaaacttcatttgattttaattatagcaaccatttaaaacaagcagcgccattttagcttgttgcctttctgtaactgcttttagaaattcactttctttaacaacgtgcaatttcttcataatgccatagtaagttaactgtagagaagtcactaatgaatattattttactttattaaataacagcaagggaaatataaaaatttaaatagttttacatgcaacctaaaaactttccaaactcaaaaatggacttttttttggaggggggtagctttctctcaagaactcttatttcaaaatccaaatgggatttcaaaatacaagcaaataaatgtcaaagcctcttggcctctgctctgccattctatgcctgaaatcctgccaaaatgaaattttccgttcaaaagggctggcatttactaaactgatgttttaaagacattctcaaaaagtagtggaaactttgtccagctttttatgttcctgtcttgtagacagaacagctgcctttgcagatattttccaagatcttacattttctgaaaaacaaattttcagcccttccactgtcttcagcaagtgggtctattggtttttcccagtgccaagcagagaagataaacaactgccaaactagaagctagtgtctgagtatcaaggcatagaaaggacagaagagatagtgtttcagtaagtatcaatgcagagaaaggacagaagagaaagtgggagaaagaaaagagggtggttcaatcgttcacagtcaagagggacacatttatctcaaaattttaggctgtttcaacaaaaccgagctgtagcgagactagctgcttattcacacgagaacatcattttcagttactatgaagatcaaagagttaaaagatatgagttcgtttaaagaactcaaaagggaaaatatgaagccaccgcaatacgtagtaaaatctgaggcttaacagcgcagcgcctgagagtgccagtccactaaagggagggagaaggggcgcagagcttatgggggcctgggaaggagtgataagtctttggaaatggaaactaaagctatcagccagcgaaaaccatcaatattcctaaaaatatataatactaataatacataaaagctttaaaaaactaacaagacactgtgggatacaaaaaaaggtagaaatgaaaattacagaatgttaagtgaaaaaactgaaatccatctacagtcgaacagtttgcacctttaaaagcaatgacttgaagcagcaagcaaaagttcccagtccttaagactttctccccactctcaattctttctttcctctagtgcaaaagctgtctaagcagtgcacgccggaattatccccacgtgagccttcctttaatttcggtcttaatttttttctctcttgttattactcccagaccccaacctctttttcctcatctagtatctgtttcagggacaggacaaagaggaggcagcgagctgaaaaaagttttgtggtttgggatacttgggcctttgttgtgtcatttcctctacccctccacgcccccaaccacgtgaccaagaagggccggaattttgtgaatggagacgaaaggtggctgttggggcgggcgggactccgcccccttccctaaagcggccaatctcctagcggagcgctgaggggtcagcaataaacaacaatgggctggggatttacggctcgttattggctgcgggaagaacctcgccgggacctaacccgaagctccgccccctcgcggttaccctggatacccgtcaggctcgggctgcagagaaggtctttggaaactgttgctcagattacaggcgctgggttattccaggagtgcagggtggtggaggacccttgttattgaccccctgcttggttgcaccctcagatagtacccatgagcttcactgttcagcctcggggcccaggcgcttcctggaatctctccttggccggggttaaaatgcagttcccgctcaaaatgcttataggtgcgcgcgttgtgaactccgatttagtagtttccgggaatgcgcggggtctgtctttgctgtccatagtta

SEQ ID NO: 37748 - DNA, 2300 bp, Homo sapien
agagcgagactccgtctcaaaaaaaaaaaaaaaaaaaaaaaaaaaaaagttattaaaatttaattaacaaataataattgtatgtatttatagggtgcagtgtgatgtcttggtatatgtatacatttaatccttttttttttttttaagacagaatcttgctctgttgcccaggctggagtacagcagcataatcacagctcactgcagcctcagcctcctgggctccagtgattctcccacctcagctcccccactattccccctgagtagctgagaccacagatgtgcaccactacatccaactaatgttttttttgtagagatggggtctcgttatgttgtccaggctggtctcaaacacctgggctcattccatcctcctgcctcagcctcccagtgtgctgggattataggcattagccacctgcctggccttaatcctttattaaaagaatatcacaagcttctggaagtgacaagatagctggagagtcaggtttagacaggaatgagtatccaattatttctgttatgatttaggtacagctgttttcaccctgtcattgaatcactccactcaacatttaaagccctgggagacaggtgtgtaatgtgccaatgtgacagaatcatctgtctccctttggttagaggaggacagaacacatcatttcacagtcccaccaaaactgcctgtaaccagagagagacagacagttaggatgaaattagtgtgaaagatgaaatcagcagaaggaaactgggtggaagatgtccacaattgtcattgcatattcccattctctttcacttgtgttgcttccccaaacccatggttgcccttgggagagaaaagagaaaagatatccagcagtttggtctctgtgagcacatcaatatcatcatttccccattgtatattaaactaccatattgtaaaacagagtacagggacgtgaccccacgagaccaaaaagaacagtttttaaagacaaggatgacaggatttgacagtgaggtcctggggttgatattggaagacagtaaagagatgttgaagaaaggcaaggcactaagaccaaatgagtcttgtctgtagaagtaaggtgactttaagtaatgacatctgtataaataaaccttgcaatgattacaattttacaaaaaagtaactcttactaaatacttcattttctgtaaagaatacagtgccaatctggctgattattgagcaattgattatagtctctgataaaaatgttgaaaccagatggtttttcattttgtttgcctttacagatatagccagtgaatgtaggtccatgacaacctagagatttattttaaagcgtgattcacaatagaatcatctactgtcattacacaagtctttcagacatttggaattgctttaatttggccaatcttttgaatttttttaaatcataaaactaaaacttaatctttatttgattgctagaacaaattatatgacttctccaaaattaattcatatgattggaaatatatatgctagtgctgatgaacattccaagcaattattggcagtctatactgtaaactagcaaatcatatgtatagggagctagagagcttattttagcctccttggataatttaggtctagattttatatgtaatgtttacatattaaaaaattggtacagactgataaaaatgataccactgtctactcgtggaatgtggagtttgtaaaactagacataaaaatgtacatttatgaaaatgtgctttataagattcttctcacaatttgtactcttaatttatatgatttaaaaagtatttaacattcaacaccttgacatttttttcctttgtgcaatcatgttaatcttttgatcttgatctgttttttttttttgcagttctttaacacattattgaaattacaagcatccaaagcagtttcatgtggacagattgcatattttgaaagcctgaggtattttatcatgaaacatgccatgtggaatctttgaagcatagacctctgcgcaacacctgaataaagaatcttttacctggtatgtgacagagcttctcaccaccaccatgacaaaccaggaaaaatgggcccacctcagcccttcggaattttcccaacttcagaaatatgctgagtgtaagtattcatattgatattatgagattatttgacatttgtgctagacaaagtatcatttatttataagaatggatcatagatcctgttcttcatggggatagatccagctctgccttttgtgtttaca

SEQ ID NO: 37749 - DNA, 2300 bp, Homo sapien
ataataactatcccttttaggaaaaaacagatatggcaaaaaaaaaaaaaaaaaaaaaccccaccaagaggatatgttatccctatgaagtgaagtgcaaggtgtgcatatattgagaagaaaggatgctgccacttttgactttatatacagctatattgtttgtatttttttctcttgtatcacattgttaatttccaaaattgttttgaaagcaggtaataaaacagtatgcctactatgatcatttttattaaatttttttttgtttttgtgacagagtcttgctctgtcccccagcctggagtgcaatggcaaaatctccactctctgcaacctccacctcttgggttcaagcaattctcctgcctcagcctcccgaatagctgggactacaggtgcccatcaccacacccagctaatttttgtatttttagtagacacggggttttgccatgttggccaggctgatctcaaacacctgacctcaggtgatcagcccgtctcggcctcccaaagtactggctgggattacaggtgtgagccaccacgcccagacacctttattaaaaattaatgtccatatgtacttattggtaatgggaatggtctgaaaggacagtcaattctgctataacatgtgctttgagattaaatttgttccaatgtgattaatataccagaaaataatttgagcatactgcctatgctcatgtgtgattttattttcagtgaaaaagagtagttgaactttaaaaaactgaactgaaaaacagaaaggcttaggatgcacaaaatacacccaccacttatagtaacaccctcacttcacctgtgtgttgtgagccttgacacccatatgtcatattgcaactttctgtctgatttcagataacccacatttcaacaagctaaagtaacttgcagtttgcaaatcttccaatgcctaatttccaaaacaagtttcaggtctttttcaaggtaaagcatcatatttattttagtatttatgtatatcttaaccatgtaacgtgtgaaagtgtgctaccatttttattaggctctcatcctttttttcttgttccttgtgggtcattatgaagtttttgagtattttaccctaatcacattttttctcacaagtcccgtggtttttattgcacaattttgtacagtatagtgatttttaggaatggatatatcacattatagcaaaactgaccatacatgtaccaaaatgttaatagcgttttgggcagcttattattgcttatctatagtttctatatttttctaaaacaatcgtgcattgatactttaattagatctatgtaaacatctttaaatgatgaaatggcagctaaaggatgattacagctgttttgggtaaagagctgaggctattctggcaagctccacatattcactggtaatgtaataaattaagtgccttctaatctacttaaaaggtacaatcacttaagctctttctgtaaaacagaaacaggtctcacagcaacatcttggcaccttctttaatcagaaagttcccataagtactaagaagaatagagaagatgtgactagccaattttccattaaataatgtagattatgtaataagccaaatgcccctaaactggttgcaaacattcagaagtggtaataacatgattcagatacagaaatatagataggcaataaggagccagatattcagtgcttactgactttcaagctattattaagtagctcgcctatacacagtctctgtaggaaataaagaaactacaagcttgaacacattgtaaatttctaaatgaggagaaaaaaaggtttttctatgtgacttgatgcttgaatttctatccagtttttcagagtgaacatatacctgcgttatcacttttttctttccgagacactattatgatgttttttctcttcttttttaagtagtaacttgctccacctacagtcaaactgcactgtatgactttgatttgggtatgagtcctcttttccctcccccacatgccctgtttctggcccagcgcccactgaactctgtacttgttcttgatccttgtattttcctgtctctctacacagaatcggctgttgagtgtgctctcagtggagctttggttttagctgttctctgacaaagagcttgttctgagctgcacatctcgtcctctttgttcagcctcaggcttcaagcattgaatcctaaatattctccagctgggaatcagacaagggcagaaatgaagaacccagaagcccagcaggatgtt

SEQ ID NO: 37750 - DNA, 2300 bp, Homo sapien
accttaataaacaaagaaattaaatgttcaaacagcagattatagaagatactcaatgggatgctattattcccacctctgcatatatggttttaggggtgccactttctgagcctcaattttctcaaatttaagattgagagggtggttttgatggattctagaaccccttccaattctaacattctgagaatgtgttcaaatgtagactgcaggaaggtattaacagctctcaagataaagatggaaataaaggaagaaatgccaagaccaatggagggaaactcagaaagggctaaaagtcacataacttgtttcataattgtcatctaaagtcagtcctcgaaacatgggagagccaatacaatgtcatgcctataaatgtaattctcaatgacttccataggcctaatcctcccttaccttatcaaaatggcattgatttcatgccaaaaataataaagcttatatatatttaaccagctatgaaaatctcctgcctttcactgtgactttatctaatgatgtcctaggaattgtatttttgaaatacaaagtttagtaaccttggatcaattactgcttcacaaaccttggtgcatgagacaaagaaatattcaaatggggccggctgaggtggctcatgcctgtaatcccagcactttgggaggccaaggcgggcagatcataaggtcaggagttcatgaccagcctgggcaacacggtgaaaccctgtctctactaaaatacaaaaaattagccgggcgttgtggtatgtgcctatagtcccagctatttgtgaggctgaggcaggagaattgcttgaacctgggaggcggaggttgcagtgagccgagatcgtgccactgcactccagcgtgggcaacagagcaagactctgtctcaaaaaaaaaaaaaaaaaaaaaaaaaaaaatatatatatatatatatatatatatattcaaatggtaaaaattgaggatatgaacaagaatatcctaggaatagattttgcacaggattccaggaacccaaaagccacactgaattaaatatccttattacttgacaaggtcccttatgtttttcttcaaaatgattagattctggccaccatctactagatattcatgtactcatcagcttttagaagtaggaaataaggctgggtgcagtggctcacacctgtaatcccagcactttgggaagccgaggaggacagatcacaaagtcaagagatctagaccatcctggccaacagggtgaaaccccgtctctactaaaaatacaaaaaattagctgggtgtggtggcacacgcctgttgtcccagctacttgggaagctgaggcaagaggattggttgaatccaggaggcagaggttgcagtgagccaagattgcaccactgcactccagcctggcaacagagtgagactctgtctcaaaaaaaaaaaaaaaaaaaaaaagtaggaaataagaggtgagaggagttgaggcagctgccacccttttcctggaaactccctggatttctctgaatatttgcatcatgtttgctgcattattataccctctgtcacagattgtcaccatttgtttccatctttggcttccctattgtactgcggacgcttccagaaacctcaaggtgttctgttcgtcttagtgtacccaaagcgtagggccaagtccctggaacttagggaattatgtacaagtttattaattatgatgctgctgaaacacctattgcattggtgtgtgtgttgggggacctaggggaggtaggctacaatttgaaatgaataaccatttatgaaaatcatccttttctgagctcctccctttaaataattcatcttgggctaaaatactaatgtgcttcctaaggttaataagtgattttaaatgaagtatattttcattaagagatgtaaaaggagaaagtttttacaaggtattagaagtgtagagaaaatgtgaggaagtatttatatctgacctgagaatagctcagctacttaatgaggaaaatcccttaatcacattgtgtgtgtgcctcttgtgttaagcagtccctccctagttcagcacctctttaggacacagttaaacaacagatccactttattccatccccttggaataacatatttaaatttcttattggtttaattcgtttttctcacatcccgagttttcaaggtaaagccaagtaatgtggaaactacctatttctactgtgtactaacatgcatttaactacagttgacctttgaacaacagggggtggaaactgt

SEQ ID NO: 37751 - DNA, 2300 bp, Homo sapien
tacatgagttggggaagtttagtgttgctctttgtactttaacttttaatatcagagcacatattgaaaccataaacacaatgaaaatacaaaaaaatattccgacgatattggaggactataactcccccacctctttttattcttaaagagccaagggcgtggggagtggcaggaagagatattctcaagatctaagtcctggacgccatcctgcgagtgcttaaagcccctagaaacgtgcaacctgaacaacaccccttttcgaagtctaaaacaatattagattcccaaaatatcggcaaagaaagtcttaccgtcagacttgcagcaggtttcagctcagacccagactgaaaagctgagcagctggtgaacaaaagatttagtttttttttttttttaaacgaagtctgcaaaactaatttccctcaaaatagagctcaatttccgttaaagaaagcagcgcttacaaatctcagaattcctgatcaacccccactccaccccacctctgagcaatagaaaacaattcgatctttcacacggatgttattgcgaagccactattctgcagtgtgacttaaaagaaaagaagatagtgaggcttaagcaaggggactggaagaggaggggaaaggttctgctttggggacacctctcaaagattaatcaatgctttttcctaattcaaaccagatgtctagcccagtttgctgtacccattaatcccactaacaacttcaaagacctggtcatcatcctctggacacctgagacaatgaaaaaacggggcgacactgctggtggcgcatttggggccccgggcagaataggtgactacagatattctcctgatgcgacaggtcgcagatgggacatgactgttcctcctgctcattacagcgccactcacttgtgtgtaaacgactctgcccccagcggaccctgtcgcccgccaagcaagtagcagcttcaaagccctgccctcgctctcgcatgcttactagaggcgagttttctattttattttcaggggtgcaaaattgtaaccaagtgcccacggtgagtgaattttgggagctatcgaaatgtaagaattctcagtaaatggaaccctggtggtaaggaatgcattagcggatttatttttgagcagaagagagtggatttctggaggaaaccgaggagatctgggctagctcctgaggggaaaggctagaaatgcgcgtgcaatctacacatctcatatgaccgggacacaatcgcttggaaatattcttgacccaggaaaagttcttcttggtggacaagtggctaggaaattgagcgggaccgggaaagagggggaagggagcctccacctggcatcgcacgtgaggatgccagggagcaggcatctgcaaccctttcagactcacgccttcctcccacccacccaaccaggtccgtcttctttctgcactgagaaccgccttttccaggccatggtgctcatccccgcaacctcagatctggcgtcccagcctattaacaacccaccgacagaaaccagctgcgaaaacctaggcgcgctgcggcgcccggggcacgggaagatgcaaagtttgaaaaacttcgagggtgcgccaaactagctctggtcttttcctttaaccctattacttctttcgtgttcctgaaaggataggcgtatccctagcttttctgcaggtgacagttcccaaatgacactgacaagtcacgtttccccgagaggaaagtgagtaggtaggaatcagggtgctaggttgggggtggtgtgcgccgcgcccaggcctccagagtctggagggcagagctgctgccctcccgggcgggacttagacgttggcgtgccgcttgtagtcctggcagccggcagtgctgggcgggcgtggacgctctacgtccgtccagcaggagataggaagtggaactgggagcgcgtggcgcaggctgagcgggagttttggagggagtttgcatgtggtcaactctgggctcctaagccagcccccagctcacgttacactctatttataacttctcagagccatttccccctgaaagcagttctctgggaccaccttcttttggcttcaacctctcccactcttgacatctgagtagctcagggaagctcttccaggtccgactgttcatatgtaaaggagactggccgctggggctcaggaccgggattatccgagctctgcagaagtgcaccgctattgctttgggaggttaaaaaaaaaatcacacggtttccagtgaaaaag

SEQ ID NO: 37752 - DNA, 2300 bp, Homo sapien
ctgtcgtgttttccaagcacaaccaggccagattcctttgttcctctgcatccaaagctgaggaaaggccctgccaaccccccttccccacagcatcccatccccaaaaagccaaagagagaagatgggaccataaaataatctggagattaatagaaacaagtttgcttcttaggataaagtgaaagctcactaaatattgacagtggaacatggccttcattttattttgtacatgtatatatgtagtatatgtgtatatacaaacatgtgtatagaaatatagaacatatatatgttgtcttttttactttaagaagctcttctgctaaagcctcactgagcatgtaagcacagtggtgcatctgaggtcctaatctagttcagtcacttattagcttatgcatgtgaagttagttgagtttctgggcccgggttcctcactagcatatgacagagctagcaattcccacttcatgtagctatcctaaagtttctataagagtttatacaaaagtgcctggtgcacaccgtgctcaaaaaaatatatgtcttctttccatactctatgaatggctgattttcatgaatacctttcatttagcagctttactaggctacttatgtgaagaaaataaaatatacaatcagaaatagtgaggttatcttcggctaggatgacagaagacacactgtagatactaacaaaagtgcattcaagagaaatgtagtgtttctgagtaatgtagctagcaaattcaaagacaaacaatgtcagagaacttttagactttctagaacacattatagtatctagagaaagacactcaggtttgaaacttcagaattacaggactcactcatagtctaaaacaaaagaaccaccttccctaattaggtgagaaggcctatttctatcacatcaaactttctggtcccaggaaagcaataatcactctcagtttcatttttccctaaataaccaagatagtgaagccatctagatcactcttagagttttgctgccgtttccatactaatgtgttttcataacctaatgaggtatattattttcatacacaaaataagcaaaccctgttgattactcaaatgctgacgctcatgttttagtgaaacacaacaggtgctttgttcatctgacaacatgttgggaaaaacccttaaaaaaagaaaaagctatctacccaaacccaggtcaaacagaatagggtaaacatgataaacatggcacacctacatcatgaatacaccagtgtgaacctgaagaatgctggagggcaagaaggaaaaccgagttatgaaaccaagccacacacctgggaatcagggtggagaatgaggactaggttgatagggacacaatggctttccactgtgtacaagtatatgtgatttaagtttaaaaccacgtgaatacactttctcaaaaaataagctaaaaaagacaaatgtacttgaaaccctgaaaagaatcagtaaatttttttcttcttttttgagtcagggtctcttctgttgtccaggctagtgtggtggtgtaatcaatcatggcttactgcagcctcagattcctgggctcaagcgatcctctggcctcagcctccagggtagctgggatgaccggtatgcactcccatacttgcgcagcatttttttttttttaagaaacggtttcatcatgttgccctagctaatctgaaactcctgggctcacgcaatccttcctgcctctgcctctgcctctgaaaatgctaagcaaaaattggtaaattctttcatctgaattttatataatataaagtagtaagaactgtagaacttccaacacataatgactccatccaaatctctgcactagaggcaatgtggggaaaagcaagagagatcagattgttactgtgtctgtgtagaaagaagtagacataggagactccattttgttatgtactaagaaaaattcttctgccttgagattctgttaatctatgaccttacccccaaccccgtgctctctgaaatgtgtgctgtgtcaactcagagttaaatggattaagggcggtgcaggatgtgctttgttaaacagatgcttgaaggcagcatgctccttaagagtcatcaccactccctaatctcaagtacccagggacacaaaaactgcggaaggccgcagggacctctgcctaggaaagccaggtattgtccaaggtttctccccatgtgatagtctgaaatatggcctcgtgggaagggaaagacctgaccgtcccccagcccgacac

SEQ ID NO: 37753 - DNA, 2300 bp, Homo sapien
atctcctttcaaatacatgagttggaaaaacaatacattaggtaaaaaaaattgcagtctgtaatttcataatttcaagataaagcatttaattttctcacttcataaagatcttctaaattatggtgtctctatggaacctccctttatgacacacagaagctgccctgcaccaggtgagagagcatggcaggcggggtgaacattagccgtcctcttctcaactcctcctatactattgtgtgtcccacccttatcaaagaaggctatctttggctaattcatcttaaaaatttggtagaacaaggtagagaataagtgtatatcacccattcttcatatgtatgcctgggtaattttgaaggatatcatctccaggtatatgaattccttgaggactgaaaccttgttggaagttcatactaccccttagtggctggcacattatgttgtatataatgacattgggcacttagaaaataagctggatgtttggacttagaatgaatagaaagatttgagtctttccatgccaatagcattcccacaaacgtggtgaacattcctaaaatccaccaaattttctgtgagaagtgtggcaagcaccaaccccatgaagtgacacagggcaagaagggcaaggattttctgtatgcccaggggaagtggtgttatgacagatagcagggtggctctggtgggcagactaagccaattatccagaaaaagctaaaactacaaagaagattgtgctaaggcttagtgcattaagcccagaccaaccgcagatctaagagaatgctagctatcaaaagatgcaagcattttgaactggaaggtggtaagaagagacacggccaagtaatacggttctaagtgtctttttttttttttttttgagacgagtctcgctctgttgcccaggctggagggcagtggcaatctcggctcactgcagcctctacttcccagggattcaagtgattgtcttgcttcagcctccccagtagctgggattacaggtgctccccaccacaatcggctaatttttgtacgtttagtagagacggggtttcacaatgttggccagattggtctcgaactcctgacctcaggtgatctgcaagcctcagcttcccaaagtgttgggattgcaggcgtgagccatggcgcccagccctaagtgtcatcttttgttttattatgaataaaataaaatcttgagtttacattcacacaaaaaaagaaagattcacacaaaaaaagaaagcaaatctaaaacacaaaattttaggttgtaccatctgaaatacaaccactacagaatgagatcttttaggaatgtatataagaacacgctactaaacaaaatattcatttcattagattttttaaaaatttaagtttggtatctaaaagcatatggccattttataatcaaatacagaaagacaaattttagtaacttgagaatggccacaaggttactgaagaacaagaacttaaagctatggctgaagatgcccatttcaatattacatccacatttttttcacttacatgcaatttccctctctttaataaaaattagaaaatgatataattgcaccaatgggtttgatatggatctgatccaaatcaagctctttaaaaacaattttacagataatgtaaaaataagttttgcctttctaacaccctatgccctcttccagatattatcactctacatgcaataaaaaagcatatacatatatacatgtgtgtatggatagatacatgtatataatttgtatgcttttttatatttaaacatgtctagccctattcaccctataaatcccttaatcttaatgggggtgagtagcaagaaatacttagcctacaatatctgcactccagtgttagtgtggtaggcagcatttgatatggttcccaatgataacccttgtgtagtcacctcccctgagtgtgggtggagcatagtgatttgcctctggcgaacccagtacagcaaaggggatgggatgtcagtcgctgatgtcacagaagactgtgacttccatcttctggttctctcttgcattctatgatgtttccagacactctgtgcaaagaacagaggcaagcctccagccaggagctcatgaaatcatgaactgaggcctcagtgcaatagctcatgaggaaatgaattatttcaacagccaggtgagtgagctacttgggaaaatttccaggagagctttgagatggttgcatccttgatggagacccagagcttgaggacccacagaaac

SEQ ID NO: 37754 - DNA, 2300 bp, Homo sapien
ctgagtttgtcctgtccacatgcacaacgacattgccttctcttctaattttgcttctgcctgaggtgatatcctaaggctgagccttcagaatactaggtgcagcagatttaataactgtgcgtgaatttggtcaacctcattagcccaacccgataattaaattccaattaaaatatctcctgcttctgacacagaaaaagaaaaagtagtgaggaacagattagattattttgaccttttaatttcctttaggcattgggtctgtaggtcaatgattaatattaacatgctttgtgtaattaacatcaagtcccctgataagtagggcaggaaattcttcatagttagtattttagaaggatgcctgtaatctccatttgcacaaaataaactgacatatgattttccaggaaggatgttagaataaatgactatccaatcgtaggatagagatatattgttagtaggaagtatacgtccattaaactgattgtctgactctggtttttaaactttttattatgtagaatttggaacatacacaagaataaacagaatataatactttaccatcctactgtaacaaccatcaacttataattaatcttttgccactcacacctctaacctcctcatattatttttgaagcttattctagcttattccatataatgtaaaagatgatataaaatcatttcatctaaggatattccagtatatacttctaatagagaagcagtcattgttttaaaacaaaactacggtaccatttctgtcctaaaaaagaacaataatttcttggtattataatatttttcctttatacttatttttactttcttttatagtgagatagatgaatagataattagtggttaaattgggggtgattttaccctgtaggggtcatttggcaatgtttggagttatttttgttaccaactaggggggtgctactggcgtctagtcgttagaagccagggatgctgataaacacacaggatggtcccccaataataaagaactgtctcttccaaaatgccagtagcgctgctatggagaaattcaggtaggcagacatataggcaaatggcagttacaagggacaaaagcttatacagaaaagagatacaaaattaggtgatttaggtaaccacacaaaggacaaaaatggatttataattgaaaagatgattcagaatagttattccaattgagatgtcccatgatgaaatagaattttatgattgttttaaagggatcatcagtggcctataattaattaatggaacacgtgttctgggtgccggtaaagtaattcagaaaaataggtttcttacttgggcagcagagtcaaaggaagtaatgagcaaaatatttagtaaatacgagtagaatctgtgttctgaaaaaatctagaaaaaattattttgaatccgctaaaaagtctgtcacaaatggctttatgtaaaacaatgctatggatattaatgcttgtgacacatttttaagacaaaaatgagtattacttactttaatgtagacagaactatgctcattattctccacacaaaacccctggcaataatttacctagcagcacagtagttcttgtagatcaaagctgcattatttaagcatgtccagggggcaggttttagctctgtgccttttactttaaggaaaaaaaaatattggtttgcttcttgagagaaagcaatgtttagctaactaggtgcttcatgcaagtcctgcaatatttaaactcacatgaattcctcctgttatctgggaagaactccctttctgacccaaatactctaaaatctgaggaaagtacagaacaactgtgggaaagccagtctcttcaaatgaacagcgatgtattttcgtttaaattaaacccgaatgttaactagattcaggaaaggaaatggcagaggagagtctgtcgttgatatagaatacgcctgcctgcgtcggctcacagacaagtgatgaagtccaactctgaaatttcaggcaatttgtataccaagctcctccttttctgcagtcttcttttccattggtaaaattcttttgcagggtcatgtagggatcccaccccttctctgtgttttcactctgaagctctacacaactttacacctgaatgaacgccaaacctctatggatatataaagggaagcttgaggaggaatttcacagttacagtgcagaagcagaagcaaaagaattaaccagctcttcagtcaagcaaatcctctactcaccatgcttcctcctgccattc

SEQ ID NO: 37755 - DNA, 2300 bp, Homo sapien
ctacccagtccttgagggggaaaaatggaaaataacatttgaatctgtgaaacattttaacatgatcatgataacatgatactctttcattttttatgttaagtacacttactttttagaaaggaacagctcaaagacatcagcatccctcctgtggccacatatctttagctgatcttcaactgcctgataacatataattaatctgtcaaactacattccaatgaacaaaagtgctgaggcacttgcagtcagtaacaataacgtctacaagaagatcaaaagaaaggtgaatatggaggtaaccattctaaactgataaattccaaggctacaattatatattatttactcatttttgtggttgaatttcattatccttaatcctgggcacagatgtttaaataatttttaatcagagagaaaaaaatatgtatgtgtacgtatacaccaaaagcaagttttttttattctgtatgaggcaaggtaatttggtctttaaagaactatttttaaatgattctttgaacatgaagaattagtatttcataggtttcctatagagaattcatgcagtatcagggttggaggtggagagagtaggataaaatgtatgttattataggacattcttttttgtgcctatcacattatgcttggcacccagtaaattctcagaaaatgtgaaatgaatgaatacatgtcatttttctctgaacaaatgaataaatacattttcccttgcttggcaagcagcagtgacttcgtttctcatgagttgctaacatactcatgctgtgagaatttttggtggagaagcagcttttattcccatagctctgttttaaaaataaaactttagcaacagctatttaaatgctttacttttttttcttaaagtcctttgctaaattataaaataatgttaataggccacatgacctaaaataatatgaaaaaagtaaagtctgtctgtaattttccatgagaaagtagagctcacaagacatgacaaaagtgaaaagtataatctttgcaatcctggaatctgacaaacattgtaattatcagagtcaaaacaatcaccgaattttagctgggatttgttatgaatggtgaggttataatgacttataaatctttctgggtgatatatgaaattttgacagtggttttgctatttggtagaggactttaacaggagttatatttagtgcaatgaacatatttaaagaaatgaggaagataggtacgctagtgatggagagcagctgcaaatgtatagtcctgaacttcccttgatgccttgttaataagcaagctgaatctaggggcttggagcattcataggctcaggtttaggcattgccatcagggtgctttgttatccagttacacaagccgacctggggcttggaaaaacccattggatcaggcttagacattgtcatctgggttttgttttttttgtttgtttttgtttttcttttttttttttttgagagagttttgctctgttgcccaggctggagtacagtggtgtgatttcagctcactgcaacctctgcctcccaggttcaagcaattctcctgcctcccaagtagctgggactacaggtgcacgctgccacacctgaataattttttgtagagatggggtttcaccatgttggccaggctggtctcaaactcctgagttcaggcaatctgcctgccctggcctcccaaagtgctaggattacaggagtgagccattgtgcccagccctcatctgggtattttaacttaaagatgtcaactatcagcctctactacgtacagtcagtcacatctttgcatagtgtttggggtggttatagcccagccaaagaagaattaaaacttggcagccatctgttaaaattataaatgtgcttttaaattgatccagccattctacctccaggactcagaaacacacaggtgcatacacccagacaaatgtgattatcactgcttatttcagcatacattttctgtggttgtgaaatagtccccactaattggaatgcaggttaaattgacatgtgacatcacaatggaatactgtgaagtagtttcaaaatatagagaagtggtctgatggttaattttatatataaatttgactggactaggggatgcccagaagctggtaaaacattatttatgggtgtgtttctgaggatgtttttggaagagattagcattagtattagtggactgagtaaacaagatcaccctcgccaacaggggtggatattatccaatccactgagggc

SEQ ID NO: 37756 - DNA, 2300 bp, Homo sapien
gaaagggtaggtgtatgtaaaataggtgaagggtggggatcaatcagaagaaattgagtcaaacaggaagacaagttctcaatccggttcaaggatttaatttgtagcttggctttcaggctttaaactgtctttggcttggaagtggggcttcaccaaggacccacccctattctctctaggcatttggctgcctcctgccactctcacattcatgtttacattactgttatgccaccatggatatttacagcagtcctttgcagacctacttcaaataatctaccctacaacaaagctaatacaaaaatactccatattacactaaatttgagcataatctgtgcatacataggaaatgtgggactcataacgtgtaagatttgatcattctaatatttcccctttaaagttatttatggcttcctctttgacctgttctcattactgtagatgattggaagcatcttcaggaaaatttccatagagaaatatagttaattggaaagtaaagcatatttcatttttagacttcattctgaaaaaatctcattttcttgtgcttaataagaattaatgagaattgtagttctcctagccatgaaattctagagctgagtaatgttaactaaaagtggttattgctcaatgatttgattctttatgtaaaatgtacaaatttgtcatgtttatctttagtaaaagtgaatttaacagagactgtaaaatcatgtgctcttgaatggcatactggcactgtggtgtaggtagatggaagatcacattataactttgatatacagagttcaagagattccactatttcagggtctttctatattagttctataagttctgggtaatttgcattctaacaaataacataataacttcatgatcctaaggaaggctttctttggtaatcttttgaaatcaactaaatggactacctaatttgtacatgaacaagtgtctcctttaatacctgagtacactgggatttcctctagatcgtgatgcttgtaaatgagaatcctctgctgacagaagaagcagccctgaataaatgctacagagtgatggatttgatttgtgagaaatgtatgaagcaaagagacatgaatgaagtattggctatgaagatgcattacataagctgtatctttcagaaatgcattaacttcttaaaagatggagagaataaactggacaccttgatcaaaaggtactctttttactatgtcgtttataaaatacactcaagtgaatattttttttaatatgaagcctcattattatgtgtttcaaaattaaacattttggcagcaattgctgttgttggactcacatttagtctttgacaaacagagaataatattatacttatattgagtgattattcagttctgtatcctttactgtgatgtttttgttgttaccagcaatttacagatgaggaatctgaggtttggagaggttaaataacatgtgtaagatcacaccgcgagaaagtggcccaagtccaaatttgagaatattttatgccctaggtcgcagccctaggtttgtaatggcatccagggtgtctctgttactgtatcttggagagctgtgtgttatgctgcttctctgaccaccagagatcaaattctcttgcatccttacctagaaaagggaactaagtctgaagggtgtggctctatgagagttttcattcttagtacaaataactgacatggtaataagtaactagctaatctgataacagtgtttagtgtgttttatggtggtagtcacctttgcatattcatttaatgggctggaaaaccttataaggcctagcctaacatataggttgaacagcaatttgaactgagcccgtcatcatgatttgaagagacaaagaaaatcataagtaacagaagaaactactaaaaactgttgggttcaactaggagagaatgcttagtgattcaactccaattacgctttaaaaaatatctttcagcttgttaaaaggccgagcttctgatggctttccagtgtatcaagaaaagatcattagagaaagtatcagaaaatttccttactgtgaagctacactcctccagcagctggttcgaagcattgctcctgttgaaattgtaaggctcctcttacctaagttgactctatcagtaaaacctaattcccacctattgtattgttaaaggcaagttctctttaatatttatttttattatttcagaatatttttaggaacaaaggtggagataggtttgcctgccaaacctgttcct

SEQ ID NO: 37757 - DNA, 2300 bp, Homo sapien
gagagagagaggacatgtactagctctgtcctgcctaaaagaatttttgtccctggtggattgtgaattgatcctttgtctcctttttgcccagcacagtacctggcacacagctagaacttgcatgtttgcttaattgaatcccagagccatcaaaggcagggagaaattacctagagacaggaagaactgaaagactgaaatgccaaataggtcagcaagaaccatgcagtacaacaatctaaactctaacccaaatccccaaattccaggcaaagaacacatcattgatagatatagctgtgactgacttagaatagttgagatcagatcgggtgggctcagctcatcagcacctgttgagttcaaaccggaattttttctccttcgcatgtggagtttccttgtcgctatgaagaataaatctgccttattctctaggattccacatttcagcctggctactaagtaaataaaactggaaactgggaagccttatgctgcaatgactggcatctctgccattcgaggacaaacatggctatattattattgagtttaaaatcaccacattaattgcccggagtcgcacgcatcaccatccctgcaccgtgagggtgcagaagaagcatgcagtcacgctgatgtcacctgccaggtaacgggactcggcagggaactcctctgggacgtccactcggggactccggggaaatatggcttctggctcgtcctcggggctccccgctgggactcagcactgcggaagtggggcacgccttgggggagtggacaagaaagcgcgaaggagcgcgattagaaggtctcatctgtgcaacgtgggccgaggggtgggtgtggaggcctcgccaatttccttgtctctctagggttcctgaggctgtcggggcttctggaagccagggaggccctggatacggaagtctcaatgcagcaaattacagacctagttctgtacccttatgaagaacccctctccctaagggcgccctccactcccaagcgggggcggggatcggcaaaggatccagatcattcggcctgcggaagtctaaagggtcatttagacacccgcctaagaacctgaaactaccaggactgaccgcggtcaaaatccctcgggagcagtgaagaattcacacactggggtccacaccccgggaagctcgcattaacctaaggcggggcgtggaaatccgtacgtttccaaaagcggatttagaggccgagcctctgtaactacccctcttgtcccagcactgcttctgcctccccacctctccgcccctgcaacctttcccagaccaaagggagaaacgctctttcccggttccaggctgcaaaccttgcagaaccgcagccaaaggtcacccaggccaggagcgccccccgggctccgccacgccccccggccaggctggccgcggccgcgtcgcagcccagcacccgtacctttcccgatgacttccagtagctccttctcctcctgggtcagctcgcctttctttatgtgaaccattgctcccgccagcttgaaggttattccctttcttagggagtattaaaaaagaaacgatgcgtctgtattgggaacgccagccgcaatgaggcaacttgagaccaagacactgagtagccaaccgcggaaacgcttcgcttctctcctccctcccgcgggctggcggacagcgggcgagctcgggcgagccaggcggacggtctccgcaggccctgcggcggtcaccgcctgccgcctgtcattggccctgccgaggaggaggagccgcaggaggcggtagcgagagatcgccattggagcaacctgggaggacaaaaccaaatgcagaaagctggaggggggaattaaattcctcctacacgttccgctcccctatcctgtccggttcaaatatttcgccacatgtaatattgaaaattctacagctggcagttatgtgctcagcgacggctttctggggcatgcagaggccccaggttgtcgccgtacccccaccattcccccgggagtggcgcagtctgggcgggggcggtctaggagacgggggcggtacgggaggcggggctgcgccgggttccgtgtgtctatgtcaatgtgtctgtccttcactcctccattgtctgccgccactgctgctgctgctgctgctgccgctgctgctgcacgaatcgccgcagcccccagccttgcgcgtcgtcgctacctcctcggacaggtgagaagcagcccaggtgaggcaaggggcgccgtgagggttgcg

SEQ ID NO: 37758 - DNA, 2300 bp, Homo sapien
atggcccagatttggcacaagagatggaaatactagcaatgaagtacccaattatgtgtatgcatctgctggtaagatgctaaatcacatgttccaggaggttaccactcaactgtttttttaggtttgtgggtttcttccgcatgatactatgttataaatcaattgtaactctgaactaacagcattacaaaagattggtcactctcaggagccttactacttgcttgaacagccacatcattattaaagcatcatccaacaaaagtatctttgttatacactgagatgaataatttcaaaccattttcatgtaagatgttctggctcagatctgtcccagtctttaatgctgaagctttaggggggaaaaacagctggagtttaggaaagatttttgctaaaggcaggaaataatgataaacatattccaggagatttcagatgttagtgaaagcttcacgcaaaataaatgcctaaggccagaggaaaatgcatttcgcttttcgtatggcgctatgagaagaaacagtggtcctggggatgcttaacaaaaaccacctacataattactcaaatatttctctttgacacatacacgtctctttgacacacatattgagagaaacatcaatactactctgtagggaaacaacagtaaaacataaacactaatttccaaagaaactttcattgatgatgtaaatataaatctgcaccctggagaaatgactgattcccgcattttagcaagcaaatcttattctgaaatacacacttgtatttacccccatctacctatggtcgaagctccaggctacatattacagttgaatgaaggttggattaagaggctaatctaaggctatatataggcagcaacaccaatttaatctccgccctctccaacctccccaccctccactccctatttccataaatctcaagatctgagttacaaagagaaccgagaactctagcagagcaaagaagcccttccttccccctcccacaggctgtctctcataaacgaagtattagtgcaagtgtaaattgtttccaaacatctttaacaagcaacattgggcgatcaggttttcttctacagcttccacagaggccaaagagatgacaagtagtggggagggcgaggatcaccagcgtaaaaactaccttctcccgagtctgttctcactgactcgctagtaatggggcgctgtccttgcgacccctacctagcccagagccccggccccagcctccccgggagccgcatctggcggtgccacgcacgagaccatgtgcacccgccacttcccaccgcgtggctggcccccgcccgcccgcccgcggtcccagggtctcccgaggcggccaaacgttgcgagtcggaggtcttcatcccagggcactgataccccgtacgcgccgtgatgatgaggtggagcgggggcttctccaccgcgaggcaggaagccgccccaggaggcacatgcttcctccccgccagctcctgcccgatggaaaccccggcggggcggcagtcgctactctcgcaaccctcacggcgccccttgcctcacctgggctgcttctcacctgtccgaggaggtagcgacgacgcgcaaggctgggggctgcggcgattcgtgcagcagcagcggcagcagcagcagcagcagcagtggcggcagacaatggaggagtgaaggacagacacattgacatagacacacggaacccggcgcagccccgcctcccgtaccgcccccgtctcctagaccgcccccgcccagactgcgccactcccgggggaatggtgggggtacggcgacaacctggggcctctgcatgccccagaaagccgtcgctgagcacataactgccagctgtagaattttcaatattacatgtggcgaaatatttgaaccggacaggataggggagcggaacgtgtaggaggaatttaattcccccctccagctttctgcatttggttttgtcctcccaggttgctccaatggcgatctctcgctaccgcctcctgcggctcctcctcctcggcagggccaatgacaggcggcaggcggtgaccgccgcagggcctgcggagaccgtccgcctggctcgcccgagctcgcccgctgtccgccagcccgcgggagggaggagagaagcgaagcgtttccgcggttggctactcagtgtcttggtctcaagttgcctcattgcggctggcgttcccaatacagacgcatcgtttcttttttaatactccctaagaaagggaataaccttca

SEQ ID NO: 37759 - DNA, 2300 bp, Homo sapien
aaaaagtatattctcctcaaaaatgtatatattttccagtgaagaactttaatggtggactctttacttgtgccaactatctaccttataaagagttattaaagcccaaataactcgtgtcatgttttgaattttaattttttttcaattattataaatactacaactttcatagtatttgttagtaattaagctttttgtactggctgagtgattttgagtaggcagaggctgttacaaaatcatgataaggatattaaacaagctaatgttatttcaggcaacaaattgtatagtgttattataggcatatagttagtttgttgcttagagtgtcaataatttaaacttttagaaccaacttaattattttttgtttctttggagagaatgataatacaatgttatcaacccaaaagattcctagattcctttattttctgtaaaggattttatgttacttgttcttttaattttagcattaatggaaaggaaaatgttgtatagttatgggtaatttttaaagtttattttaatagtagataattttactcatttaaaatatagaataaaaggtaattcttgaaacttgttattaaatacaaagtacttcatgagaacactgcagtgaagtgtctcaattttattgagttttgtgtgttgttattatatctttatgaaacgttttatactttgggaatgatattgttgccctataatttttgtttttatttttttatttttttttttattatactttaagttctagggtacatgtgcacaacgtgcaggtttgttacatatgtatacaggtgccatgttggtgtgctgcacccattaactcgtcattaacattaggtatatctcccaatgctatcccttccccctcccccaccccacaacaggccccttcctgtgtccacgtgttctcattgttcagttcccacctatgagtgagaacatgcggtgtttggttttttgtccttcagatagtttgctgagaatgatggtttccagcttcatccatgtccctacaaaggacatgaactcatccttttttatgttgttgccctataatttttagactccaaagtcttttttccaccttgggcaacatggggaaaccctgtctctatcaaaatatataaaaaattagccgggcctggtagtgtgcctgtagtcctagctacttgggaggatcttttgagcccacgtggtcggggctgcagtgagcagatatcacacccctgcattttagcctgggtgacagagcgagactccatatttaaaaaaaaaaaaaaaaaggtctttttttcctaaagtcttaaacagtattgactgcacacagagtgttactttggaatgtggtaatttttcttttttcctcactctagccacctggctttgaaatttgtgcagactactcttcgagctactttatttgaaaaatattaattaaaaatttctattctttagatgtatttttatctttgtatcaaatttaagtgttttgggacataagaattgcacagcctaacataagtaaccattagccacactgtttaaatttagttaatggaaataaaataaaattaaacatttatttgtctagtcactagccgcatttcaagggatcagtagtggctactatattagatagtgctgatagagaacgtttccatcatcacagacacttctattggatacaatgcgctagaataggagttcacaaaggacctcctgggggtccaatctggtccaccacttgttgtgttaatatgaagttttactggaatacagccatgaccatttgtctgcatattgtccatggctgctttcacactgtaacagcagaattgagtggttggaacagaaaccttatatccctcagagagagtaaaatatttttcttttatttctttacaaaaaatgttgtgttccctgctttagagtatatatgctcataaagttgtttgaataacatatgcatagcacatgttagtaatatagcatgttacgtaaggcaggttatcatagttcaaagatgagtcataccagagcagtcaaaaatagaatctaagaccaaagtgctggataattagacaggagcagtcattcccttgtagggacaactagaaggtaagtcctctggtagatcagtttctttccaaaatggagagaactaaagaagagtcccaggtaagactgatcagtctacatcgaaggtgctaatccacttaaggtgggctgggtaactggaaggattagtgcacagttgctatgagatgcatctgtgccag

SEQ ID NO: 37760 - DNA, 2300 bp, Homo sapien
tgggaggctgaggcaggaggatcacttgagcaccctggaggttgagactgcagtgagccataattgcaccactgcactccagcaatagagcgaaaccctgtctaaaaaataaaaataaaaaaataggccaggtgcagtggctcacacctgtaatcccagcactttgggaggctgaggtgggcggatcacaaggtcaggagttcgagaccagcctgaccaacatggtgaaaccccgtctctactaaaaatataaaaattagccaggcatggtggtgcatgcctgtaatcccagctactcaggaggctaaggcaggagaatcgcttgaaccggggaggtggaggttgcagtgagccgagattgtgccattgcacaattgtcacagcctgggtgacagagtgtgactccatctcaaaaaaaaggaaaaaatgtacagcaacgtgtgtacatctatacatacatgtcattctttgaaattttatgtgactcttagattttacatctactttgattattttctttcatttgccagaattgatgtgttctgcaaatgctgttctcaatttcagtattatcctaattacaattacctttctctttttagcccctggaggaacgcgcatagatgatggtgacaagaccaagatgaccaaccactgtgtgttttcagcaaatgaagatcatgaaaccatccgaaactatgctcaggtagagcctgtttgagagactgaagcatttgaagaggactgaggaaaactctatagaagctctacagtccacccactttttaaataggaatcttagaaagcctttaaacttatgaaaataatgggcattaaaactacaaaaataggcctagcagtgtggctcgagcctataatcccagcgctttgggaggccatggcaggcggatcacttgaggtcaggagtttgtgaccagcctggccaacatggtgaaaccccatctctactaaaaaatacaaaaattagctgggtgtggtggtgggtgcctgtaatcccagctacttgggaggctgaggcaggaggatcacttgaacccagaaggcggaggttgcagtgagctgagatcgtgccactgctcaaccttggtgacagagtgagattccatctcaaaacaaaacaaaaagaactacaagaatataatgctttttttttaacctctcttgtgggaatttaaatatttattcttggatcaggagaattcgtttttcttgtatacatgttaaggaatatgtaagtattagtgtaagttggaaataaaatttatgggattttaatgcaatttatttctttttcttattgtgtgttaattccctgcctgagtcattctttctccataaagggcaaccatattttttactcttggactccatcttgattacattaggaaacgaatacaccaagagttgtaagtaggaatatagcctgtgtgtaggagaaaaaggaactagattaagaaatcatttccacagttattaaaataaccaatatttacaaaatcctcatttacataaaaacatcattccacttagaaaactgtctagaatcttactaatacagttgcaaactttgcttcagagttctaacaggactgtaggggccagtcatcctttattgccagtaaattataacacgttttgctcatctgctagaaacatgtttgttgtccacctagagtagaatctgtcctgcactttgctctcctccccatcacatcgttgtctaagtggttatatctttaacaccttcatttccgtgatttttagtctctgcatctcacagtttaaaaatcacatttattttattttcgtcgaatttttttttctacctgctatattcttgaatgaatttgttttatcttacgtgtacattttgatcatatttgttcccctaggtcatgatagcatctttgaaatgcttatagttcttatattacagtgtgagcctgtttaactatacacttttattattatagatctatggtgtcattatagtgagtttctattacctacttctgtgtctttttggttgacctaatatttaatggttgttttttttttaggtcttcaataaactcatcaggagatataagtatttggagaaggcatttgaagatgaaatgaaaaaggtaaaaattcaaatataatgcctatctgttttatagtaatgacatgggggtggataaaaattttataagtggccggacacggtggctcacgcctgtaatcccagcactttgggaggccgagacgggtgggtcacaaggtcaggagtttaagac

SEQ ID NO: 37761 - DNA, 2300 bp, Homo sapien
tcactgcaacctccacctcctgggttcaagtgattctcctgcctcagcctcccaagtagctgggattacaggtgcccgctaccacgcctggctaatttttgtagttttagtagagacggggtttcaccatgttggtcagtctggtctcaaactcctgacctcaggtgatccactaccctcggcctcccaaagtgctgggattacaggtgtgagccaccgcacccagccggtttcctttaactttgtccacacttttgaaaatagtccctttttgaaattcttctcagttatgctatttgaacgagtcatctcctttttgctgggaccctgactgataggtggtacttctctgggaaaacaaagtgattcagcctatagggagatagtgaagatattatgcagaagccaaagagagagttgcaatagttggttgagtgatagttgaagtggtactaatgttggtgacacccaggaatgggaagagaatgaatagatttccctgccaatgcctcatcttttgtaaacctctggctattaaaaaggaaagttgagcatcatcaaagcattgtttgtgtttgaggatcattttccaggttagtttttgaaatatttctagctgtatataaaaggttaatgtggaatagaaagcctaacaaattaatgaggtcttgttggtatggtggggtcaggggagggaaggagaggctggaagagggagcagagaattctaagaagacgaattattttaatcagctgcaatgtttaatttaatttaatacaatttagcatttgcaattacataatttactccgtatgaacctttaggttagatatagtattgtaaacttgcaaatctctttataaaacctttttctttggtagaaactactatgaagtaaataaacctttattgccttcgcttagtgcctggaacacagtaggcctttacaaaatgtcagatctatgaatactagctgacatttattgaggccttcccctgtgccagccactatgcaaaaagtgcttgacatacttctaaaatctcaatttataggtgaggaattaaggatacaagatgcatttctatagtagagaagcagtaaactgataatgaattaattgaggtgaagtctgagttatttgaagattttcagttatttttgtgaaaaaataagtttattgaaattcacgaccagaacacaaaaataatctctcttgattttctttttaaaattttttaaaaaacttttgttgacacgtagcagatgtatatatttacggggtacatgagatgttttgatacaggcatgcaatgtgaaataagcacatcacggagaatagggtatccatcctctgaaacatttatcctttgagttacaaacaatccaattacattctttaagttattttaaaatacacaattaagttcttattaacgattgtcactttattgtgctatcaaatagtaggtcttattcattctttctatttttttggacctattaaccatccccaccttctcccgctcttgattttcctttgcatgcatgtattcataaagtttattagtattttgcaaatctttgtaggataagtctgacctgtccaggtcacaattatagggcacatatcttattttctgagagaagcagggattttattttattttttattgtttcacttattttctccctttcatttgcctctacttcgttctcttttaaatctttcacatgttttcattcattacttgcttcctgccttccttccctcaaacaaggccaggtgcttagttttgaaatctcattcaaaatggtgccacgtcatctgccagggccaagaatccagaggtgctgtcatatttctccttgccagcgtggatctcctccgagccccgccctccctcctcacctgctcctggggaaactacaccaaggccgccgctctggcctggggctccctcccacacggccttggccctctccccctcgccccgggaccgctccgcccctcccggatcccggtcggcggagcgcatttatttgcatatttctacctttgttccctgccagcggccaatcagcgcgcggggcgagacgaaggggctgggcggggctcgggctcctgctccggctcagctgcggcggccgcaggttccaaagcgggtccgagccgccgccgcgcgcgcgccgcgcactgcagccccaggccccggccccccacccacgtctgcgttgctgccccgcctgggccaggccccaaaggcaaggacaaagcagctgtcagggaacctccgccgg

SEQ ID NO: 37762 - DNA, 2300 bp, Homo sapien
ctgatagcgacatatttttacagtatcaggcaaacctgaaggactgatcacatggcatcactgttaaaagtgatgaagtttaatagcataaaacaaaaacccctcctttgcttgtctcaaagcatactatatgtaccatctacagaaccctagttacctcacaccaagacagatatgccaaagattccacagcctcaatagcatgtgtaggatatctgctaataattacctcctccttgccatccgtcagccactatgacaaactctgggtttttcccgacatgagattaggcacatgagtatagaataattatatcactataattaactgtaacaaatcaaagacttttttttttaagttccggagtatgtgtgtaggatgtgcaggtttgttccatcagtaaacgtgtgccatggtggtttgctgcactgatcaacccaacaactaggtcttaagccagcctgcattagctacttttatcaaatgttatgggctgaattgtgtcccccccaaaaattcatatgttgaagtcttaatccccaggacttcagaataggatctttacagaggtaattaagttaaagtaggtcattaggcaggacccaaatacaatatgactggtgtccttataagaaaaggaaaaaaatgacacagacaggtacagagggaaaaaccatgtggcaatacagggaaaagtcatttaatattcaaaatggtcccgtatgttaatattatccccatattatagatggagaaactgaagttttggggatgttaaatgagatctcagatcatcctatgagcaagcaccaggatgcaggattcagatgggaatctcgtgactccaaatcccatccacttgttactttcagtggataagggactgaaggactttggtcccaactctgccctaaactagttgtgagaccttcaaaaagttatgaattttttgccatcttcatttattcatctgtaaaatgaaagactggaattgaatattacaagggtctatctaagggcctgctagttttaagaattttgctcaaatcatcgttttcaaactcctgaagaaattacttctataaattcattagaattgaaaggaaattcagtatttggagaatcacgattttgcccacagaattcaaggatttattggaaaaatatacatacttgcaaatgtttttgaaatattatgaccttaactcattttaaaaagtcatttatatagggcttgcatcccattcattaactttctgttgttaacattttcttcattctgagcttttaaagactgcacacaacttcatgaacaaaatacaggattaaaattttctgacagaaaatttaaattccagttttaaaatcttcagggagtaattaaatggtcttgaggggaaaaaaaacttggttgcagaccttagtttttaggtctgagaaaatggagtaaatggcttcctgcttgcgtggcaggaaagtttgcctttaaataagagattatctgtgaaatacctttgaactctgtggagggaagttgctgcatacattcaatggcaaggcatttattacaagctcacgatattaggctgttttttttttttttttttgccaatacttcctcagttttgaaaaattacgtgggttacttgatttgtattttttttcatacctgtagaagttagggtgcattgttttgacaggagcagggaagtattgtagaaaataatttttatcataatggagtatggcaggttatatgactgcgaggatcagaattgtgaatcatctcttgtgtgtcttcaagtaaataaaggcaatctgcccacggagcagaaaaaaaatctacaaactacaaactctgtccaatcatgtaaagacaaatcagccttcaggcaaatcaaatgtcttcattcaaagtctacctggatttggcactctgcccatcgtttcaaaacctcttaacaatacgtttcacaaatagttaaaaacatgcatactgaaaagcatacttttgcaatgttatttttaaaaacaaggaactctttaacccagggaagataatcacttggggaaaggaaggttcgtttctgagttagcaacaagtaaatgcagcactagtgggtgggattgaggtatgccctggtgcataaatagagactcagctgtgctggcacactcagaagcttggaccgcatcctagccgccgactcacacaaggcaggtgggtgaggaaatccaggtaaggctcctgacagcagctttagaagggtacttgctggagtgaattcgggcctctgat

SEQ ID NO: 37763 - DNA, 2300 bp, Homo sapien
aacttttttaaaatgttggctgtgttagggaaggaataatttcttagaggttataagggtaaaaacaaatggaagtaaaattatacacatacacacacacatacacacacacacacctatatgtatacacacacacacacacacacattcactaagcatagtcctacatttccaaagtaggggtaacctaagaaggaatggaatccaaacaattaattttatgagaagatgtgcggtagaaatatcaactacaatatagaaaggttttttttttttttttaaacacgttgtggtctcactatgttgcccaagccagagtacagtggctattcatagacttgatcatagctcattgcagccacaaacccttgggctaaagtaatcctcctgcctcagcttccccagtagcacatgccactgcacccagcgaggattatagagtttgttaaagtgggtagagaaggaaaactaaattggttacaagattacagtgactaaaactgattatggaatatttatatgtaaaatatgtgcatattaaatgttggcatacatataattatatgcataataaaattatatgtataacaacatagaaatatatgcatattaaaatataaaggtatatacattttcattacaaagaacaatttatcatttagtaacatttttatgctaactgaagaaagataagtgaatgttcaatgttatttattaattcttaaaaaaactaaattgtcagctgatctcttttatagtccactgcaaataactgctaacatgttgttcctctgaactatttatgcaaccatggaatcagctatatttctttagtcttcatatgttaaactattaaatcagagaatgccagtgcattctgatctcttagcattcattaaaataaaagctctagacttttatctaaaaaatcaaaataggctgtaatataaaaattaaaataggatatttaatattcttttgtaaataaataggatacatgggtctctagtactgataatcatgtaacctatttatatccaaatagatcaatttactacaagcttgcttaaaattaacagaatagtgatcaaataagacccaaaggaaacctttttttctctgactcatcaaatgttgaaattacaggtgtctatatcatagacattgcatatctatctcatataaaagtatagttttatatcacaaagcaattcaaattttgctaaatgcaataaaatcctatgagttaggaaaatttttgcccatctaaaacattttctttttttttttttgagatggagtttcactcttgttgcccaggctggagtgcaatggaacgatcttggctcactgaaacctccacctcccaggttcaagtgattctcctgcctcagcctcctgagtagctgggattacaggtgctcaccaccatgcctggctaattttcgtatttttaatagagatggggtttcaccatgttgaccaggggctagttagtctcgaactcctgacctcaggtgatcctcccatctcagcctcccaaagtgctgggattacaggtatgagccaccgcacccagcctctaaaatattttctaccttctgataattactcccagctgattttaggatttctattagcaggattttttcttcttgttgctgttatttaaataaatagaagacatggtattaactctctggaggcttcctgtaaagaactgagttgatgattggatatttgatcatttcagaataaatataatcctttcctaccagttaattggagaaattcttcatttttcctgaagtagttacacttttcttaaaattattaaaagttttaaagtatctacccaataattaagaagaacatgtagctggatgcagtggctcgggcctgtaatcccaacactttgggaggctgaggtggtagatcacctgaggtcaggagttcgagaccagcctggccaacatggtgaaaccctgtctctattaaaaatacaaaaattagccaggtgtggtggtacacacctgtaatcccagctacttgggaggctgaggcaggagaatcgcttgaacgggtagcagcggggacgtggaggttgcagtgagccaagagtgcgccactgcactccagcctgggcaacagagcaaaactttgtctcaaataaataaataaatgtagttgaatttttaaaatataattaggttttaaatgtctaagtgtaaagtaagaaaagaagtaagtggttagtgctgaaatatgtagctaaaagttaaagtcacaagtggacagag

SEQ ID NO: 37764 - DNA, 2300 bp, Homo sapien
tcgacttcctctttctcactcttatcttataatttatttaaatgaatattatgtgagaagtttaacagggatgcagaatatttggagatttttccgtaaccactctcagtcaacaagaagttgaaagctttcccagacttttcactaacagagaaatataaggattattgcccagccatttctttgctttgcaaaggctggctggatttaaaattaaaattatatgtcaagtttcataaccttcagcaagaaggattccatttgaatagcatgttccagggaagggtccctttgagaatcctatgtaaggaagaaagcacagttagacaagtacacaaatcagcagtacagttaaagaatatacaacctagctacatgaagtttctttcaggacaatggaaagtttaattaggaaaacagtaaaattttctataacaaatgagaaaatccatatgcccatctttatagaacaaaatccaacagtcctgcttttaagagatgtagtttaagaataatggttaccttcttaacatggtcaactcagccaaatccagcactacatctaaagttaaaatactggaagcacacccgctttaacatcaggagcaagacaatcatcactcccattcttgcacagtatatttgttaatgtattcagagcaattagacccttccccacaaaaaaaagaaacaaaaaaagggtgggagaagggagggatggagggatggagggatggaggaagagaggaagggaggaagagaggaagggaggaagagaggaagggaggaagagaggaagggagggagggagagaggaagaaaggaagcaaaggaagaaaggaaggaaagaaggaaggaaggaatttataaacaataccctggattaaggttcaacaaacattttctgtaaacatttactaaagatagtaaatattttaggttttgcagatcatacagtccctgtcacaagcacagttgacccttaaacaacatagatttgaattgtgtgggttcacttagagaaggatttttttttaatatattccttcatatgggcaagttctgtatccacaaccaaaagtggatcaaaaatactgtgttcacgggatgccaaacctgcatatgcggaggaccaacttttcatatctgtgggttacgcagggccagatatgggactttgagtgtgcacagattttggtatccactgtcctggactgtaccggactttgctgttgcagtgcaaaagtagccatagacactagtaagcaaatgcacatggctgcatgccatccgccacatctctctctacttaaggacactgaaattgaatttcatataactttcacatgtcacaaaatatgattcttttgggtttttttccccaaccgtttaaaaatgtcaaaaccgttcctgtttcctgggctgtacaaaaaacaggtatgccaaatttgatgacacactgccttacgttattttaacagtaattaaataattactctcaattaattcaacagtatctaactattagataaatttaaacttatctaatggcctgtttttctaattttttgtgcagtaaaggttttatagaaaaattgtaaagaataatcaaattatgaaaatgttcaactttaaaacagaatttttatttccttctctctcaaaaaaaaaaggacccaatctctttagctgttaattatattcctgtaaacagagtaacccttaggaatttctatttgaacaatggcatgcacacagttcttaaattcattccgttttctttcttccttttcttttttttttttgtgctgaacttcagccaaacattaaactaccttgggaaataaaaggtaaaagagaaagaagcacaaagatggtatttgaccttattttatgaggacattcaatcttaatttagagaaaaagaatagagcttttttagtgtgagaagcatgagaactggaaagaagtacagagtttttcagaccagcctatttttctaagtttgttttccggtaactatgctcttgtttctatgcaggtgaggttgtaggtcaggtgtgtgtgtgtgtgtctataaatccacacccatttttaaccagaaacatccagaatacatttccaacaagagcactggccaagtcaggtaagcaagcaaattttccagattacttaatcagtggtcaagctttgctatatttaaataatcaccttttgctatttaaaagtgaagctttcagtaaagggtaggaaagtgaaatgaatttttatttttcttcttttactgaactggatttcct

SEQ ID NO: 37765 - DNA, 2300 bp, Homo sapien
atgttccacagtgccaatacaggaagtttctagataatggcagctcattttttaaaaatggcactacactatactgtattcacatgccagcaaaactgttaaggtaagttcatgtcactattaaaataaaatgaattctgggaattttgttgatattcaattttaatcttaattatgcaaagatctgttacttaactaagactatgtaacataatatagcatatgacttctggataatgaaaataatcctaaacttaaccataaaaaaataagggtatgaaagtcaaaataaggtagaaaatgactgcaccaaatagccaacaaccttaaaaagggtaggatttttttaaatcactaaattaagattggttcattgcatttagtacatctcttttatgaagaggagttataagctacagaatcaataaattatgttttgatataaatttttcacccttaaagttcctagctaggaggaaattattcttttacacttacacgttttagatagaatggctataagtaagcacagataaatgaagaaatgaaagagaagggaaaaatagagatggttgattctgcctctgcaattgctaattcataaacatcaaactttcccagtgtacactgtcttctttgggaatttgctccatctttttccttaaactgaaaggtggcttactgaggctatcactttcctaaaggtctccccaatactgcctaattattttctcttatcacaggatacagggtggatgtccatctacttccttgttgtcacttcccagatcactttcactttatgctcttctaaaattaaaacaaagatcatcgaccacaaaacacaattgttcttttgtagctcatgctagaataccctctttgttacatctccttcatttttctgatccaaaatttagtagcctactatatctcacccactgtccttctttcctccagctatggtagagaactgctcctccaactttatgtacatttgaatcacctgggagttcctgtgaacttcgggttctgatttaataaggacacccaaagagtctgcatttcctgtaactctcaaaagaagctgtggagtactctgaatagcaaagcactgtaagtgctgtttctgttagtatctaatctattagtcctaatctcccatttatgctttggcactcattccctcctgctttcggtatcttaatatctatcattccttcactcttccctcaggttccctacatagtttatctctaccccctctaagccgctcagtatcgcccattaaagaactaaaccaaaactagaaaaccctcatttaacccttcactccccctacatacaatctgatgtgtctctcatccacagctaaacttggaagaaaaattgcctgcttgaggatgccattttgttatcttcagctcaatcctgtacccacttcaatgttatttgcaggcccattaccccaacactgcattcacgaaagtcatcagtgactacacattgagaaaacaagaatgacattttcagttctcaactaatttgaatttctcaacagtattcaatattgttaattactcccaatatttttccacatggtcctccatgacacaatacataatagtccccttattatctatattcctgtctattgtaaagacttcccccgcacaccaaaaaaggtcaaggaaactcctagccttcaagtctcaactcaaatctggccttctgaagccttcccaactaggaaaatatacagtcccattggttgtctaccagttgtctaccagttaattgtaattcttagccacaagttagctgacccaccgtctctcaaacaggtgaagttaagctcaatatttggcatatcttgatatactttgtacagtctagctacaataagtttgcctatgcacgaagatggctaccggcgggggggggcgtccttacgtcctacgtcatcacgtgccgggatgagggtggggccctcaaggaagacggaatggaatccagatgggcgggggcaagcaggacggggcggggctacgcgggatctgggcggggcggggccggtgaggggtcgggggtgctcctgctattcagccggtgcgcgcggcggcgggaggcagtggctggggagtcccgtcgacgctctgttccgagagcgtgccccggaccgccagctcagaacaggggcagccgtgtagccgaacggaagctgggagcagccgggactggtggcccgcgcccgagctccgcaggcgggaagcaccctggatttaggaagtcccgggagc

SEQ ID NO: 37766 - DNA, 2300 bp, Homo sapien
tgattctgcctctgcaattgctaattcataaacatcaaactttcccagtgtacactgtcttctttgggaatttgctccatctttttccttaaactgaaaggtggcttactgaggctatcactttcctaaaggtctccccaatactgcctaattattttctcttatcacaggatacagggtggatgtccatctacttccttgttgtcacttcccagatcactttcactttatgctcttctaaaattaaaacaaagatcatcgaccacaaaacacaattgttcttttgtagctcatgctagaataccctctttgttacatctccttcatttttctgatccaaaatttagtagcctactatatctcacccactgtccttctttcctccagctatggtagagaactgctcctccaactttatgtacatttgaatcacctgggagttcctgtgaacttcgggttctgatttaataaggacacccaaagagtctgcatttcctgtaactctcaaaagaagctgtggagtactctgaatagcaaagcactgtaagtgctgtttctgttagtatctaatctattagtcctaatctcccatttatgctttggcactcattccctcctgctttcggtatcttaatatctatcattccttcactcttccctcaggttccctacatagtttatctctaccccctctaagccgctcagtatcgcccattaaagaactaaaccaaaactagaaaaccctcatttaacccttcactccccctacatacaatctgatgtgtctctcatccacagctaaacttggaagaaaaattgcctgcttgaggatgccattttgttatcttcagctcaatcctgtacccacttcaatgttatttgcaggcccattaccccaacactgcattcacgaaagtcatcagtgactacacattgagaaaacaagaatgacattttcagttctcaactaatttgaatttctcaacagtattcaatattgttaattactcccaatatttttccacatggtcctccatgacacaatacataatagtccccttattatctatattcctgtctattgtaaagacttcccccgcacaccaaaaaaggtcaaggaaactcctagccttcaagtctcaactcaaatctggccttctgaagccttcccaactaggaaaatatacagtcccattggttgtctaccagttgtctaccagttaattgtaattcttagccacaagttagctgacccaccgtctctcaaacaggtgaagttaagctcaatatttggcatatcttgatatactttgtacagtctagctacaataagtttgcctatgcacgaagatggctaccggcgggggggggcgtccttacgtcctacgtcatcacgtgccgggatgagggtggggccctcaaggaagacggaatggaatccagatgggcgggggcaagcaggacggggcggggctacgcgggatctgggcggggcggggccggtgaggggtcgggggtgctcctgctattcagccggtgcgcgcggcggcgggaggcagtggctggggagtcccgtcgacgctctgttccgagagcgtgccccggaccgccagctcagaacaggggcagccgtgtagccgaacggaagctgggagcagccgggactggtggcccgcgcccgagctccgcaggcgggaagcaccctggatttaggaagtcccgggagcagcgcggcggcacctccctcacccaaggggccgcggcgacggtcacggggcgcggcgccaccgtgagcgacccaggccaggattctaaatagacggcccaggctcctcctccgcccgggccgcctcacctgcgggcattgccgcgccgcctccgccggtgtagacggcacctgcgccgccttgctcgcgggtctccgcccctcgcccaccctcactgcgccaggcccaggcagctcacctgtactggcgcgggctgcggaagcctgcgtgagccgaggcgttgaggcgcggcgcccacgccactgtcccgagaggacgcaggtggagcgggcgcggcttcgcggaacccggcgccggccgccgcagtggtcccagcctacaccgggttccggggacccggccgccagtgcccggggagtagccgccgccgtcggctgggcaccatgaacagcagcagcgccaacatcacctacgccagtcgcaagcggcggaagccggtgcagaaaacgtgagtgtcccgagcgcgtcctcatcgcgggggctgggcgctcaggcacgcgggtgcgggaggca

SEQ ID NO: 37767 - DNA, 2300 bp, Homo sapien
ataaattgttgttttaatggatagtgtcatatttccttggtatattagtttggtagggctgccctaataaaatgccaccaaccgggtggcccaaacaacagaaatgtattttcttacagttccagagactagaaatcaaagatcaaggtattgacaagtttggtttgtcgtgaggcctcgcttcttggcttgtagatggtagggttcttgccatgtccctacatggccatttctctatgtgatgcattcctgttgtctcttagtgggtccaaattttcttttctgataggataccagtcaggttgggttggggcccaccctaaggggctcatttaaacttaataatctctttaggggctttatctctcaattcagtcaccgtctgcggcactgaatgttagggcttcaacatgaatttgaggaaatacagtacaagcacacaagacttggtaataccaggaaaaatatgtgttttctaaaattgagtcagtagtttaatgtggataggtcatattgcaggaaatatctcttaggacaccttgaaaaagtaaatttacttcgaaaattttttttttcacatgtgatgttcagtgaggacccatttctaatacttttgtaaatcaccaaatttgagaatatagctatagttaatgttttctctataaattacctctaccctttattggttttcctcccaatactggagtaaaaaactgcttttacctttcatgtgtaacatataatgaacttgttcacattttagctccaagcagccatcagatttgtccttcttttaatgtatcagaatcttccagtttggggatggaaattatcctaatccttttcatttctcttctctttaatctctgcaccaagaattagttttctttacagagacgttttcaacaaataattgttttaaaaagtttgtttcgctttaggatatgtatcacaagggaaaagtggtaaggctgtttgaatttcagcactaggctgttggtcaggtacagtcactagttaaatgactttgctcttaaactattttagcagctcgtatggttaaaaaaagtgttttagcaaggcattacagattacgatgatggacctttgaaggtgcatccaaatgttaagtccataagtgctagacttatggtatacacatttactttgtgcttgtgattttacaaagataaagtatatgctgactgttcttaattttttttggttagtgtaatctatgagtttatgtttaatgtggttgatggggcaaaggtatcaatatttattataattgtgtatacacggggttatataactactatctgtattttgaaaattgcctttttatttgctagtacttcacaggtcaaaggcttattaaggaaaatattttttaaaaccttttattatgaaatttttgaacaatgtcaatattagggagaatattaaatgaaaccccacatagtcaaaatccatcttcatcatttatgcaaatctgtcattcttgatttaaaatacttttattaataaataatattagaactgtgttttgagtatatttggacaatgttttttattttctgattttcatgtaatatattgcaaaattatctgttgaagatgggtttttgttgttgttgttgttgttgttttttgagacggagttttgctcttgttgcccaggctggagtgcaatggcacactctcggctcatcacaacctctaccttctgggttcaagctattctctcctccctcatcctcccaagtagctgggattacaggcatgtgccaccatgcccagctaattttgtatttttagtagagacagggtctctctatgttggtcaggctgatctcaaactcccgacctcaggtgatccgcctgcctcagcctcccaaagtgctgggattacaggcgtgagccaccgcacctggcctgaagatgtttttaatatgtagagaaataatcacttgggaaaaccttttgtctttataaaaagtgctattgaatgtattttgtcttacagtttgaaagtctctcaagcatattgaaacttcctggaaaaaagacttttaataatatggatagagattttttagaaaagagaaaaaaggatctaaatgcatatttgcaggtaagctcatgtttactataatccacagattttcatttaatatagcacacaggtgtagaatgtttttcatttaatatagcacacagaatgtttttactgtaatcacagggtagcaaccacttttgtgcagcatgtcaaatgtgacgtgcagtctgcttagtaa

SEQ ID NO: 37768 - DNA, 2300 bp, Homo sapien
ataactgtaactaatgtttttccaaagttttcatcatatgtaatgaaaataatatttactaattgcatattttaagagacaaaaagacatttctccacaaagcctttttaacaacttttggattgcatagtatgagatgctaacatgtttaaagagataagtacatttagcatgttaaatgttaacatacaagggaaggttaccattattaataatgcttttttaaaaaaatagattattttatgttacctgtgctggcttataattagaagaagttatagtagataatatgaatttggtagactgttccatttcctctgagtcttctatctttcacataaaaatattgaagtaaaggttgtgctatttctatcaaaatgatttcttgagcacataaaaataaatgcactcctttttttttccaaagcattttcattcccagtatgtcctgacagagatgtagagcaggtattagccccattttaccattgggaaaactgaaatccgagaaagtagttgatatggttaaagtctcttaaggtattggtagtagagcatggactagatctaatttaatttgatgtctttgccatttgagttgaccagggaagtcttgtggattatctgtatagaattatcacattttgcttctcttaacaatcagtttttagtagatacatttttggccttcttcttagaatgcaattgccttaatttaagtgactttgtgccatatggatggttgcttttaagtcatttagatgacccttttagtaataataatattacattaggactcaaaagctcattcacatcctattatttttaaagtgtgaaatatatctgagttatataatatgaatatgtgaaatgtgtgaatgatataaatacgtgaaacatgtctagattatatatgttcggtgtccccaagaccactcccaggctcagtgatttgctaagaaaactcacagaacataccatagtcttactcatggctggaatttcttatcatgaaaggttataaagcaaaatcagcaagacaacacatgtgaaatgttgccaccaggaaaattcattggagactaaatgtacaggttttttattggaggcagattatatagcacataccaaaattctggactcctagaaggaaagtaggtgttcagcataaacatttcttatacagatagtttaggtatggtaaaccactcttattgattagagaatgctgagaatcttccctaaatttaagttcccatattccatccgagggacaaacttggaagcagtcttttctagacagagcagtttcaggctgccatgttaactctgcagcctgctttaattacatggttatgttcctttttatatatgtgtggatatatgtgtatgtggcaaaaacatttttaaagtttagacccaaaggccgtagttataaaagattcattttgagtcagtcaataggaatttatgtttgtggaattgtttttgaaaactaatcatttaaaatctatcatagtctatggattcacctcatttaataaataatcagaataatagctaacagttgttatattaggcagttttctaaatgtcttacatgtcttatttaatctccacataattctctgacttaggtagtattctcattttatagataaggaatctgaattaaatttaaaaattatttctatattaacaaaagtattaagctaaaaactacagagctggttctagtatatttcaatgtaaatgttaacataatatgtctacttatttttatctagattttcttgccatataaggatcataattgaaaagtagcaagttacagtagatggacaagcaattaagggagaaataatctaatatattaagtttattactaaattttttgttattgtttcttaatctttgctttttttctgttagcctaaatggaaaatattattgtgtatggaggggatggagggtatacaaataatatatagtttacatgcagggaaatgagtaattgtaatgcatatatgatgtagaattctttactcttttttttccctataaaattttaaaaatttgtttcctgatttttttttctcagtctttagatgacctttcaaatgtttcttctgatgactcagtacaacttcatgcctacatttcagacacaggtaagagagtttgaagtataattattgcattaaaactatgtattattatatccctaaataattttccacacttaatttttactaaccatttttttgttctctagtcatagttttgttactttttttctg

SEQ ID NO: 37769 - DNA, 2300 bp, Homo sapien
catatttctgtattgaaaatagaaatctgtacatcaaatttaaaataattttgtatgtatttgcattgcttgataattttattcgtttaaaatgtcattacatcctctataatgaatcaagatggatttaaaatgtcttctaaattggtaaaatttattttgtttgaaagtttcagtaaattaaataaacagcattgtagcatgaaacaggacagatgtaacttgaaatattatatattctgctttcttctaaatttgtcaaaatgaaccttttatggattaaatgagctatggcctatactaagtaaattttgtttttataaaattttcagtatggatgattttgaataaatattcatgtaaagatttttgaaagatgcttacacagattgtgatttatttttttaaataagaaaaaagagtttctagagactgctaggtttaagtttttattttaggtttatgttgagactgaatattgttaccaagtttagttatatgcttatatgcatggctcttatattctaaataatgttaattaattcatcctcggattactgagcttagggatccacctttttatgttaatttgttttcgtgttcatatacttacggctttctctttagtttcatgtatacaacaaaccttagtgttaataacttatttttttacttgaaaacagccatttatttttcaacatcatactgactctttaaggctttttttttttttttttttttttcaaaaagtaacagtaattaagtcagcatcttcactagcctttttattgtatgtgtgggtaattaccataatgaattatggcatacttttttggttcctccattgtctagcatcttcatgaatagactcttcgttttctatctacttggtatgttcctgggtgaattaattttagtgcgattttatgaaaaagaacattatattaaaaaatcacccaatccaaggagagatataaattgtttttgagttatctattgtgttttttacctgttacactggtatactgaattaacagtatcttttgaggtctgttgcttttgagatagagtactaggtgacttcttaaaattagtaatcacctttttcatgagtattctaaaggcttttatatgtgtgatattttatatcattctttataccatttccttgtaattagttatttctaatggttaaggcttttttttttttttttgatgagatagctctgttcccaggctcgaatgcagtggtgtggtcacagctcactgcagcgttgacctcctgggctcaggtgatcctcccacttcagcttccctagcagctgggactataggtgcatgccaccatgcctggctaattttttgtaatttttgtagagacagtttcaccatgtcgactaggctggtcttgaacttctggactcaagtgatcctcctgcctcagcctcccaaagtgttgggattataggcgtgagccactgtgcctggccatggccaagtttttaagtgctagtgtattcaaacagaacgttcagaacatgtgttgcatagctaaaaagatgaatgtggagaattcagaaagagttcagaagaaaccaagaaatgtttgaaatgctcttttaaagcaaacaaaactattcagaattccttatgtattcttatgttggggctgagaaattacatgatatactgttgtcagattcacttcaaatttaactggaaaaaattaatttctttttctattttaaacctttagatagtagttttaagctttggcacataaaataattcaagtaatattgttagaagacttagtgaagtagatttgatttactttgaatcttgtgaaacagtactaacaggtaataatgaatgaaaatctcaatttaaatttacagtctcagataatcatgttgtttgtcagtagtcattaaaatgaatttatattttctgataaagcatttatataatccttttatgtaatgtgttttttataaggtcaaaagaaatagactggcaaccttattttactacacgcattgtagatgactttggcacacacttacgagtattcagaaaggctcaacagaaaataacagagaaagatgatcaagtgaaaggtaatatctttattccatttgaaaactaggatttgaaaatctgttttcctttcatcattttatatatcttgaattgtttttctttaggtacagcagaagatcttgtagataccttctttgaagttgaagttgaaatggagaaggaggtttgccgtgatctagtgtgcacttcccccaaag

SEQ ID NO: 37770 - DNA, 2300 bp, Homo sapien
aaagcctaatttttgtagtctgtggaatttaaaaatttctctcaaacttaattaaggaaagaatcttttttttctaaaaaaaaaaaaaaaaaaaaaaaccatgacagtaatgactgttttttcactgttaaattatcacctggcacattgcagaaattcacagaatagttgttgaatgaatgaataggactttggtttaggtgattttgctactgttttcaaatgaataataaaacacctgttagaatatgaaaagttgagtttttagaaaaatcaagtatttccccttgttgacaaattggtgcatgaatcttctccatatcaactcattttgactcttttttgaaaatttctttaattgtgaaagatatgatttgtacataagagagaataaaacatttatacagtttagtcctaacaactggttaaaaaatagaatactgggggatgcagagcaggatggccaaatagaagcctccactgattgtcctctccacaggaacaacaaattgaacaactatccacatataaagcaccttcataagaaccaaaaatcagggactgatcacagtagctggttttaacttcatattgctgcaagaggcactgaagatggtaggaaggacaatattgaattgtcaatgccacccctccctcatcccctggcagaagctgagtggtgcagagagaaaatctgtgcacttaggggagggagagcacagtgattatgggactttgcattggaactcagtgctgccctgtcacagtggaaagcaccactgggcagaacccagccagagcctatggatgaagcatttggaccagtcctaggcagagggaattgcccatcccagtggttggaacctgagtccagcaacccttgccactgctggctaatgtgctcgggggtcctaagtaaacttgaaaggcaggctaggccacaaggagtgcaattcctgggcgagtcctggtgctgtgctgggtttggagccaccgcaccacccagtgagacaccagctggggcgacgaagagagcacttgcaccacccttcctcccaccccaagtagtgcagcttgcaggtccgggaaagactccttctctctgcttgagaagaggagagggaaaagtgaagaggattctgttttgcaacttggataccagcttagccacagtaggacagggcaccaggcagagtcctgaggcccctgttccaggccctacctcccagaccgcatttctagacacacctttggccagaagggaacctactgctttgaagggaaggacctagtccgggcaagattgattgcctgctgactaaagagcccttggtccctgaataatcagtagcagtaggtacccaggcagtactttccctgggccttgggtgagattcagagacatgctggctttagatgtgacctagtacatttccagttgtggtaactatgcggggggacttcttctgtttgagaaaaggagagggaagagtgaggggactttgtgttgcaccttagctaccagcttggttacagtggaatagagcaccaagtgggctcttggggtccctgattctaggccttggctcttgtatagcatctcatgacctaccctgagccagaggggagcccattgccctgaagggagagtcccaggcctggcagcattcaccacagctgacagaagagcccttggtccttaatgaacgttggtagccaggcagtacttgccatgggcctggggactgtgcttgctgtagggagagactcctctacttgtggaaaggggagggaagaatgggaaggacttcatcttgtggcttgggtgctagcccacctgcagtagagtagagcagcaggtagattcctgaggtttccacctccagaccctggcttccagaagcatctcttgacctgcccaggaatgggagaaactctccaccttgaagggaaggacacaagcctatctggcttcactgcctgtagattgtagagtcctagggcttcaagtgaacataggcagtggccaggccatggttaccacaggcctcgggtgtgacccagtgctttgttgacttcaggtatgatccagtgccatcacagtggaggtagcaacagggttgcttgtgtcacccctctcccagctccacacaactcagcagagagactgactctgtttgggagaatgtaagggaagaaagcaagagtttctgcctggtaatttagataattcttccacatcttatttaggaccataaaggcaataccactacaagtctttcagagccacaacattagta

SEQ ID NO: 37771 - DNA, 2300 bp, Homo sapien
gattagggtaggcttctttgaaaaaagatgacttttaagcaaagattggacagaagtggaagatctagccatgcaggtatttggtggaaagatctttgcagatagaaactatacacagtgtaagggcctcagggcaagaagatgccttggtgttacagaagcagggagcaggtctgtgtaactggaacaaagtgcttagcagaaatgaggtcagaggggtggaggtgaggtaggacttgggaggccagctagcataggatttttaggttgcagaaaagactcaggctgagaaaattaggaagccattggaagagcgactacttttggtttccttgtaagtctgtagacaaacttctgaaagttaaaggcatattcatgtcatatcacagattggttcaatactcaagtgtcaacacttaatgccttgcttctagaaaagataaaaagatgtagtaaataaaactgaatactcaagccagacaactacattgctgttttaatttactagctggtatcttaaatattaatgaacctccttctctgttttcttatttacaggttggaacactatctttttccaggttccttgttgtctctagtatctcttggtatcctttgatacctcagtccaggtaggatttccatgctcattttctatttgtggcttcatctgtcaataccagtaacacattttattgtattgcagaggtcagaattttgctggtccagcaatgtggaaatgatgtacaaaatgcagattaaaacaacaagaaaaactactttgcttcaattagttgaattgagcaaaatcagtttttcttgaattttttgcatgactgcttaaatgaaccgttttgtttccttgacacgatagagataatacaaggtttgcaatgcccttattgttttgagactgtaagagtaatacattaagtaaatttcatttagcacaacagtactattgttaaatggagggaaaagattctggtaaaagggaagaaactcctggctttagttttctaaaatgcttttgtacctcttgtaagaatgacatggaggtgtttttaatgtcaagtctgaaaatttgcttttcaatttacttggaaactggtttctaatacaaaacagggtagcacactttcccagcatgttcaggtaaactactttcatcacaattcaggtagaagtgactgcctttaattccgtacatcgcaaaccatctagtggtagatctagaatggcgtcagtctcagggacttctatgcacattgagttccagagttcaattccatttaagttgggactatttacaatgacatttgctgaaatttgctcaccttgatatacaagcatattgtattaagcagctagtaaacctgtggagatagcaggtaaaacgtaaagcctgttttacgtttttttagaggtgcattacttgtagcataactaaaccttcattgttaggcaggtgctggccaattacatcagcaagtcctaactccgctaggatcggggtaaagccgataagccgcatcatatctacaacctgtctcggacccctgtaaagaactcactgaggattggtagggacaaagggaagtttctgtcaaagtttaggagaaaagggccgcgcagggagctgtttcaaataacacttaaatcccaggagaagaaagccgaaccccaactcttcggtcgccgcggggccagggagacgcgagagggaagtttttctaaaggaaatctgccgccttgtccccaagaccagcgaggtccgcagcgccatcagtcaagtgtcggcctctggcattttctcctctccccagggcgggccaacgctagtgggcggtggatgatgcgccggccccaagggcgcgcacgtccattcccggaaggctcgggcgctggggcccctctgcactcccagcggtcccaagttggcccaggcgcccggtcccggggtcctacaagtcagcgccaagccgactgccgacagcctacctccgcttctccgcgcgccggcgctatggagacggtcacgagacgccagcagcccctgcgcccgccaatgggaacgcacgttgcagcgagacgcggacgtcgctcttccaagatggcggcgcgtccgtcgcgagcgaccgggccgaggggaggccagcgaagccgagtaaaaccgccgcccgggagaagactgaaggagcagttgccgccgttggcggcggcccgagcagttttcgctgctgctacggctgttgccatgaggcgaggctagggaggacctcacttccccggggtgtaat

SEQ ID NO: 37772 - DNA, 2300 bp, Homo sapien
taggtggtctctaaggccatatctatctttaacattttatgactgtagacaaatttctggaactataacatgtagcaacagctagagcttgaaacaaaaatagcagcaagacaaaaatttctcctccttaacacctcaaggaaaatgcaaccaagtatgggttttaaatgttcacattagcatttaatcctatttaggtaatattaaacctgtttagaatctgttttgttttttaaacaacactgaaaaatgtgtgacacacagaatagtaagagaaaaataaattgaaactacaaatactattagtgcttctaaattaagccacgggatttttagaaatcactttatgtagtctggctaagggtgagaattatgtggtataggtaggtctgttgattttttgtgtgtgtgataaaaagaatatgaatgaagggttatggacagaaatgggctggcatacactgtcaaccaggaagaggctgaactagagagaaaaccatgttgatgccaggagagaaatgattggatcagcagcaagccattttggtgtaaaatttaaaacatagctgtttatttgagtttataataatacctcattcaatatataaaactacctttttatagctaagtaatgtttttcacagacattgctgaatcttacccatctttgttgcctaccccatttcttatcccatttctgagtttatcctattcatgaacccaacacattaaggaagcccagaagtgtggtgagaaaatctcttaaattatttggttatcttacaatatgaaaaaaatgatgatttggttttaggctaaataaaaacaccctggtatccaaatgtcaggcacacaattagcaagatataaatggttgatctgtatctgatgcctccattatttttatgaaatcattggcatctatggtcctttctgcctccttcctcactatttccagccccgatacgccatagaagctgtatacttaaaatttgctaacaaacatttaattaccaaatacattttgttcatcatttttactacaaaagtaataaatgttcaaatgccacactgatagcagtaaaatgtaacagtcctccttcattctcaactctcacaacctactcccctctccaaaggtaattattataaagaggacttccatgctaattggatgctttcagtatcacataatcttaaatacataaatataatactatgatatttttgtgactgactttacctttaaaaaaatacctaggagacatttccacatgattacacttaatctatttaatggtcgcatatgtatatacaataaattatttggtaatttacctattgatgaacatttgttggttcccatattttgcttttataaacaattctagggcaattactatttgtcatgcacaatttttataccctagaagtagtataatacctgacatataggaggtgttcacaaaatatttattgcatgaatgaatacagctacactactatgtagccatatatatttggggtgcttgtgaaaatttctctgaaatagattcctagaagtatacatgatgagtcaaagtttatgtgcaaaattacccatgcaaaatctacatatttatacattccatccgaatagaagaccttatcttaacattttggctacttgatgtgtgaaaatagcgttttcttgattacttccattgtttcacgtttcttatccattttttttttactgtgattgcctatttatgccatttttcaactttctattttattgtctttttctcacttcattggggaaattctttctaaaataatcttttgcatatactttagtaggtaattttccttttaaacttgggttttgctttgtagttttatgtttttatgcattcaaatttgtttaaatagccctgtgaaactaatataggtgctaatagaaaaaaactccatacactgtaaatacttgattatttagtctaaaagtgtgaagtgggaggtggcaagcagaaattttttcaagagacccagggtcaatttgggaccgcgcgccgcaagggggaagggaccctaacggttgagtaacaaccggaagccattagagtctgtgcttcacttccgttccagcctcagcggcagctggatcgctcgacggagtgcctctggtagttggccaagacgccgaatatcaaaatcttcagcggcagctcccaccaggacttatcccagaaaattgctgaccgcctgggcctggagctaggcaaggtggtgactaagaaattcagcaaccaggagac

SEQ ID NO: 37773 - DNA, 2300 bp, Homo sapien
atactacttgggaggctagaggatcacttgtgccccggtcaaggctagagtgagccctgatggtacagctgcactccagcctgggtgacagaacaagaccctgtctcaaaatacaaaacaaaacaaaacaaaacaaaaaacccccacaaaaaccaaaaccaaaacaaacaaacaaaaaaaaccctccaaaaacttaaaggctggacacttgaccatttcttaactccattttgaaaggtaaagggtgaaaggtcactagatagttatatctggcatatatacaaatcagaaatatctctacttgagtcaatatcatcaatttcatccatgaaatgagaacccattactacgattcgtcatgctaacgaacagaatcctcagtgtggatagaaagttaagcagaagctctagcaccaacagcctttggagtatctttattattttttatttttaaatttttatttaaagctagctgaccactcctgcagcgtgaattcctgattagagcaaagtgagggataaatctagccatcatacacttttatcctcctaagaatgctgaactattttaaaagtacagctaccataccactccttttctcgagttatcttgctgttatgaaattggtagtctggctttattcctgaggtttttgtttgtttgtttgaaatgggggtttcactttgttgcccagcgtggtctcgaattcctgggctcaagcaatcctccagcctcggcttcccaaagtactggggttataggcttgagctaccgggcctaggccctaatcctaaattttaatcttaactctgccactgtgagaccttgggcaaatcacactactcccatggatccgagttctctcctctaaaaatgagggtactgggttaggtctttcttgatctttccatccatataattaatctataagcttagctgtgttttagctgacgtagaggaaaaccataaatatgaaagcagagacaccagctttaattcgtttgatggtcaaattacatacaccataaatattagcctctttgagtgatcaactgttagctttagccaagtatgtttaggattacacttaaaaaaatattttattgttgtacacttcataaaggaatctacagctactagtgatgctagtatagacttcatttatagcagaaaaaaaatccccaaggtaagaatactaaccactgaaggagatcacctcgttaattctcggcccttctaactctgcttgccttctttcagggttggtttcagagcgaatggtcctctctgttcagccttaaaacgcggcatacctaagtcatgtttccaacagcagtcaccatattccctcacgtttcccatttgacaaaccccaaatgtagcatttttttctcttaaaattcccttgaatgattcttcaagctccacgcatctgtggggacgttccaggtaccgccccacaatgctacctcctctttaaaagaagtcgttcagctggggcgggctggcgctgcgtggcgcgcacctgagcggccggggctccccgagccacggggggcgcgagagggcgaggcagcggcctggcttctccccagcaccgttctctgtcacggccgccgcctgaccatcaccccgcgcctcgcgtgggcatgtctcgcttcagaaatcccaagtcgtcttaggttccctggtccttcccctgggggggaaaaaaaacgctggtgcagcccagagcccttttccgctccaccccgggatgtcctcgctgccctcccgcctcccgcgcgtccttcccagcgcgtcggccgcgcgcccaggtgttcccgcgtccgtaatcccctccggcccgcgcctcccggcccgccctgcgggtctccagcgcctgggcccgcgctctcgccgcgggtccttcctcctatccccacccagccccgcccagcctccgcggcgctggggctcccggccgagcctctcctcccacctccgtcccctacttccctccccaagaagtgctatttttagcaaattctccgcgcgccgccgcccgctcagctcgcagctcgcagccgcccgctgccgccctcccgagccccccccgcgcggcggcggcggcggcggcggcggcggcgcgtcccgcacatcgcgcagcgcgcaccgagccggccgcgccgcgcccgccgctctcgccgctttcgccgcggtctcctcctctagcgcccgccgcggccggtaaatctcggctggaggagcagcggcggcccccgagtcaactttcattccctttttgcttctgcctcac

SEQ ID NO: 37774 - DNA, 2300 bp, Homo sapien
aatttgccttggcatgttatctagacttcagttactcttattttccttttatcacttgcctgtaagcctgctttattgtttcttattctaatactaaattttagcctaatgtccatgtaaccactcaaccctccagtctttcactttcttactcttcttgaaaaagtactggctgcttattacttctctttaattcatatttacttgttggtagtagggcaggcatcagatgacttcctcaatatgtaagttatgttcatgcctggagcactttatgattaaaaagaatattatgtatagaggttgtttgtataaactatgagctttgtgttaggttagtaaaagcggcattacaaaatacttgtttttaaaagtgaagctttgtgcttgagcagcttaatgctctaggtgaccatcgagaatatacattggtcctaaagaggcttacaggcttctagaaagacattacatagaaataagttatgcctagactgagaggatgatgaaatatgctccaggatttcagagaggggcaagtaggtgtgtttgaatggatgaggaaggcctgtggatgaagccgaggaggtgccaccaaacctagatgcttggggaagctgttaagagttttggagaaggggacaatgaagcaaagttctctccctttctttttcacttccccctcttctttttcttctagaactgtgtcttttcttctttctttcctgaagatgcaaaagccacagatgtaagtgagagggactaaagccagagtcatgactatgaagtattgatttcaggtgtttgttctcaccttaaactcagaccaaatataaaaatatgaccttgggggcttagaattgtgcagtttttgttcttcaagagaaactattggagagatctcagagcaaggcattgcttgtatttcccttcagtgtagtacttagattttcattttcttagatctaattataaaagagacttaggaggtggaaaataaattcaataagtcttcaaagtttttcctttctttattttataagctaagtatcactgcattgggggtatactaagaagggtatcaatgacagaattgctagtttcctcaacctgcctcagcttaccaaatttaactctttttgtgaaactattaccacatgtaaatatattttaaaaattagaatttctttgaagaaacattttcctagccaatcaaaagcaagagctagtgaggcttcaggatgatttggttttcagactttttttttctaatgccacaatccttagatatggtgggaaaggcacttcaaagtgagtactccagatttaattcaaatgcacccatttaagtagctcagaaaattgcatcatctagggttctggagtgacagtgttttatatgttgaaatcttttggagtgggattgaaacagcaaaatcattttatttcattaaaatcggtctcagcctcttctttttcctctcattcaccgcaggcctttccatctaagaaacaattcatagctgcttcttcagaggatgtctaattttccctcattcagagggacacatttggtactttgccctgtgttttaattagtaagcttcagagaaagaaagtcgtcagagccagggcccccagttgtggaagtttctatatccggtaaattggatccattccagggcagaatcatttatcaacaaatgaaacaccagccacttcccacacgtcctctgattgcattaaaaaatcactccccttcctacccaaattgagtatacttagagtatggagctgacaaacattctctttccttctcctcctcctcctcctcattctgttgaattgctggtttctgtagtctattaggcttcttattaatagtaataaaatgttcattcattaactctctcatgcctgcataccagctatagtaactgtctttgcccccaagttatgcagtctttataaagtcgttcagtagcagggcaatgagttgggaaaactgatattgcatctgtagcatcaggtactatttaaccagtgggagggactgataaaattagcaagttgactaaccacttcccttccttgtggctctttaatattataacggatacagaaaagttcagaaggactgagctagtttgcgaaaccacagcacactttggcaaagagggaatgcacaacaaaacgggtaagtttctttattttaatcttttaagagaactgtgaaaaagatagtggggtagatgtttttaagtctgactctgcaaatcgtctttaataacttgtaggctgtg

SEQ ID NO: 37775 - DNA, 2300 bp, Homo sapien
ttgtagcttgattatggtaattatttcacaaggtataggtgtatcaaatcatcaaattgtacacctgaaatataaagaatcttgatttgtcaaatataccgcaatttaaaaaatgttctttacataaatgttttgtagaataaaaaaaaaaaaagttcttcaaaagaaatctcaaatctccaaatggaaacaggtaaaagtggagctcccctggttccacggagaaccttttttgaggaaacttaggcaactcgcaggtaccttatgtcatgagacagagtttgaaaactacaattgactatctctaaatttcctcccaggtctaaaatgtgatgatagttactacttcagtacatcatccttaaggaaaattattaggtccacactgtttctatcctttgaattttacacataaattttgtaatcaaaagtttatttgtaatatcagatggaatcagataattgctttttgttttttccactgacaggaacataagattttgttgtgtagcttaagtcaaacgcagtttggaatatatattttttaaaaattgtaacttacatatccaaatacaatttttcaagaagtagagtattcagtagaaattaatctgtgaaagaagaggaattcagcagtggcctatttgatgaatgatttaacgtgcttatttcttccctttcatcaaaactctgtgtccccttgtttgccccctctgacttcatactctggagttgaccaagatccctcttccatcggattgttctgggaattttgaaataatctgctttttcctctctttcccctgttgcttctgatgccttagaattacattttcctcgctgatttagtttagaaaagagaaaagagcttccatgactagtagattatcacttttgggtttgctcttggaagtgacaagatgctaggatccctctttggaatgtaaaatttatctcttatatagaaaggatataaatgtagcaccagagactataaaactctgatactatctactgtactgtatagctgaacgccacaatgtgtctggtaatctattgactatcataaatgctatttctacagaaaagttaggaggtccatatttcgggcaaccaatgtatagctgaatgcagaacagtcatagttgggtactaaccatatatatgatttatccatcaacaggtgcatatgctcagaaattctgtatccataagaaatcagactactttcttttccttttgcaagtaaattgaatttagcctgagaggctgaggggaaattttcacatataagccacggttttgtgttttgtgttttgttttgtttatagatatagtactaactggatggatgcgataaaattcataggtggtactaagatacaataggatttgtgaaatggacaattgtcttgcataaatagcaagtaaaaaatcaagcctgtccttcataaaaattttattctggggtgtgcttgttttccaaaagtacctctgctaaatctcctgttagtcctgaaactagaaggcagaaaagcttctagtgctacagccaactgcagtgtagcctgagaaacaggcaacaaaaatagaacaccaggattgctgtgcgtgggtgaggcagaaaccacattatgagcaaaagcttccagtattattttagaaccaatacagagctctgtacttctctcctctctcttccaaaaacacatactacaaaaataaaatgaaatgaaatgtatgtgcatttgccctcttagaattatgattcttaattttttttcttgccttcctttctttggaagcgaatcgccagtatggaaacacagtgtgtaaagcaagcttcgagagaggaaagagttaattggttttaaggccctgcgatagagaattatggttggaaagatagaggctggacagctgggtttgctggggtatttttaaatgcattaatgcaggctccaatcactcggccatgcttgacctatttttggctcaggccgaccattgttctatttctgtgcctgtgggccatgctgttgttgattcatatgcaaatggattatcactcgctttagccaacttgagctgagagagactgagaaagggggaagagaggcacagacacagataggagaagggcaccggctggagccacttgcaggactgagggtttttgcaacaaaaccctagcagcctgaagaactctaagccaggtttaattggtttctttttctcgtgggtagacttaataattttctacgtattctgacaaagaaataaccccgaagcacgttcct

SEQ ID NO: 37776 - DNA, 2300 bp, Homo sapien
atccaaatacaatttttcaagaagtagagtattcagtagaaattaatctgtgaaagaagaggaattcagcagtggcctatttgatgaatgatttaacgtgcttatttcttccctttcatcaaaactctgtgtccccttgtttgccccctctgacttcatactctggagttgaccaagatccctcttccatcggattgttctgggaattttgaaataatctgctttttcctctctttcccctgttgcttctgatgccttagaattacattttcctcgctgatttagtttagaaaagagaaaagagcttccatgactagtagattatcacttttgggtttgctcttggaagtgacaagatgctaggatccctctttggaatgtaaaatttatctcttatatagaaaggatataaatgtagcaccagagactataaaactctgatactatctactgtactgtatagctgaacgccacaatgtgtctggtaatctattgactatcataaatgctatttctacagaaaagttaggaggtccatatttcgggcaaccaatgtatagctgaatgcagaacagtcatagttgggtactaaccatatatatgatttatccatcaacaggtgcatatgctcagaaattctgtatccataagaaatcagactactttcttttccttttgcaagtaaattgaatttagcctgagaggctgaggggaaattttcacatataagccacggttttgtgttttgtgttttgttttgtttatagatatagtactaactggatggatgcgataaaattcataggtggtactaagatacaataggatttgtgaaatggacaattgtcttgcataaatagcaagtaaaaaatcaagcctgtccttcataaaaattttattctggggtgtgcttgttttccaaaagtacctctgctaaatctcctgttagtcctgaaactagaaggcagaaaagcttctagtgctacagccaactgcagtgtagcctgagaaacaggcaacaaaaatagaacaccaggattgctgtgcgtgggtgaggcagaaaccacattatgagcaaaagcttccagtattattttagaaccaatacagagctctgtacttctctcctctctcttccaaaaacacatactacaaaaataaaatgaaatgaaatgtatgtgcatttgccctcttagaattatgattcttaattttttttcttgccttcctttctttggaagcgaatcgccagtatggaaacacagtgtgtaaagcaagcttcgagagaggaaagagttaattggttttaaggccctgcgatagagaattatggttggaaagatagaggctggacagctgggtttgctggggtatttttaaatgcattaatgcaggctccaatcactcggccatgcttgacctatttttggctcaggccgaccattgttctatttctgtgcctgtgggccatgctgttgttgattcatatgcaaatggattatcactcgctttagccaacttgagctgagagagactgagaaagggggaagagaggcacagacacagataggagaagggcaccggctggagccacttgcaggactgagggtttttgcaacaaaaccctagcagcctgaagaactctaagccaggtttaattggtttctttttctcgtgggtagacttaataattttctacgtattctgacaaagaaataaccccgaagcacgttcctatttcccacctgcttgtagtttccgggataacctaaactccagagagctatagcatccactctgtcctttctgctttgcacacaggttggtaacatgggaaaagtgtccaggtctttttaaaagtggatgcccatttgagcagaaaggaaatcattgtcgaagttgatcctctgctgcttctcctcagggaggagggagaaccagcgagggtagctcctggggccggtgcactgagcagtgatgaatgtttcatgtagctgaagtaagagtgactggaatatgctgcagacaatttacgagagtgactcctgtttttcctcagatggggtggctggacgagagcagctcttggctcagcaaagaatgcacagtatgatcagctcaggtaagatcctctttcataactgagacgttttaggtttgaaagggggctggcttgggaaatgcagctaagaaaagcacctctcttaaggaaattgctgctttttcgtgttgatgttgctattttcttggtgcgtctgtagggtttaacttagatcccttccattactgtttctgtgcat

SEQ ID NO: 37777 - DNA, 2300 bp, Homo sapien
cgcaaacgtatttgtggctacctaatgccctttagtatggtcaaagatacagcactctctgctgctggaatgtttttctaatcaagttcagtatttataattttttggaaggaaatttgccactgctttaagaaataaagaaagaaacaaagcttatgatgtactccaaagttgagtaaaaagggcttaggaattttacatggttcttgagtcaccgaatacatcttttggaatttatttattttatttttttgcttgcttccccagtaacttaaattctgattaatgcaggcttttctttggtactagtagctctgtagtggtgggaaaactgactaaaacctatataatacatggtaaataatggtttttatttttcaacttgtgcagtcatcttccttaagaatatagctacacaaagcttaaacaactacttatttatattggttcagtaaaataataaaaccttcaatttagagggcaaatgattaggtctcagtgtccatttcaatgattccttcactctttagctgacagtgcagaccatgatggtatcgactatgataggggatgctggctcctagaaagcacgggtttcttcaggagggtgatggaaaggcatgtgctgacagggtcagagttctgtgtgagagtcccgtggtcttcagaacagcctttctaagccacagtgtactcattcaatcaacacgtaggcctctactatgtgccaggctttacaaaacaggtataacagtagctgaaatggtagtagctagcttttgtttaccacttagtcatttaatcctcactaaaatcgtatgcagatggtactttaaaaagttggtattttcacagataaaggaaccaaggcacagagccattaattaattaattctccaatgtcactcaggttttaatgatgaagccatgattttaccccaccagtttgattccagaaacttcactactatactgctgtttataggatcttgattttcttttattatgtatgcacttatttactgttctcatttattatttttgtattcattgttcttggtagtatttaagtgtgtaagaacctcatgagaaaaaggcatgtgaatattcttagaaaactacttagttcactgtgaatgtgtgttgttattatttattgtatttgttccatgtgattaggccccttgcatttaattctcttttttttttaaaaaaaaaaaaaaaagctttgttttatgcagaatttctcccctttgatccatttgggaagtcttgctatttacagtcacaaactttgtattctatttcctggtgcttcaaataacttatgtgtcctaaaattagagacttctaccatctggtactgtttttttatgttatgaagtattttatatattaaaaatataacatatgataattataaaccaccattgttgctcttttcatgtatgcattattatgtgttttcattgcattcatgaaaaagggtaaacagcattttataaagggaaatccagaatattggtacatgctttgttttgataataatgttctctagtagataagcaaccatctattttactggcttatccaattttaacaataccagtttgaactgaaacaatctgacaaattatactgaaagttagaaatcttaagcttatactttgaacatcacatttctccttgcaatttgctgttattgttttaagtgtgaggaccacacactccttccatttagttggagaacctgacttgtggttgctactttctactccctgactgctgctgctacctgcctaataattgtgtttggctccctgtaaacctgcagtcagaaaggtatttgaattttccccctctagcacttgcaaatccgatttttatgtataactaagtgctcttagtttttactctatctactactggggcctggtttctagcaggcctgtaactaagccagatccggcctatgtaatgctgtttgtaatgagaaatctaaacagggaatggcagtgaggcatggcaggaatgtgtttccattggagaagtcagtgtagagaaaaagtataagcaaagccatgtccagaaggccttttcagctggccaagacggaagactaatgttattgtacataggctgttaccctgccagcccttcctcacagatttgctttctctctctgtccctcttcccctgcgacctcttccccttttacccctttcatctcttccttctctttcgctttcttcttctgtcttcggactctgctgactgtttgctcaggtggacagtgacac

SEQ ID NO: 37778 - DNA, 2300 bp, Homo sapien
acatgtgcttctgtgaacaaaaggggaaatgtgcatatgggtaaaaaaattactgctttcttataactaaaggctatcaatctgaccaacttataaataaaagtaatcaatagcacagtaaaggaaacattaaattttctacaatttacccaagacaatttaatacaatactttcccctagcaaatgcattctgaaggaaaaagatcccaagtgaaccaacacattaattggaaagccttagcttcttatttccgaaaacaagaggtaattcattctatgtgttctttaaataagggtaggtagcaaaaataaaatgaaataacataaaatcaaaagaagatataatggtggaggaaaagaaacaggtggcttcatttctattctaaaaaagaatttcacgatttatgtcttgtgtatacaggggtagggattagaatctgcaagctggaaactgcattccagtagttaatatttttcattgtgcagtcgcctcattcaaaataaaattaccacctttttcattcatttatttctctgaaaatctggggggaaacattaccttcagattagtatttaatattactataaatatggcatttgcttttctccaaagtgtttccccttatgaaaaaagtagaaaaagcaaaacacattaaaaaaagaaagaaataaaagaaaggcaaatggagagctacctttctttgacacatctagttcttatatccagagttaagataacaattaccttctcagcagtcatggccagctccatcctggtgtaccttaagaaatctgaaatatcaaatagtcagaccaagctagtgaacaaggagactccccatgaataatttagaaaatggaggtggttggatgatacatacaaaaaagaattaccaacctaatgctttccctcatcctcctagggcaccctccttacatttctaacctgccttacacacaacacacacacacccccaacaaatacaccaacacataatcgccttccctttctgttatttgctaaaggactatcaaaataaaaaaataataatacttctccaagctttcactaaccttttaatacaagtcaatgctgcagactccttattgtaaaatatagtctgaaatattaacaataaattcataatattcttatgtcagcattctatggtgctgtgtgaagaagaaaacaaaaaccttcaggcaataaaataactttgacctgagctaagcaaaaacgatctgtttggatacatacacttattagtcattgtttgaaacaggcaccaaaatgattttccagtttgaaagcttccccagttacacttggatgcagtaaatcggatgtaaaagctaagaactgatacaaaatcactatttctaataatgttaattataaaagccagtatgttcctggcccacaaataatcagaatgaaataaaaaatcaaacacccccgtttgcccattattgttttacttaacttcagattgtgtgtgtgtgtatgtatgatctcaccagggaaaaattctgtgtaattctggataaaatataacgctaatgaactgactagtaactgcatagctgtagtatttaaaactgtgattattccaactgtgattatatccagttaccaaggatactgaaagttcaggatcttcatttttgtatattattccacagccttatattctttacacataaaaaaagaatgatgcttcccaaatagcgtcaatatagcgatatattaacttttctttttagcaaacatgacactaaacgtcatattcattcatgagagaagagttaagcaaattacaaatggaattttctcttttctgctgatttacactttattttctatgcatttctggtcatttctatatgtgtatagataattttcataacactatatatgttttcactgaaaagaacctgttatttaggaatcttcacaaagagtgaagagcatgacaaaaagtacataataagagaatagtgcaggttttatactccttatttgcatttaactgttttaacaactatcacctcaaaataaaaaggaggtgaatagcaaatttgttaagtttttgctgtttggagacagtaagagatgaagagatgctactaagccctctgaataccaaactggaataataataaagctgtcttttaaaataacatgcttgtgcctgtcagtagctgctttatttgagtttttcattgctttgtttatattagtgccccctccctcctgggtgcctctagaattaaacaagcaggtatttaccaccaactt

SEQ ID NO: 37779 - DNA, 2300 bp, Homo sapien
agaaaaaaagaacaaaacaaaaataagatttatctttaaaaaaatagctgaagtggaaaaggtttcgagatttctgcagccacgttctaaataagaattgcagaatactgtaaattcagatttacaaaaagaacacttggtggagagtggggcagaatttctgccgcattctctaagcgcttccaagagataaaatcctgtagcggaagatgcaaacgcaagggtgcaggggtgactgttttgagaactgctagagtgctactgaaattaagtggaggtcaagtcgaatctgattttcagacaattttacagtaaggcagcggctcactaaacaggccagttgacaagctgtagtcactttctgagtatttctgtaaaaatggtaagggatcaactctgcaatttgtccctcccatgaaagcacagtcttgtttacacctcgctggagaaataacactcgccctcacttctcccaaaaagctgaacccttcagtcggcccaagcagctccacaccctgaggtttccaagaccaaagctgcgagtctcagcagggaacagccacgtggcctgcctgcgcctcgcctgggctcttgccttcagcttgagatatctgcagccgcgaaccttgctccagcccagaaaggggcgctttgctcaattaattgttcccgccggcgagtccgtactgagaagcccatgagcggaccttatgtgcagggtactccagcgcggtgcacaaaactcgtcgcccccaaacgctgcccccaccccaacactgtgtactgactccagctttttactttgccatgtaagggatggacctgaaacggttattttacctcaattcatttcaaaaaggaaacaagtatggcattgcaaaagatgggcttcttatccaaggcgacttcctttctggttcaccaactttgctgcttccagtttgccaggatctacattaacaccctctttggggctcttcgttttaacttacagacagaaatgcttaaaatgttagcgtatccaagcatttggaattggggctcacgaagcctaattgtccactggatgccctagatagtgggggctggggcggggggggtctcagagcgggcagcccctatgtctaggcgctatcaaattcccacttcactctcttacaagctggcctttcaaggtcacaatgcggagcctaatttgggggtggggatgaaatggccacagggtctctcccttgggttggcattgccagctgttagggccgcagcaaaggcgctgcgctgcccccctctggctctgctgcctttcccatggactgggtttccttccaccgaagagtgaacttctgcctctttcgagcaccttccgaggcgtagtcctttggatgttggggagcgtcagactgggtcgttgtagaggggaaaggagggcccagaagggcgagagagcaggccgggacgcaaatcctcagcccccgcggcgcggccacgtcttcagaaacgcccaggacctccgggctgggccgccgcggtttggcctttggaactccaaggggttcgtctacctgaccattgggtgggctccgcggttgacacttttcttggcatgcccccccaccccgcgccacaccacccccccagccccagcaatcccaaatcggccccacggacctagagggctcttgggcgagatgagacatcacccactgtgtagaagctgttgccattgctgctgtcacagccactccggatggggctgccaccgcggccaggacagtctcctccgaccgcttcctgggctgcgctagggttcgggggcgctgcccgcacgctccggcggggaaggaaatcgccccgcgcccgccggaggaaggcgacggggagggaagggggagggcggctaggaggcgggtggaggggccggccgcccgggccaggtcgtttttgaatggtttgggaggacgaattgttagaccccgaggaagggaggtgggacgggggagggggactggaaagcggaaactttcctataaaacttcgaaaagtccctcctcctcacgtcaggccaatgacactgctgcccccaaactttccgcctgcacggaggtataagagcctccaagtctgcagctctcgcccaactcccagacacctcgcgggctctgcagcaccggcaccgtttccaggaggcctggcggggtgtgcgtccagccgttgggcgctttctttttggacctcggggccatccacaccgtcccctccccctcccgcctccctccccgcctcccccgcgcgccctcccc

SEQ ID NO: 37780 - DNA, 2300 bp, Homo sapien
atagcaaagcatttataaacgattaaagtttttttttttaagaagggtggataattcctctgttgataataagaaaataacttttaatttagaagttttttaggtatcatttactatgatgaagaggtattcactggaggaatattatttgctttctaggaacaaaatgtattagaatatgatggagaagactaacgaaaacgggtggctgtgctgactcctcacgacttaggaatgttgatggtccctggtctacacaattttgctttatttctggttttcaaaacttgttctttcagcaaaatattaagaattcctagattggaattacttttttttctttttatttattcaacactttcagatgattttttaaaaaagaatgatgtttaatttccaggagaaattgaattggtggaagaataagaaaaaacaacactctatggggctttgttgttgtttggtgttagctgtttatgtattttttttttgtttacctgtttatcctgatgttcttacggtgcagttgaaaaaattcttggtggaaagacacagtaaaagtaaaaaaacatcttgggagtgggggctcgtttcagaactaatccaggtcctatgaaaaggaaaactaagaaaagttttaaatattcgaagtactaatgaaggggctgggaaacaggcaaatccctgcaatgctagagggtgggagagtgaactggcagaacccaccaagaagggaatctggccatttatatccacaaacttgaatccagaaatttcacttctaggtatcaaatgttaggaagtaataatagacagagaaggcatttacaagaatgctcttagcagcatcatttattttttaaaaaggaaatagctatctatctggaaagggctggtggtggtgtgatacatggataagacaataagatatggtaatcaaaatcacatttgaataatattaaagttaagggaaaacattgcaccttctataatgccaagtggaaaaatatcagtatcccaaagtatctcgaattagtaaaatatattgaatttataactgcacagggaaaaaaagactggaaagaaatagatgaaaatgctaacagtatggtaacgtggagtgattcgaattttctcttttttgaaatttttttttccaaaatttctaggatgagtatatgttacttattaatgaaatgaattctatttccgaaagcatgattaagagaattgtgtgttcgcacaggctcccgcctatttctgtgtgcaatgaggggcgaaataaagtgttggaataatcactggggattatcctttaggattactgaatttatgtttaggttggcattattcaatcgggttcctcgcctcagttacccactcctttctgaaagaccccagttctggtactagcacgtcacctagaaggaagaatcctggaatggcacgggtccaaactagaggcggcctctcagcatggacccgcttcaacctcatctgcatggcaggcgttttgcaaggcgtcagaaggcatctcctctttggactttttgtctcccctggtagtctctagaagccattagagtgaaagctatctttcctacctacagctaaaaatgtaaaagtgagcgcgctcaggcggccctgctcctagaaagatccaggccccttcataccccaacccctggccggggacagttggtagcggtggctggtggcgaagctgcagggcgcccaaggccccctgcggcccaggagtgacccgagtgcactcgccccttactctggcctggggcctgaagaaggcactggaacacggaagctgatgctgcactttagatgcaaagcgtagatttgcactctggctaaggcactgaatgaacaccactgtggccctgggacaaggagctgtggtccgtctgggatcaactaggtggcgaaggggagggagaaaggaagagagagggcttgcgcgcgggagagaggaagggacgggagggagagggaatggaagacaggaagggtgtcccttctcagaggtcgcactttgtcagcagttcctctcgactgctctgccttccatttttcctttcctcagttcctggacaagcctcggaggaccaggcagaaccctctggctagcagaaaagctcgcacccccgcacccttgcggcgtctgcttcagaccctccacgcaggcgcccgctggagcgcctgctggggatggcgtaccaccgacccttcaggctttttaaaaacgtaagaatttctactttattatctctatgaaaaaaaaaatg

SEQ ID NO: 37781 - DNA, 2300 bp, Homo sapien
ttcattgttttccagtgtattatattgcgaaactagattctcaattgactgaggtgtttaatccacttgcaaatagattgtaaatgaatacaaaataagtcactgagaagcatttaacataatttaaaaatcaacaagaaatttgtccaaatatttaataacatattaatttaaacgagggttagcaagcatgttactacttttttgaaacaaaaatcagttctcccatttactagcttcatagccactgttgacaatcctattatttatttttcagccttccctttgaaagatgcttagcaaaaatcaactaagtaacaaccaaagatctcattctctttaacatcttccaggatcacaaatttcaattattctctgcctgagttatcacaattcaaactggagaatgaagagtaaacacaagcaaaagaagataaaatctattaaaagatcgagagacaccagacacaaatgggttaaaagaagaagaagaattaaaggttatactgttttgattacacacatagaggctaggaagaagaaaatgaattgagattacctgttagaaataggcggtttctggtttctgggagctgtccaatgtactgagtgaaccatcataaccacaacttacccccttaatagggactgacgtcctgggcagttctcttttgaaccgggatgtttctacattcatctttttaggctatttcttccaatctacctttaaaattatcttctaatctgtcactttgacacaatgggtcttttaaataaatctttacacagtactgaataattaagtaaatatagttattggcaaacaaagaaaaagaacctttttgttaaaatatttgggatactcgagataatataaaatgagtaatctcttatttttcttatgccaaatttaaaatctctttcttttctcaaaaataacgatctaacgatagccaaaaactcccttaaatatatttcaataaatcattgtttctgcacttaagtcttactgtaggacaatacaaatcaatgaggaaaatacgccagatggaagtgttaggtttttttctttgttcgggaacaaatactcgatccgcaatttaaaagtccgaagactcctcagcagagggtgagctgattgactctttggcttatcaagggcaaatcgcatttctgaaaagagcttgaagtggttttgtttgtgaggagagtttgctttgtcccccacactgaaaagtatacagcaaagcccgagcatagaaaatatcctgagcttaaatttctcattttattgccatcataacttttcctcttggaataaaatcctctattttatatgagtaggaggtaaaggtagggaaaggaaagtcaagtatctcaattgttacgctgattgcatccaaacagactttagaagtcagggtttgtaacgtggcaggagagctgtttgcgatgccctggaaagaaaagaaagccggttccaacagcgactctggggaatgcactctcggtccccctgccatgcttacttaagctaattgaaggtcttgcctttcagcagccgctgcactgggataccagacaaacagctccccttgatgccaggcaggcagggcccctcttcaggacatcattaaaagcacatgcacttgctccacatccattggcagatggtggcaagattcaagactcctaccctgaagtcaaggagaagccatcgcggtggaaaacatcctcgctttgaaaatccaacacgaaattaaagaactacacgagataaggagcctggagaacattagttggctgcaggggtgaagacagacacaaaaagcacagcaggtaagagctgggggttgttgccaacaaggaactgtcccgggtggcgcagagaaaaggatctcagaactggagccctgtccctttgagtcttccatgcgtgctcaagcttgtcatcttccataagcttcgagagaagggacgttgtcagagcattccttatcggtgcgactaatcctgttatcagcttggttataaatatttaatgttccctggcctttcggtgatggtgccccatcagattcaaggctgttaagaatccccaccagcaacctcgcccctccctgcggaaaaccgatgagaggcagggccaagccgaagcgatggcggcctatccggagagctgcgtggacactacggtgctggacttcgtcgcagacctgtccctggcctccccgagacgccctctcctctgcgacttcgcacccggggtctccttgggggacccagcccttgcgctccga

SEQ ID NO: 37782 - DNA, 2300 bp, Homo sapien
tgcatttgttaccatttttgtgccaatattgatacattattatcaagtaaagtctgtagtttacattagagttcagtctttgtgttgtacattctatgagtttccacaaatgtgtcatggcatttattgaggtattgctcctcacaagagggcattagctgcgggggtctgcctgcagaccttgacctaaaagatggatgaatgaaacgtacactgacacacagatattgctttgccagtactgctgagtgtccgactgcctacacaccgagagaggtttgtcactgccgctggccctgagtagttcacactccaggcatttatttcgtatacaattaacaacagaagctctgagtccacacacttttggataattaacatggttaagtgagtagttctatgaatgattaaagctcaggtaccgaggtttaaagtaaatatcactgggggcaatatccctgcccccccagaggccatctgacttaaaggttagttaacagaggtagggtaaacagacttaactggggaagcctctattgtccctagtatttactctgtaacttaatgctctaaggtaagaaccggctgtcttcggcctgttcagctattacaagctatgtaaccttttggccttccaaaaaggtttgtgactattccctataactttccctaatatttccctttaatatttctgccactatcctgagtgaatcccaacaacttatcttccattatagtatgatacggaatagttatcctctcctaaaaaccgcttgtgctccacctattcatttctcccttcttccctccgttccctgtaatccctggcaaccactgatctttttactgtttccgtagttttgcctttttaaagaagaagaatagagtatgtatccttttcaaattgacttctttcacttagcaatatgcatttaaggtttcgctatgtctttttatggtgagaacttatttatctttattactgaataatcttttattttatagctgtaccagtttgtttatctagaccatctggaaactaccagtgggaacactagacttctgatcataccagatagggaagttttattctgtcacatgtgtaaagggttgctgatgttaaacagcattgtatacacatcggcattatttgcagtttcataattcagaaaatgtgaatttttaatatttctgagtctcatttatatgctttgtatatattgaccctgagaagaaaaataagttttatgcaaagtctcatcttaaaatcatatagcacatacttttgttttagttttaaagcttctaataatactttcgtgatttagccaaaaaatagtcatggtcaatatttacatttaaagggtaagctgtcttctaatggaatgcttgcatcatgctaaattaaataattaaagaatgcatttttaagctttgaaatttggtctatttacagaaacgtaacatggatcccagttataaaacgcatatgaggtctttttagaagttatatggggtttgcttggtttcaatgtagctaaagagtaatactgtcctccctaaggaatcctgcagtggggagttgagatggttttttttcttggacagggtggcgggggcaggttagtttatccagttagaaagttaatgtgcccagttagacagttaatgtgcaattacttatataataaagtttgagctttctcaaaacccagtggtattctaaagtgatgttttggcatgacatgtggtaagttttaattgaggtaaactttttccatattaaattagaccattaatttgatgtttgttctttgaagattatttgaagcttgtaaagtttggttcaccttttaactttgtggatgtgttctttatgttacgctctttcttccttcttcttcccagggtatagttaataaagtgtcttctagccacattggctgtttagtacatgggtgtttcaatgcctccattcctaaacctgagcagttgtcagctgagcagtggcaaaccatggagataaacatgggtgatgaactagaatttgaagtatttcgtttagactcagatgctgctggagtattctgcattcggggaaaactaaatatcacaaggttagtttatcattacgtaattatcactaggtacttaatttctatttaattctgaattttaaagagaattttattttaattttaaagagaataagcctctctaaaaatacctgtttataggaatattcatgctttcaaaccataaagtcaatataaacaatactcttaagtaatctgtaacag

SEQ ID NO: 37783 - DNA, 2300 bp, Homo sapien
tttaaaactgaaaatgagaaaatcagtttcaaaatttaaacaagcaaacttctaactgcaactggacatacctagggttacaaaactactgcatgggtgcactacatttactagttgtgaaagattattactggaatatttgatttcaggtaacgttttgttttgatcaaattgtcatgatgtccagcttgttttttactaaattctttcttggccaaattgttttcattcaaatcacttacagccagtctagatccatcttgactgtaaggtgtagtcacctggagaggttttgattgaattgatctgtgatgtcatccgggcatcaggagttcttaaagctcctcaccttaggtgacttcattgtttagccaagtttgagcacattgaacaaaagggtcctgcacaggggtatcacaggactttgcaacaaaatgaaggtaaaagccattatgtttcccatttatggacttaaaagtgtctactattaggttttgggggcagtctcatcccactatcatctcatgctgagtttgcagttatttaaggaatattaaagaaaatgccttttatttatcttgtttgaccctcctatcatctctctaaggtagcagggcaagtattatttttcgtattttacaagtcagaaatcaggtttagagaggctaagaggctttttgcagtatttaggagatgagggagtatgttaatactcacatcactgctatacatttctcttggcacttatccagcataacctgttatatgtttatgtttagatcccacttccacttaggctgtgagctctttatcacttattatttattaactcactatcaggttattcattcaagatgtattggttgggtttttcttggtttcgtttctttggaggagggataaattgtggggggctactgtagtgaacaatacagatattatggtccccactttagtgagtgtaggaatctattgatggaacaggcaagcaaagacagttaataaaaaattaacataaaaaccaacatagatgggtaactacctaatccttatagagaaagaggagtggggtgcttgaaaactctttgcaaaggtatagaatgtaaaatctaagctagaaattcatacatgagtagaatttacccttgtgaaaaatgctattatattccctggtggaaggaacagcgtgagactgcacaaagagagacctgaaagtagatcaagcagcatgataatattagggtggggagtgtgacaaatgaagctgaagagagaggctgtgtgcccacgcagatcacaaaatggccttgtaacttataagccattttcatgagtttgtgttgtcctagagaaaatggggtgcctatgtagggcttaaacagggcacaacacgatcatatgtatttcagggaagatctggctgccccagagtgtcctcctgaccattgagctaggcttccacaggcagggagtcctgcggttttggcggcagggaaagagaatagtgtccaaatagaatgatatttccactttgggcaatacaggtcttcaggctgatttgatacttggggatacaaaagaggatccgaggctgacagcttggctgtatgattccctgatttagcagttgcataatgagaagagaagcgggacaggagagaactagtgggttcgttttcagatgcgttgcattacaattatcaggcctgcttaggattccgtgtactgcataaaatatactccataaatattttgattttttattgtacagtccaagcctgtaaaattctaccaaacccacctcactactggaaatgatcaaagtgagaacccccatttttaagctacctacttaatccaataagcctctgtgcgaaaacacacatttgcctgcccttaaaagagcagtcggttggctttcctgcgtgctcaatgcatttccgaggctctaagctcccgttctcgaagcgcgaaaacgcggttccccctgctggtcagggctgcgtaatgcagcgaaaagaggggaaattcctaggggcgtggtcgttggtggatggcgtaaaacgagcgccggggacatgggattgtgcttgcgtcaacggcgcgcgccgtgggaaccttgacaagcagcatggctgcaggttgctcagaggcgccgcggccagcggcggcttctgatgggtctctggtagggcaggctggcgtcctgccttgcctagagttgccgacttatgccgctgcttgtgcgctggtgaacagtcgctactcatgcctggtggccgggccgcaccaaaggcaca

SEQ ID NO: 37784 - DNA, 2300 bp, Homo sapien
gaggaaattttaggtgtatttggatttatcttaggaggatcattacatgatatttaaaaggcacaaaaaatatcctttgtgtcccaataaagataacgtaattttttttgaaaattttaacactgatgctcatgttttaaaactcaaaacagcagtttcctctatagaaaataattgtttttatttgtaaaaatatttgttttattgtgaattattgttagttacttatgtgaagatgagttgaatttcttccatatacaaaatcaaaagttttggatttctaaccaatgacccagaatcaatcaggattggtttttatcaggcatatgataaccaatcttatattccaagccatcacattcagagataaaatgttaaccgcaatatatgttttgtttgtttctttttctctgtgaaattcaactattgttaataccatccctgtgttctctacaaaagtttatttcccttcctatatgtctccattaatcaattcatttaatattacaacttgttgtcttcctaacagagaagcatttttttcctaaagaaaagaagtgactaaacacaaagcaaaacttcaacaacatatatgctgtattatttatgcatataaattggatcatttagatgacttctgtattatttaaattaaataaactttacatcattaaagccatacactaatgaggtactttagcatgtctttgaggatttaaaagcatagaaatgaatccactaattatcattcagtaccaatgtttatttgtactccaaatatcacaataactgaagctctttaaggcctaacaaattgtaactcttcttccttacatttgttttatttttaagagaaaaggattcaaatttttaaattatagaatataaacatatgaaaaaaattatagtgtagaattgagtttaaactctaaaagaagcccttaatcaaatttaagaaaactgaaactggcatttatgttacagaacttatgctataggtcaccgagcttttatgttctcatcatgggagctttaagaagcctctaatagaggcgcctgcactgcactgatgtatagaagtcaacattccctagtcttgtgttattgtaccctaacctcatcttcctttgttctattttccttcagtccatgtcgaactggagaacccagtttttgagaaagatgacccacacccaaaaccctctctttatcccacttcctagatctccttgatagaataccttgagatttttcataaaactagagtaatgaaaatggggtctaaacacagcgatccctagacatctagagtctcataggcatcaaaagacaatgcaaaaatatcccaggccaagctggactggcccctgccctaaagattctgatgaaagtagactgtcaaaaataattgtgcattaagccagacgtgttttttttttaaataatgcctgttctaatgcatacacatctcttgaattttgttgagaatatataatcccagctcagttgggtctagctatgcctcccagaacgtgtggtcacgctcctaggggaaagcaagggtctgtggctggagaggaacaaaatcaccgtggaggtgtggcccccatcaactgcttcttcgccctacgacacggaaggtgacaggctgtgatggccgggagtggacattccttgtaagcaggcttgaatctagctctcctagacaggggagttccttggtgaggggccttgagagtcctagtgacattaggagtctggctttttccacccccctggggtttccgtctttctttgctcactgctccccctaccccgcgtacaagctaaagaaagtttttctcagaatgagcccgcgttgacgtaggcatcgcctcccctctccgctggatagaagcccagaaaggagccacggggagaagcggaggtaggggtcgcctggatttctgttgctgcggtccgggggcggggcggatcaaaggccagccaagagtactggtcctggatctacaaatacattaggctttttcctcctccgtcaacctcctaaaccccaatgaggtcatagcaatgaaagagaatcagctcgagagaaaggaggaggaagaggacgacgacgagggagaagaaacccagacggaaagaggccatcagacaaggtcgctttttctggcgacaaagcaactgcaaggagcgtggtgctgaatatcatccgcccgctctgcctggggacccagagacttgcagaagcacttcgcattgccacgaaaacaaaggagaggtgacgaacgggagaggga

SEQ ID NO: 37785 - DNA, 2300 bp, Homo sapien
ctacagcgttagaaaaatcaaattcagaaattgtggagctactggtatttggatagtggtgtgcttcatatgattttttcttgatttatagtttttaccctataattatttgtctagcaaataatttggagggataattataataagaatcataaataatttgtcagtttgaactcttttttcttgatttctgtatttaggaggaaattttaggtgtatttggatttatcttaggaggatcattacatgatatttaaaaggcacaaaaaatatcctttgtgtcccaataaagataacgtaattttttttgaaaattttaacactgatgctcatgttttaaaactcaaaacagcagtttcctctatagaaaataattgtttttatttgtaaaaatatttgttttattgtgaattattgttagttacttatgtgaagatgagttgaatttcttccatatacaaaatcaaaagttttggatttctaaccaatgacccagaatcaatcaggattggtttttatcaggcatatgataaccaatcttatattccaagccatcacattcagagataaaatgttaaccgcaatatatgttttgtttgtttctttttctctgtgaaattcaactattgttaataccatccctgtgttctctacaaaagtttatttcccttcctatatgtctccattaatcaattcatttaatattacaacttgttgtcttcctaacagagaagcatttttttcctaaagaaaagaagtgactaaacacaaagcaaaacttcaacaacatatatgctgtattatttatgcatataaattggatcatttagatgacttctgtattatttaaattaaataaactttacatcattaaagccatacactaatgaggtactttagcatgtctttgaggatttaaaagcatagaaatgaatccactaattatcattcagtaccaatgtttatttgtactccaaatatcacaataactgaagctctttaaggcctaacaaattgtaactcttcttccttacatttgttttatttttaagagaaaaggattcaaatttttaaattatagaatataaacatatgaaaaaaattatagtgtagaattgagtttaaactctaaaagaagcccttaatcaaatttaagaaaactgaaactggcatttatgttacagaacttatgctataggtcaccgagcttttatgttctcatcatgggagctttaagaagcctctaatagaggcgcctgcactgcactgatgtatagaagtcaacattccctagtcttgtgttattgtaccctaacctcatcttcctttgttctattttccttcagtccatgtcgaactggagaacccagtttttgagaaagatgacccacacccaaaaccctctctttatcccacttcctagatctccttgatagaataccttgagatttttcataaaactagagtaatgaaaatggggtctaaacacagcgatccctagacatctagagtctcataggcatcaaaagacaatgcaaaaatatcccaggccaagctggactggcccctgccctaaagattctgatgaaagtagactgtcaaaaataattgtgcattaagccagacgtgttttttttttaaataatgcctgttctaatgcatacacatctcttgaattttgttgagaatatataatcccagctcagttgggtctagctatgcctcccagaacgtgtggtcacgctcctaggggaaagcaagggtctgtggctggagaggaacaaaatcaccgtggaggtgtggcccccatcaactgcttcttcgccctacgacacggaaggtgacaggctgtgatggccgggagtggacattccttgtaagcaggcttgaatctagctctcctagacaggggagttccttggtgaggggccttgagagtcctagtgacattaggagtctggctttttccacccccctggggtttccgtctttctttgctcactgctccccctaccccgcgtacaagctaaagaaagtttttctcagaatgagcccgcgttgacgtaggcatcgcctcccctctccgctggatagaagcccagaaaggagccacggggagaagcggaggtaggggtcgcctggatttctgttgctgcggtccgggggcggggcggatcaaaggccagccaagagtactggtcctggatctacaaatacattaggctttttcctcctccgtcaacctcctaaaccccaatgaggtcatagcaatgaaagagaatcagctcgagagaaaggag

SEQ ID NO: 37786 - DNA, 2300 bp, Homo sapien
tatgacatcaaataagtccatgtgtaattggtattccgttttatcttaaatcttaagaggctttttacatcttttttttaaaaacgattttcctctcctttctacttccacactactccaatctattttttttctttatagatgatgtggaaacctgcctatgattttctgtatacctggagtgctcactatggaaataactacagagatgtgttacaagaccttcagtcagctttggacagaatgaaaaaccctgtgactaaacactggagagaattaactggagttttaatactagtaaattctttggaggttttgagagtaactgcattctccacttctgaggaagtatagaaacaaagcgtgtgtttttgatgggagggaaaatgaggtaatggtgtgtgtgtgtgtgtgtctgtgtgtgtctgtgtgtgtctctgtgtgtctgtgtgtgtgtgtctgtgtgtgtgtgtctgtgtgtgtgtgtgtgtgtgtgtaggaaagaaagaatctcagaaaagcattatattaattttcttcatgctcaaaaccagtttttttttcctgatgaaagcacagcctaactgataaccaagatgggttttatcctcaaatatgtatttttgtgtatgtttcaaatacaagtattaggctgctttgttcttagaaaggaaagaaaaaagaaaagtgccctctctctctttcagtgttattttaaatttactaagtcaaagctgtttgaataattacatcacacagatatctgggtaaactagagactatcaacatgatcaaggcagtgttcccaggaggcagctagaaagaggggaagcaagcacacaccctgtggccagtcacggctgcccgctttccacacctgacctcttcagttcatcagtggggttcaccagcatcacccccatttttcatggggagaaactcagaagtggagagaacgtctgaggctacatagccagtacaaagtaggttttctgcttgaaaaacctgtttctatttctttttaaaaaatcatactgcataacagaatagtaaaaacaaaatgcgtgttaagacttacagggaaacagttgccgtttcattttaagtgagacttgctactctttttcatcgtctcttgaaagactgacagaaggaaaatatgacttatcagaaatctgttgtctgcatgcatggacctagtgttttcatcagctcccttcagcatcttgggacctctctaatcctgcctaatttgggactttttctgcaggattgtaatgtaaaatagttctttagctcttggagatttttaataatacgagttattaaaaaccaccaccaccagaaacttgattaacttgattaccctgttgagtagagaggtcttaaccaccgaaaacactgatatctttatgttggcatgctcatgcaaacacatgtgtgtgtgtgtgtgtgtgtgtgtgtgtgtgtgtgtaccacagtgttttataaagcacagcctaattgattatataggacaaaaattgtataggaccctgggtcagtataaatgctaatggctgacaaagttcacaaagagatgtattttgcttactcctctgttcaatcctctggttgcctgccagtgtttatgtgtgtatttggacagacattcatttattgtcattcagtcaataggtagagtatatgtgtctattttttggcaggcatatagatgcttgaggctaatgggaaaaaaccagcatgaactctgactttagtagtgctaagtaatagataattttaaaaaatgacaccgttaaatagaaaatggcatgcatactaacagttgcaatggagaggctgtgatgctacgagatataaacgtagagatgccatcatgtgaaactggaagtgggggtgggtcagggaaatttgttcttggaaagaaataatgaacctcaaggaagagtaggcattgtcctggtgtggtggggtgtaagcggtgatcccacaaagcactgaagctcttagatgggtgggagctgaataggtgcagatagcaggggtgaaggagtgaaaggataaaagattcaaggttgagatgaggatggagcaagaagaagccacattagggccattaaggctgctagaatttagaaagaaaacacacagcctcaaagaaatgtgggtaagccaaagaaggattttgttttgggaacctgaataaaagatgtccatttggctaaaaagtaaaagcagaatctttttagggcttttaatatacccaccctgggatatttggtatgctggcaatggta

SEQ ID NO: 37787 - DNA, 2300 bp, Homo sapien
ttttctctgccagcctgtatatgtatgcttacaaaaaatacttatctatttactttgtaggtggaaaaatgctaatcactgaaagaaaacattttcggtcaggaagaattgcacaaagtatgtctgaagcaaatttgattgacatggaagctggaaaactctcaaaaagttgcaatattacaggtatgggaatttataactgttgtgatttgtccatgtaagtatatgaaattcatcaccaataattgttgaaggtctacctctgaaaatgctggaagatgaaaagaattataaaatcttgtttttatcatagaaatagttaaaaagatgtgcaaaataaaatagcacagccaacagattatgataaatattataaaaaggaaaaatgttgttaataaatgagtgttatatgcaataactataatgaatttgggggtaaaaaggctctctgaaggttgattgacctaggaaatcttcatggagcatcaaaaaattaacctgatcctcagaggaaaagtaagttttaagagagttaggggtaattgtattaaagaaaagtgtgaatataagagaaatgccacctttatttttcaaaatccgtcttctaatttttagcatataacacttaaaaacatttcaattaaggtaatgtttctatgtatattaaacaaaagaaattctgacagtttgcttgaattattttttcagtagaacttctgaaaatttggttggctcttctgcctgtctctaaaagcagcactagcttcacaaagtctacagagtctttataattatttactaagaaatgaccaagtacgagttgctctacacaaacaaaaaatggcttcaatgttgtgagatatctagaaattcttataatagaaatgtaaatattttaatgttacaaattcttaagacacttactttccaaaataataatgcttcaatttctagtggtaaaattattatttgccattgcaagcttgagtgcaatgaattcatttgatcaataaaaccaatggtggtctaaattttcaatgttcattttatgaattccttttcctgaaaaatgttaataacatttcaatacaaaattatagaattatctaataaattaatgactttctaacttagcatattgttttaaacgttattttaaatattaacagatgtatttgatattttctacatattcaatattatctgaaaaggaaaatattaaattaatattctgaatgtaatgaaaccaacaattcagtgcttagaaaaatatggataattgaataactgatttattctatttgaccagaaatttgcttttgtaaacatgatacataaaataataaagcataagcacatgctagtctgagtcattttcaagaaaatgtgttaaatatattattaggtcatattaaatatttatttgtttagtttataaatcatgatgtcttaaaataacattacatatgttcaaaaaataacctggtagaaaaaatattcttctctcattacatataaatttgagcaaatttaacattgagtttatgttagctagtagactagagatcagaaagaaaaatgaaaagtaagtcctgaatttttaagctatgggaaaaattaatcttgattgtaactcacagtgccaccttatctttgttttgctttgtctttccttaaataacaagaatgccaggacccagacttgcttcacaattggccggatgctttcacccttcgtggtaataatgcttccaaagttgcaaatccattctggaatcaactgtctgcttctaacccatttttggatgacataactcaactaagaaataacaggaagagaaataatatttccatcttaaaggaagatccttttcttttctgtagagaaatagaaaatggaaattcttttgattcctccggtgatgaacttgatgtgcatcagttacttaggcagacttcctcaagaaattctggaagatctaaaagtgtttcagaacttctggacattttagacgacacagcacatgcccatcagagtatacataactctgaccagatcctactacacgacttagagtggcttaaaaatgatcgggaggcttataaaatggcttggttaagtcaacgccagctggcccgctcctgccttgatttgaatacaattagtcagagccctggatgggcccagacacaacttgcggaggtcaccatagcttgcaaagtaaaccatcaaggagggtcagtacaattacctgaatcagacatcactgttcatgtgccccaaggtcatgtggctgtgg

SEQ ID NO: 37788 - DNA, 2300 bp, Homo sapien
tgagggaggagatcagtggttaagaactatttaaatagtccaaagtgcacagtttaatctttagagcccgtagattagataataggagaagggatccataaatgctggagctgataatcaaaaatcatagatagaggtagggccaggtttccaggaccatgggactgaggactctagggagcccagtccttggggagctgttagaaaggcaagtgcacagcagggattggagctggtaaacagtgagtgctgacccactagggctttcatttcgggtactgtcaagggttcaattgctagatttaatgctttgcctttctgcaaataaaggctgtgggagccacaccagaccagactgcagggggattctgataacagtactcatgcatggcatttaggtagctttttaaatgtaaatgttttccgggagacataaagatggcattaggcattaacacacacacaccttagagttaacatctcagttattttatgtgttgattgtttatcacaaacatctacttgtacattaatgagttaatgaagtagggatacaatgaggccttgccttcaaataggaatgtaagactgcataggtacacacacacccatgtaaaccaatgaaatgagatatacaatgtgttatgagaggagcagatgcaatattatgaaattgattaggaggaagagaataactcagattaagacaaactgagaaggacatcttgaagagtgtttttcattgagctttggaaaaaatgaaatctctgaacatttcaagatgagcaaaaatggtttcagggaggagaaatgccatgcagaatgccctctgtagggtttggggaaattaagaaccatttgttttggaaataatataatgacataaaggaaagctaggttctagtagagagttgaggaacctgtgacaaaaagaaacagaacagctcagtttggattgtgggatgagtcaaggggaaacttcaaagggaatctgggtggattaggtgatctggcagcatgaagccagggatgcatcagggaggaaggggtggttagaacagtaggagagaaagtgcagaaaagggaaaggaaactttttctttgtcaccattctgccatctacttacattagatgaatccttctattatgtttctgaacccagacccagccaggacttgtctctattcattttctgggctgtgtctaacaggagataataggctagagagagatgctgtatgaacaaatagagaaacacatttgttttaaacattctctgttgctgatgttggaaaaaaatgtgaaacaattattgcacatttcatttcactaagttttaccttttttcccctttcccctaattttctctttcttgaattttgaacaaaatacacagaaggaaaacacaaaacacagaaatggaaagtaaaatggaagaaaatatcaagaaaactttattcttgcttatattttaaaaggcacattttaaagtgttatcttaaaaatccagagcattttagaagatgaaatgccaaaaggtctccattatgtctatatgtctatgtctttgagtgacaatcacagtgctgatgtagagggaaagggggaactagttagacactgtcactcacctgggaaggctttattcacctgttccacagggcagtgaggcaccttcagctctgaatcaccgaaagagaatctggtggggcaagttccagctgcatgaggatttgcttgcataaatattttttacttattgctaacactgagggtgccttcttactccctggcaaacattaaaccacttttatttcctttcatggaaataagattatatttacagatggttcttagatatactcacctgatttttttttaattgcttttccacctgcttcccctttcttcttagggtgaaactctagccatacgccctcttctggtttcgggtgaggagcctgaattgtgggtatcgtagttctcttgccttttggggtttctagttgggcagctttggagccacagtggtagaacttcaagtcccaggtggctcaggaagcaggggtgcagttgcctgcctgcatacggagcaaggcatgtttgaagagtacccgggtttggtagagtgacttctattcactaaaaccatgtgtctgaactgaagaagcttgggctcacttccacaaatgtaagtgctgattttttaaaaataatattcctttcactattgatatgtgctacacactaggaagttgtataatttccagaaaaatgtaacaaaccagctgcttaacaa

SEQ ID NO: 37789 - DNA, 2300 bp, Homo sapien
gaaagaaaacttcatattacttactaaaagggaaaatgactattagttctataaaagaaatctattttttttaaattaatgaaaatgaaattacatcattaaatgttggcagaaattcatttactctttgttagaaaggctgattggaaaataccatttaaggccaggcacagtggctcacacctgtaatcccagcattttgggaagctgaggtgagtggatcacctgaggtcaggagctcgagaccagcctgcacaacgtggcaaaacccaatctctactaaaaatacaaaaacttagccaggcgtggtggcgggcgcctgtaatcccagctgcttgggaggctgaggcaggagaatcacttgaacccggggggcggaggttgcagtgagctgagattgcaccactgcactccagcctgggcgacaagagtgaaactccatctcaaaaaaaaaaaaataccatttaagacacagattagcatcaacctaagcctttctccggaagttaattagagggggtaacagataattaaaaatttttttaaatcatgcgacaatatgatttcatgcttcatcctcatacaaccaaaatgttatttgtgaatgagtcccacactttgggaagcactagactatgatatacaattcaaactcagtagcctgctatgatcttactcccaattcccttttgatctgatttcctgccactccacaagccatatttacaactctattcctgctaaaggacgtatcatttggccctgggcattctccattgtgtctactgagaaacctattaggcctctgaagaggttcttgatgtaaagttttcagaccccacccaggcacctttctccttagtatgagcaaaggttatcaccttgaccaaacgctagcaggctcctctgagttctcttgttgactaggactcaagcttacctttctaggttgaacaaacactaaggcagtttctaacagctcaacattgtttacttaggatgagcctatcccccacttaaagtccaagcctgataaagaatttcctgttgtcccagccaacacctggagaccagcatcccgctttccagtctctgtgggaggggaggagccgaacttcaataaacaccagtaaacaaagctagatgggtttcacgtggactaacctcgtttctggatttttgtaatttttcattttcctgaaaaactatggaatcccaactcaccttctccctgctccttcattctcccattaaaatacctaatcacctctgtacaggtcattgttgagcttagttcacgttgcactcttttccctattgtaatactatatattaattcttaccattttatttagtgtccagcattgtttatctttcgcagcatttcatagctacttctaatgcactatattctcattattcattgaactatcactctcacccgctatgctgtgttctgttttgtactccgagtcctgaggtcagccccagtattgggatcactcctgtaatcccagcactttgggaggccgaggagggtggatcacgaggtcaggagatcgagaccatcctggtgaacacggtgaaaccccgtctctactgaaaatacaaaaaaaagttagccgggcttggtggcgggcgcctgtagtcccagctactcgggagcctgaggcaggagaatggcgtgaacccgggaggcggagcttgcagtgagccgagatggcgccactgcactccagcctgggcgacagagcgagactccctctccaaaaaaaaagaaagggggaactaagttacctgactgctatgaacagggtcatgaggagagactctaacacattgctttagttttgtttcaacttccaaatcataagagggacattacacattgcattcaattctatagtgtaaaaataaaataaaaatatcagcttactttccttctttcttagtttgtcggtatcatttttaattctaatgttttgttaaacctcacaccttcctcttttgaatttctacttccttttaaaatggcaattgcctttttattttcatatcttttgtcttatattagtaagagcatttctctaattataacatggggaatttacatgtgggttacaggggagactagatttttacatcaaaattaattttgttttatttgctcctaatttataggtgaaaatgttattttacatggaaacctattttgttccataaaactaaataaaccataacccagaagtgcaatgagacacacacagcatgaccacattatttctgaaagctgaagagtt

SEQ ID NO: 37790 - DNA, 2300 bp, Homo sapien
tggaatggtgatatgatagacactttaaagtgtattgacatgtccttatgggaattagggatttaattttttttttttttgattgaagcactgcatgtctcaagggtggctgcattcagtaggtctgtgacataacccctggaaaatacccaggctgcccaatggaagagtcactaatcagatattgaatatgatatttttgtgttcaaattttcaagtcctcacacccatcctaactaatttttaggcctttcctttaagacaaccaaaaaacaaaactataactgttcaaacttggaactaaggaaaggaaataaatattaaagcggagctggatttatttctatttatttagagtacatcacctccagtagaattatgttgctaaggttgggatcacggctttggtctcgcgaagggacctgctttgcagatccagggctcgtttaattttccagctgggttcctgctttgcttaactaatcctgtgcaccccgttgtgcggtccacacctgaaagggggagtttcgatgttgtggtttattaaccaggtactttccattcactcagtcaacagaaagaaagagagagaccgcgcctcctactttttttttttttttttttttaactacaaataaggagacggaaactattaaataagaaggggggaaactcccgcatatttcaccttgacctggctggactggtctgctgcctctaagaggcgggtgttgtattaaaatgagaggtcaaactcctcgaatgggaatcgctcctgcccctagagggaaaagagaaccatcaccgtgttaaactggaaacactgccttgtttccaatgcgggggactgagttccctccctcgacttagcgtggtaatgacaggacccgaggaggcgcgctgcttccgggcagttgcccagcataacacccgcaccctacttgcacctaaatttctgagctgcaagcaggcagaagtgccttccactttctctccttagctcccctctccccgctttgctgctgtctgtaactttttgttccgtttactgggaaggtgacgcttaagatcaaaagacccactgtaacttgcaaaagcccagagccaccaccagacgctggggaaaaacagggctgtccagtccagggttaaggttttgagcagagaaggagcagcgagaaatctcggccagtcgctccgggaacagcccctgcagactggtccaactctccaaaggctagggacaccggggcagccttgtggtggggtagaggacgagctcctaactgcaagcaaagtgctgagtagagggcgttgggggcaggggaggtcccttgactccactttgtatgcagcagctgcggggcagtgagtatctccgaacaaagcggcgagcagcgcgggggtgagagattggggtttgctcgcagctgccgctggcgctgagcgagtctcccaccacccccgcgagcgttggggtgcaaggattcgggggaggagggagaagggaacgaggcgtgccattcctgttgcgcggctacgcttcaggagttcttgtgaacgatgggaatggcaactatcagagccaagggggaaaagaaagagctggagtgagcaaaacaaagagcgagtgtgggccgcggtgacttcatgcctcaccaatgtcccgcccacgctgctccgagctgttactgctgctcctgcccgggctgcagccgcgcctgcgggcagccgaggcgaggcgctccggtagcgtggggaggtttcctagcaactctctgccctgagtgcacccggctacccgcaggtctggagccccccggggggccagagcaggaccacccctctcccgcccatcgccggcctcgcctctctcgcatcctagccgtgtgcaccccagagcgcgccagcaactcgggctctggactgcgggacgcctgagccgcgcactgaggcgaaaaggacaagggcacgcagcccccgccccgcgaagccgggctccggcacctcgcggaacctcccctcctgcgctcgcagccgcaggccccactccccgccagggagggagcggcgatgcctcgctctgtgcctgcgggtgtcggcgggtgcttctagggcgctcccagagccgcctccccctgttgctggcatcccgagcttcctcccttgccagccaggacgctgccgacttgtctttgcccgctgctccgcagacggggctgcaaagctgcaactaatggtgttggcctccctgcccacctgtggaagcaactgcgctgattgatgcgccacagactttt

SEQ ID NO: 37791 - DNA, 2300 bp, Homo sapien
taatgacaggacccgaggaggcgcgctgcttccgggcagttgcccagcataacacccgcaccctacttgcacctaaatttctgagctgcaagcaggcagaagtgccttccactttctctccttagctcccctctccccgctttgctgctgtctgtaactttttgttccgtttactgggaaggtgacgcttaagatcaaaagacccactgtaacttgcaaaagcccagagccaccaccagacgctggggaaaaacagggctgtccagtccagggttaaggttttgagcagagaaggagcagcgagaaatctcggccagtcgctccgggaacagcccctgcagactggtccaactctccaaaggctagggacaccggggcagccttgtggtggggtagaggacgagctcctaactgcaagcaaagtgctgagtagagggcgttgggggcaggggaggtcccttgactccactttgtatgcagcagctgcggggcagtgagtatctccgaacaaagcggcgagcagcgcgggggtgagagattggggtttgctcgcagctgccgctggcgctgagcgagtctcccaccacccccgcgagcgttggggtgcaaggattcgggggaggagggagaagggaacgaggcgtgccattcctgttgcgcggctacgcttcaggagttcttgtgaacgatgggaatggcaactatcagagccaagggggaaaagaaagagctggagtgagcaaaacaaagagcgagtgtgggccgcggtgacttcatgcctcaccaatgtcccgcccacgctgctccgagctgttactgctgctcctgcccgggctgcagccgcgcctgcgggcagccgaggcgaggcgctccggtagcgtggggaggtttcctagcaactctctgccctgagtgcacccggctacccgcaggtctggagccccccggggggccagagcaggaccacccctctcccgcccatcgccggcctcgcctctctcgcatcctagccgtgtgcaccccagagcgcgccagcaactcgggctctggactgcgggacgcctgagccgcgcactgaggcgaaaaggacaagggcacgcagcccccgccccgcgaagccgggctccggcacctcgcggaacctcccctcctgcgctcgcagccgcaggccccactccccgccagggagggagcggcgatgcctcgctctgtgcctgcgggtgtcggcgggtgcttctagggcgctcccagagccgcctccccctgttgctggcatcccgagcttcctcccttgccagccaggacgctgccgacttgtctttgcccgctgctccgcagacggggctgcaaagctgcaactaatggtgttggcctccctgcccacctgtggaagcaactgcgctgattgatgcgccacagacttttttcccctcgacctcgccggcgtcccctcccacagatccagcatcacccagtgaatgtacattagggtggtttcccccccagcttcgggctttgtttgggtttgattgtgtttggctcttcgctaagctgatttatgcagcagaagccccaccggctggagagaaacaaaagctcttttctttgtcccggagcaggctgcggagcccttgcagagccctctctccagtcgccgccggggcccttggccgtcgaaggaggtgcttctcgcggagaccgcgggacccgccgtgccgagccgggagggccgcaggggccctgagatgccgagcggtgcccgggcccgcttacctgcaccgcttgctccgagccgcggggtccgcctgctaggcctgcggaaaacgtcctagcgacactcggcccgcgggccccgaggtgcgcccgggaggcgcgagcccgcgtccggaaggcagtcaggcggcgggcgcggggcgggctgttttgcattatgtgcggctcggccctggctttttttaccgctgcatttgtctgcctgcaaaacgaccggcgaggtcccgcctcgttcctctgggcagcctgggtgttttcacttgttcttggactgggccaaggtggtaagttgttttgttttgttttgttttcttctcttccccaaaggtcttgggctggcacgaagagctgcccggccagagcatcccggccaggtaagttgcggtcatcagagaacttcaagggggcgggtgcggggcagcgtcctccagcacagatggcctagaggccaggtgtcaagcatttctgccctggagcgacagcaaggactaattatcagaggagacactctgtgttactcctaggtg

SEQ ID NO: 37792 - DNA, 2300 bp, Homo sapien
tactataggaataattatctttagtaagtgaattcagaaaataatgagtattattccgcttctgctactctctcactttaacagttatccaagcatgtcttatataaaatcagctcctattatgtggaatatattttttaggtggatagacttgctatgcgaataggcaatagttatgaattcacagctctgaaggcagtatccccgctgttcccttttgtggaactgttgtgttaattacaaaattgtaaaaggattattaaatgggacatataatggagaaaagggcatgtgaaatcaggtaaacctgtctagtcaccaatagtgatattttcccttttctctctgaaatcttacctcttagtatttgaagacaaatttttaaaaatacagagataaagtctaaaaaaataccattagtctacttagaattcaaattctgcctgacttaaatgttcagaacattattactacacagagtcattttttaactgtggttgtggtttattacagatggtcatctcattgaccagtaaggaattaagtgcctattccaaagctggggctgtggcagaagaagtcttgtcatcaatccgaacagtcatagcctttagggcccaggagaaagaacttcaaaggtctttccttttaaatataacaagatatgcttggttttattttccccagtggctactaagttgtgttctgtttttgtaaggtatacacagaatctcaaagatgcaaaggattttggcataaaaaggactatagcttcaaaagtgtctcttggtgctgtgtacttctttatgaatggaacctatggacttgctttttggtatggaacctccttgattcttaatggagaacctggatataccatcgggactgttcttgctgtaagtcttgtttgagaacaaggtgtcaggcctggataatctttccttacctagtttagccaaaattcctctttgaagataaatattcaaagatggatgtttttattaaacaaatatttgtttccctcaaattatctgtatacacctttaaattatagttatgaattgacagcatttattcatccagcatgttttagtgtcctcgctgtgtcaagcatctgcattccgcttttggaagaatcataattgaattccccactgggaaatacactgagttttgttaatctagcagtgaaaaaggccattctcttgtgagacttttcctttcatctgggctgagatcagacggagttctgcattcaccttgctaaatgtcttctctctggaaatggtctgtagagtttacactcacctcctcttcctctgtcctttcagcatgtagtaatttaaaaaacagactacatatagctctgtccagtatcacagtttggagacttttaaattcttatgggttatgtgttaaataataatttattcagttatcctcttaagttacaataaacagatcagttcaggattaagaaacatttgtcttgaggaaccaaaatgatctgctctttatactttgatccttgtttggcctttccattcttacagatttctcttctttccattaaattcatcttttgaatttgaggcattcataattaagacttttagctattcatttatttcatataaagtgaaatgtgagcatgaacgatttttcactcatccttgctcctcaatttatgtgtggctgggtatctggcttactaagcctaagcatcctcatctatatgataggagtaagagctcctagcttgagggattcttttcttatttgactttttgcagagatgagtctgtcttaaaatggacagctgtcccctaatacaaaaattcaaaaacggtttgagtgaaaacagtacaatgtctctgagccaataaaatctactgaatttttctttttaaagttcaaggggtcacccaacaaggaggggagtgcaactcaccatggggtttatacatggtcagcacacttcagttagcagatttttctggtcacacatcccagcatgtgataaccacaagactatgagataatcaaaagttgttccttattaggaaaaggccaaggatacttggattaatctgtgtttctattgcttctcggccttttggctaagatcaagtgtaatctgtgttcttttttatttggtcatatcttccattctttcttacctaattcctctaatatctctctgtgagcctaaaccaataattatatattacattctattgtctttcttatataactgcagaaagataaatatcactttgtttgttcctgtaggttttctt

SEQ ID NO: 37793 - DNA, 2300 bp, Homo sapien
ctgaatgtgtataagtatttatgtctagaagcatgtagattttaactttatctaagctttttctaatgatcctgttttcatgatcagagcaaaaaatatatttcaaactgtggtcaattctgtctttccaggtaaataggggccctcatttttttttaatcccagcactaaagaactttatgtttcagcttattgcttaagtatcatacatcccactgaaagatgatccataaaatgtgtagttcttataaaagttataaagataattctacatatttgaaggtattttaaaaatttattttacctcatactatgactccttttctatcttgatattgcctcttagatctttactgagtgaaaccaatttataatgtgcaaaaatgggaatgagagaaatcgtatccaaagtatacactttaatgaatatccataatcattcaactcaacactactatgatagagtggctaagagtgctggccttccgtcagtgtgggaaaggggtagggctggggtttgcagccccgatattatgacacccagtgtggtggcagccccgtgcagggaagcagagccagagcagggtgaggagggtgttcgtgcagggaagaggcaggagacatgagagcagatgggttacccatggagagattaatcacatagatcaatctattaaagacaatgggagccagttttctcccttgtgaagaggggtataacaaatatggaaaaggagaaaactggaaataaccttacaatgttgacttggaattggaggtattgatatgactcatgagtttcaagaaatatacagaaacaaatatagatgtaaatgtgtgtttgtacctatcaatacacacacacacacacacacacacacacacattctctagtctgaccactgaattctagtaataatgagtacaaccagcaccatatcttgactgctaaataaaattctccactaaaagaacccagggatctttggagaaatgactaattccaaaagtagggcagagacagtacaagatgaaactggaaaatcattttgtgtcagaaagtaaggacatattccaaaactgataggtatatgtcaaaggacaaagccaacgtgaagggacttccactggctacatctgggataatttgagtcaaaataaatgattatagtaacaggttataaacaactgaagaaatttaaaagtcattagttcatactacaataaataagttgaaagtttgatgagaaattggattttgacatagcttcaaagtgcttcaagacatttattaattacaaagggagaaagaacaacttcatagcggagaaacctggaagaaaccatcttaattaattattacaagtgaacaatgcctggaatgggaccaatcaaaactgcgtgccacttgataggatgcaatgagaagaacacagcatcacttctctaagatgcataatttgaatctaattgtgaggaaatatcagataagctaaaattgagaaatttctaccagatatctggctcgcgatcttcaaaaaagtcaaggtcatgaacatcaagttaagaatgaagaggccaggcgcggtggctcacgcctgtaatcccagcagtttgggaggccgagacgggcggatcacgaggtcaggagatcgagaccatcctggctaacacggtgaaaccccgtctctactaaaaatacaaaaattagccgggcatggtggtgcgcgcctgtagtcccagctacacgggaggctgaggcaggagaatggcgtgaacccgggaggcggagcttgcagtgagtcgagatcgcgccactgcactccagcctgggcgacagagcgaaactctgcctcaaaaaaaaaaaaaaaaaaaaaaaagaatgaagaattattccatattaaaggagactaaagaggcctgacacctaaatgaaatgtgtgattccaatgtagatatcctttcactataaaatacattattgagacaactgataaaacttgaaggaagtctaagcattaaacgatagttatgtagtttcctgattttgatcatggtattttggataagagagagaatgttcttgtttatgaaacatcatctctaagtatgcagggatgatagagtatcaggtcagccacttaatcccaagtgattcagggaacaaagagttctttatcctccagttacaagcgtatggctgtgggcaggttattttgtctgactacttttgtttcctcatctattgtacgggactagtgatagtatccatctctttgcattgttatgagattaaataa

SEQ ID NO: 37794 - DNA, 2300 bp, Homo sapien
gagactaaagaggcctgacacctaaatgaaatgtgtgattccaatgtagatatcctttcactataaaatacattattgagacaactgataaaacttgaaggaagtctaagcattaaacgatagttatgtagtttcctgattttgatcatggtattttggataagagagagaatgttcttgtttatgaaacatcatctctaagtatgcagggatgatagagtatcaggtcagccacttaatcccaagtgattcagggaacaaagagttctttatcctccagttacaagcgtatggctgtgggcaggttattttgtctgactacttttgtttcctcatctattgtacgggactagtgatagtatccatctctttgcattgttatgagattaaataagttggtaaaggtaaagaggttatttagtgcctagttaaagttggctagtttttgagtacctttatatattagctccaactataatatgagaattatggttactatttatttttgacctttctcctattttggcccacttttagtgtgtcttcccttctgccctactgtttcctgtccatgttggtttcctttccatagcaactcttgcctctccaacacaaagcttcatgctccaaaaagcactgagtcagacagcatgggttattccttgcatgattataatatcttcaccaatagaaagagataatttgtgtgaacggtaaatgtacaaaaaatatacaaaaatctcatttttacaggttccataatgcaaattttttccattcaaataggagttaagaattcactttagaacatttttgaaggtgatttagattctattgtagtaaatacctaagctaaagtatagcattctcttcctttttactctccgtgaaatagaatatgtaaaaccttctaaaagaatttatatgcataactcaagccatcttttccaaaaacttaaattttaagtacatgtcaattatgcatgtatgtaaaactggtactttgatgctagtatttattaaaatattgattttgtataaaattcctagcaaatgtgattacaactttataaataggaaatagtaaaaaatgcttaactaaagatagactctttctttagttttttgttaatagtaactatgattctgtcattttcaaacatcagctttattaccaagaacttatctgtaagttagggttgaagagatggcagggtgttagtatctatgtttatgcacaaatgagttgttgtattattgctgggtgtttgggtgtaaagaaacaagaagaatgtgggtatgtacctatcattgagaagacaaaggaaatcctgtaacttcagctttcaacacactcaacttgcactgggctgtaaaatcctgctaaactatttaaggagaggtctcagagccacataaaagtctccctttaaggaggtagtatttaatttcagattgtctgttcctatcatgcttctatacagtcttctatggtattccactaaactaaaatccagttcatttggacatctcaatattggacatcaagacataaaaataaagtataatatttccttagtttagggcattttgaggcaggcagatcacctgaggtcaggagtttgagaccagcttggccaacatggcgaaaccccatctctactaaaaatataaaaaaattagctgggcttggtggcggttgcctgtaatcccagctgctccagaggctgaggcaagagaatcgcttgaacccaggagtcggaggttgcagtgagccgagattgcgccactgcactccagcctgggtgacagagtgggactccatcccggaaaaaaaaataaaataagtaaataaataaaaatatgtatcttatttaatctcaaagtataaattcaaggcataaatttaagtataaattctttttttaaaaagtctaccttgttttgcaaggaactataataggaactcttgtaaatgtaaagttaattgagttttttcccccaaaatatgtctgattataggcaacaggttccaggattggcgtcttaacacaaaatgcaactaacatgggactttcagttatcatttcctttatatatggatgggagatgacattcctgattctgagtattgctccagtacttgccgtgacaggaatgattgaaaccgcagcaatgactggatttgccaacaaagataagcaagaacttaagcatgctggaaaggtaaaatgaagactgttatcaccatcgtaacatttaaagagaaaaacagtcagaactttatgatatgttaacta

SEQ ID NO: 37795 - DNA, 2300 bp, Homo sapien
ttaattctcttttatttgttaaacggagtaccctccttcccccaccccttcctccttctgggctggcctgtcacgccttctcaacacgctaaaatcattcagagcggcttgcagggagaaacacgacatttatggtaagcgtcagccctcagagaaagaaagcagttcattaatttacttcacacttacttcaaagtatgagagtataccttacccccttaatcaatagatatgatgtacagtcaatatccccacagcgtttaaaaaagggtcagaaatgtacactctcacaccacaaacatcagtttcaactctgctcaatgaaatttacacgatacaacttgacttcgaaattttgtaaaccctaggaagattttttgacatccctagaagctgtgaaatccttgaggggggttcaaacacaacagtaaaataaaaatgttttcccagtcaaaacaaaacagttcgcccagctagtcacattttagttaattccattttaaaattagacttctgagagcacttgtaactggttaaaaatatgaactgtttttataacttatgaatattcaatagggctacaaagactggactttttgctacactggtgttgtgctttctgcggtttaagttcccttgtggtggcagtgaaattgtaatggcatttctgaaggcaactaataacacaaatggcaagcaaatgactaaaccccaccgaatttgaactaagtgtatctattaacatgcacacacactcatagacagatctctggcccaatcgccattagacactgacgcctggataaatgtccaagatttgtcaaaagctcctctctattcttagataaatagaacccatatatttcgatcaaagtcctgattcttttctcagaaagaggcagtgaggttttctgtgaaaatttctaaattccgtaaaacgctcttcaatttcttacccaaagaaaaaacgaccctcgcttactctcttctctatctaatccttttgtattgaaatttactcaacaccacgggacacacacacctcctcccctagagtgagacgtgcacttctaaagcagaattccacctcagggaaaaaaaaaaaaaaaaaaaaaaaaaaagccacggcatcaaagaaacaactcatgggcgcgcaggcgcgcatccacgtcccaacgcatccctaaaaataacccttagcctctcaacctttctactatttcgttggagagccgggaaagaaaaggtgggtttaaagatcttcttcaaaaatgtagtgacgctgtttaccaagttaagaaaaaaaaatcactcaagattttaggtacaaggagccaaaggaagttggcgacaggggcagcgtttgtgaatatttattcactcagcctccatcaacttagtcggtttctctcttcagctcgacagtctctctcttacaaacacacactttattgcattgttcccattccccactaccagctttggtgcgcgcacacaacacaagcgcccacacacacccttccctcttctctgtcgcacaaatacacatgttcacagccctccttctcccccaacaccaaacacactcaccccccacccagttgagtccctcttccctccctaggtttgtcagttacactaccgtacactcacacccttcccaacacttaactgctctgtccctctaccccgctttgtcgcacacgcagttatcttatcacacaaccctcccttttctgcactctctccactccccgcctttaccacactgtcactgttacggtgtcacacccccatcccccctccctccagtctccgcactgtcctctcctacgcctggtcacactcgcacacagttacattgttacacacacactcatacacgcgagcgcgcgctttgcgctttgtaacacacgcagccgcccccgccccctccgctcccactcccccttccaccacggcggcaggcggcggcgccgatgacctcacggcgcgcgcgccgcgcggcccggcgaggccgcagattggctggccgcgcctccgcggcacttcaaagccggagagggagctacaattgtggtggaatgggcggaactgatcattgtattgcacacctctaaaaaaaacactgcctctgatttatcaatataaaaaagatcctctgagaggaggagggcacttttgtgtgatggcaacttcacttctaggggtgagtctcaggattttctcttgctggtttaattagtttccttttattgccgattggagggggttaaagtcgccccggccaggccacgggc

SEQ ID NO: 37796 - DNA, 2300 bp, Homo sapien
ttgtatttttagtagagacaaggtttcactatgttggccagactggtcgcaaactcctgaccccctgatccacccgcctcggcctcccgaagcattatttttaatctatggttcagagtcagtgacattgcctctctgaagcaggttttccaaacgaaaacgacaatgaaagccccaattcataagactgcaaaatgtcttcatttatcttggtgaactgggaggaggaggggacctgaggatagagacagtatatacgtaaatgtaagaagcacttttgagctttctatattgtacacgatggggaaaaagcacgttgttcagggatctctggctcattgtataagatggggtagacaataccatgtaattctttattcgaattgctttgtcttgctgcatggctttgtcatcagctgattttgcaattaccttaacaagcaaaggaaatgccagtcaagttcagcatctgggacctcctcaccattgcaacatgtcaggcctcaggcaggagacaaaaatgcccaaggctgagtgtgaagcccaggtaagaagtgagacaatggctttgagcctggggtgtaagcatgccttgttcccaaggccagtatttacatgtggggtcacttccacctttggtacagttaatcaggcgctgattacgttccatggcatcatcctgacttcaggactttgtaggaaagctgaggcaggacactgctcaagtgcatttgacagtaagatgctttgtgcagccagatgttaattccacttgcccttacgcttgcttacgctacaccgtaagcggggctgacccttatggagctgggcttttcttcgcccggagactcttgtcagataaggcttagaactccgccaaccacttaggcttttaggcaaaacgcgatgcaacccttcttagaaggcgggtcactgctctgcaccagctgccagccagagagacaacaaataaaaatggaagatccttctccgtgagaaaacaggcctcggactcaaagcagggggcctgaggggaaggtgagcaaagaaaggcaaggcgagggcgctgcttcaagaagccgggttcattcaaaccccgaggacagcaaaccccgcctccccacgccgccgcccgctcaatcgccgagcgctccgggtgtgagctcgccccgcggggagcggcttggagccgaggaggcggcggcagaggtggtttgggcagccccgcgcggcggataggcccaggcaaacaacacccattccccctcctcctcgctcagttcaactcccactcggccccggccacgccctgccgccaccgccccctcgggcagctttccgctcggcagccaggcctcggtcgggggcgggagagaggcggtgcctcgaagaaggcaccgcgaccgccggaaactacgagtaccgacagccttcgcggtagtgccccaccccctttctcccaccactcagcgcgcgtcaccctgggctcagccaatggagacagagccagggaaaaagggcgcccgggtccggatgcgcctcaggaaagccatgctccctgcgcgggggcagcgggcagttcacccagcgcgccgacctgttggtggtccgcgcgcgcccacgtccgccgctctcgcttgcctggatcaagggccctacttttttctttagtggcaattggagggattgctggagggggtttttgagtggagggcgctgggaaatgagtagggggcgggatatcctgagacaacaagtttggctgtatggagggcctaccggcagcgctcctgagctagaacgccgagagaaagagcgccagaggagccagggaggaggagaagagctgctaaaggaataaccccgagaaagggggtggagaggaggcggccccagcgccccggcccccggcaggtcggcggccaatccgctgggggaaggggtggagagtcggaggctccggcggagagaggccgaggggggtggggagtcggccaggctcgcaccgccctggccccgcccccgacccgcgccgccgcccgcgccgcgcgccgccgctgtcaatcaagggcgagtcagccgggctcgggcggagagaggagctgctacgccacagcccagcggcggccattcgcggaaaaagaggcagagcctgtgccagctacagcctcctccgagccaccgcgggcgggcgggaccggcctctcctcccgcctcgcccccacccccacccacctctatcccagtgtctccgtctgagggtttgtcctgttaatgcgggatgagcggtacgtattctc

SEQ ID NO: 37797 - DNA, 2300 bp, Homo sapien
atatttgctaaaaaatagtctcatctaccattttttttttcctatttctggtgaggaaactcaggcacctagaaaatagaaatggaatgcaaattcagttggtatagctccactctattcagtagaaatctagcctgtatctccaatatgagggtagaaacttaatctgttttgttttctgttatatttcccagcacctagaacagtgcttggcacttagtaggcattcagtaaagatttgttagacaaatgaatgaactcagcacagcacatggcacataattggtacttgatcaatgttagctattattattgagaaaaaatacataaaacttgggaacaaggtaaagccatgttcattcactgtcacattgaaacactgcttcaccggccaatgaaaggattattaattatttagggaaaagtatcttttttggactcattaactactactgatcgaagtctcaaactctgaagttacgtttttatttacagatttttgttcaatacagatgtaatttattttggaaaaacaaattattttttaaaaaacaaaggattattttgccctgtatgacattagtgagtgttgttttgaacctagcaagctgactcatcctgtcttcctccaatgctgctaaatttctttctcgaactgtccttggaacttacatcattttgttgctttcctcatttatgagttaaatcaatctttgacatatcttcatcttatatttcgagttacatagttaactttttggaaattgcactttaaagttagcatcatttaaaaaattttcctgctagatttgaaagtggttattcactttcaatttaattcaactattatttacagaattcccggttttctaggttacagggatgtgaagctggaatataagaggggagagaaggaactggtgattgccagccttgtataccagcaactgggagccccaaagattattatggacaatataaagcagccttgacaggttagaagtcattatcaaagttttccaaggccctgtgttatttcaagattctgatcacataactggaaacttgtcgatggttttcaggggcagttaatatcctgcaaagaaaaaaattgttgaagcctcatcttctggaaatgtctgtcaacattcaggtattaaatggattattgtgggcaacagtccttcagtagcccccatggaaggggtggggattgaagactttagtttgaaataaacaattaacaaaggagacttaaaagtttagttgaggactcctcctcaaaattctggttgctttaataattagaatttccataagagtctcaacgaaagccactaatggaccgcagtgaaatcctatttcagtatcatgaaactgtttttaatctgaagctttttctctttgacctttttactcttgaattaaatgataaatctatagattttcggaacattttggagatcacgaaagggcactgtgcgttctcttactgggtgtactgaagttccagtaagtttcaggttgaggatggcaatcaggaggacttcgaatacttagatcttggattcccacaactaggaaagttgaattgcaggactggctctcttctggtaatatttggacaccttgggaaaggtgaataacagccttcaacttgggccccgaaacttctctgttacttatttttgtaacttagttccttgcccataaaacaaagactgaccagtcagagacttggctttctacggattatgtcaactagtcaaggtaagagattagcacggaccttggcacaagagagcattgcttcatccagagcacttaaccaatgctgggatctccaccaagtgtccagtaggcgaaggagccggagggcagtggagcgagcgcactgggggctcagacccaccccggacacgcggcttctcggccgtgttcgggacctagagcccgagggcctctcccctcggccttggccttggcgtatactgggcggtggcgcggtgcgctcactccgcccccagcgggctggggcggggacaccgtcccccgggaaacgggacgcgctgcttgtcccaggccttcgcttcggcctgcgaggctacagctgtgcgcagtggcgcggctgctaagtagcagcaggtgggagactagggtctgcgctcgcggcgaccgcggaggagggtgggcgcctgcggaggtgtcctcgctcacttcggggggcccagagtctcgggtgaggagccagccggcctcgcgttccctcggacggttgcccaatggcagcccaggtggca

SEQ ID NO: 37798 - DNA, 2300 bp, Homo sapien
agaacagatgtcaagtggagttcccagcaggtatggttctgcctactcagtcatgtctgttaaatgtgtgactacttcctgtgtgacgattttcatgtaaacctaataatccttttcaattttgtctactctcaagattttgttgagaaagaaagagatagaccctcttgaattggatttcctgcttcgattcacagttgaacacactcatctgagtcccgttgacttcctaacttctcagtcatggagtgctatcaaggtatgttaggaatacagtttctcaaattctggatcttatttaaaatattagctctctccagtgttgaaatgtaaacattaaagaatacaggtgatgtattaagcaccatttcagttgtagaaatgcactgtataatgtgatgttattaatctttgtattattcaattggttaatttctcatttagatgtaaaggagcttttggcttatgtatgcgtggaaaagttaataaatatgtacaatctgtcaggacctttgataaaagccaagtgatacaaatgaatatttttaaaaagttccttaaatctaaaatttgttttctttttaaatttccttaaaaatttgttttctttttaaatcgtttcaccatttttctaaatagttctttaaattacaccacagtggagtcgtttattctcattgtaaaatgtttaagaaaaacagaatattttagagaaataagtgacagttgccttaaacctcaattatcaatcctcattgcatttttctgtcaaaggccctattgttagaagttaattcttccaggatctggagtatcttaatgatgttcaacatatgctaagctttgccctactcttttttctaagaaggaaacatttctgtgcattggaaataactgttacctcttatttttatatatgttcagctttttaaagtagtatttgtaattagattgtaactttagaattcaaaattcaaattcaaatgtgtatcagtcagggtcttaacaggaaacagatggcacattcaaaaggttgatgaagaaagtttaaccaagagtctgttttcatagtatgggcaagaaggattaggaaatcaaccaggggatggggaaggaaaaaggaggaaaaggacagttactggaacttcataagaaatgaagttatgggagagagccaaccttagaggatctgtggcctgtggcagagaaacatagtccctcccaaaccacattcccacgagaaagagctggggtagaaatgtttccagaaaggggtcctgatccagaccccaagagaggttcttggatctcgtgcaagaaagaattcagcgtgagtctgtaaagcgaaagcaagtttattaataaaggaataaagaatggctactccatagggagagtagccctgagggctgctggttgcccatttttatggttatttcttgttgatatgctaaacaaggggtggattattcatatctcccctttttagactttatagggtaacttcctgacgttaccatggcatttgtaaactgtatggcactggtgcagtgtagcagtgaggacaaccagaggtcaccctcatcaccatcgtggttttgttgggttttagccaacttccttactgcaagctgttttatctttatgacctgtatcttgtgccaacttcctatctcatcctgtgacttagaatgccttaacctcctaggaatgcagcccagcaagtctcagcctcaatttacccagctcctattcaagatggagttgctgtggttcaaacgcctctgacagaagtacccccacctctctcttctccagtcttccaggctcctgccattgctttctgttggccaaacccaactaggtcagggaaccagggaactcagctcaagtgtcctttgagcttaccctctcagcagagcaaaaaaaaaaaaaaaggaaatctgaagaggagagtgaatactatccagcacagtttttttacataagattagatacattcacaagtcttcttctcaaactgtaaagtatcgttcacaccattcctacttgtttccctatcatattacaggcaattgccgtcatggaagaatttcgaggcatagaccgagatgtggaaggatctgccaagcagtggaggaagtgggtagaatccgagtgtccagaaaaagaaaaattacctcaagaatggaagaagaaaagtttaatacagaagctgattcttctgagagcaatgcgccctgacagaatgacgtatgctctcaggtggggtggtcagcatttttggaaacatgtattag

SEQ ID NO: 37799 - DNA, 2300 bp, Homo sapien
aaaagaattgtcaatggacgctgaaactgttgagcaagatgttatcagggaggctattcacagaatctcaagtctcactctgcatattccttattagtgacaaaggagaaagggtgttttttgttgttgttattgttttttgttttgttttgttttaaaagcgaagaacaaatcaggctgattccaccttaacttattgaccaaacagcaacatcactaaaaaaagagacagccagaccttatgtgctttccaaaggaagaacatagcacttcctaaaaagtagtcttggcaaaagcaagccaactagaagtaaagcctccggattcaactcccaaattgtaaacccaaatgagtctgttaaacaccaccttggggatgcaaaaaaaataaaacttcagacttggacagactccacagtcaagtgacccagcttcttcaaaaataaactgcaagagaaaagagataaaggagtgatgagaagggatttaagagccatgttgatcagtgtgaaccttatttggatcatgatgcagataaactaagtttttaaaaaatgaggcagaagaactgtgaatacagactgcacatttgatgatgatacagagtgacatgatactatgtctacagttgcctcacaataatttagaagaaggggagttgggtcgggatccaggggaagcacagttagccttgggcagataattacggggaggatcaatgtgtgctcattacaatatcttcccatctacttttgaaatatctttgaaagtttttataatgaaaaattttttaaaaattactaattaatagtgggataacttgacattttgtgcccccttatgcaatgcattgaggagtacatgtcacctatgtagaatggtgacaaaaatacataacctgaatctaatcatgaggaaacactcagataagctcagaatacatgacattctacaaggcagttgtcatggtctatctaaaaagaaagtcagtgttgtgaaaaacaacaaaaaacagtgtcataaaaatcaaatagaacagttgcagatattaaaatatagagttacagtaaatcgtactattgaattaatgttaattattttcggtacaattatggttttgtggttctatgggagaatgtccttatccgtgggagatatgtgctgaattatattcgggccaatcaatacaatgtttgcaaattactttaatcaatgtgtgggaatatatggattaggttggctcatattaaattgctattttcctaagttaaaaacagccaaatatcagcaaatgcccatggttcaacctaatatttgttgaaacagagaaagaaagcaaatgcagtgaccaataatgggtctagataaagaatcaacaggtgtttgtactattttttcacatttctgtgtgtttgaacttttttaaaacaaagaattgggagaaaatagtcaacttacaaaaatgaactccagcagatacatatttgtggattaagtgtgctgacattgttctctctgggatcaattatcccctaatagcatttgaattctgttagaattaatccccagctacttaagttgacttacaatatagaaaagaagaaaagctacttatttcattgtatgaactttctactttctgaatcagcctatgacaaagaagagaaaaataaatagtgtaggtgaacattaagaaaagtgcttaatgatattttatggcatcttttttatgtagatgacatttaaagatgcatccactgtaggagaaaaaagagatcattggttcttagaaacaatttttctttttgtcaagagatcaaacatgtcttctctctggcctggttttaacattctctgtaaaatagggtgtatatctagaattttaagttttatctcccccacccaccccacaccttattttgccatgagttcttagctgaagagtgttttgctgagggttactggggacttctgggcaaccgtggcagttggatgaagtgatgagatctctcctcccctccagaaaatgtccctaagtgattagcaagaacccctggtttaatcctgcctcttttgaatccaaaacagatccctaaagaagtggctgacatctttaacgcccccagtgatgatgaagagtttgttggcttccgagatgatgttcccatggaaaccctctcgtcagaggagagctgcgatagttttgactcactagagtcagggaaacaggtatggatgattccttccaagcagatgtgttcatctggaggcctgaatcttggtttggatgttcttttatt

SEQ ID NO: 37800 - DNA, 2300 bp, Homo sapien
caaaacaaaacaaaacacaccactatataatcaattactaaataccatcaaacgtgtacaggctttgctaagcacaggaagaaaatttaggggttgtcatctgaagacttagggttagttatggcaaatttctaaacagaaaggttcaacagcttacaggtttcctgatacagaagtagctagtctaggctgcttcaagtgttttgcaaaatctgacctgcttcaaatttgtgctcccttttccaaaattgatttgatttaacctacaatgaaaagaagtgcaaacaagatcagcagttcatgaggaagcaactatctaaaaaaaaaaaaagaggaagaagagctctgattgaattaattttcactctaagcttcctggcagccaaagggaaaaaatacagaaaaatggaaagaatgttggatctggaggcataaggaatggttttcagtttggcagtctgctgctgtcacttagtggcagggtggcagggatctcttaatgtattttcttagattctgtttccttattttaaaaatgtggacaataaggatctggaaggatattgagaggattcaaggagatactgcatgtgaaggaaaactctaaagcataataaaaatgaagtggccataatgaataaataacattatccaataaaaacaaaacattttaagtcacacaatgttgtattggttttactaccaccaggaagtgagaacactgagggctggaacatgaaagcacataacacatgttgtttgctgaactaaccaaaggaaggaaggaaaccttttccatgttttctcttcaagcttgagtaaatgtttggcaaatttcattcactcgttcaataaagaaaagatgaacgtcagatcctaagcagctgagaggggctgcagaaggtcctatgcgtacaggatgctctactgtaaacctatgaccacggttctaaataggtgtgcaacactgtccagcaaacctgctgtgatttcaggacaacttcatttaccattctccccactctctacttcaactctcccacaatttccacaaacttaattcctcactcttcatatctgaactctaagaagtattccctgacctctatcagattgtcttcctatttcacaccaccattaataccacttgccttttttctcatggcatcatcgctccaaatttacatttatttgcatcatcattacatttgtcattgatagtggtatcaaattaatattaattataaatctaatttataaaatttacatcgttattacacttatttgcatcattattgtatttatttagaataatgcaattaggttggtaactggctctcaggctgtaaactccaacagagcaggggcctgtttttgttcacccttctgttcctaggactagcccagtgcctgatgcttagtagatgccggggtcaattctgttaaattagtcagcattcctgacctctacaaactctttgtctggtgggtgtggaggcctactgtgtaatggccgtctaaagtttcaggcgggtttgcatctgtccacctgggccttggtaaagaaacctgggttgcctgttctgcaaagtgaaccctgtagcaaatgttttgggagacagaatcttcccaaagagaaccctgccccgttacaacaacaaaacaaaacaagccccaaagccgccctacaatatttgcctggatcagagacaggggttgcagcagaagctcgcgccccagggcatgacctggaataaaccctgccaagtatccagcgcgcgtgccagctggaggctgcgccgggacagccccctcatttctcccgcgctaaaccccgccggacggctccactccctccctctgctgcaggggggagcccggcgccctaacactggtaattgctcttgccgcgcccaactgcagccccctctcgcgccgcctgcgaagacaaggtcagtggccgcgaagttggaacgtgatcggagccacgaggcccagtgaggcggcaccgagggggcagcgcaacgcgctccccctgtccagggcgtcaagtgcgcccctcccggggcccgcctgtgctccgggcggagcgcgctagctgctcgggcgcggggcgttcttggtgcgccgggccgtggtgagtccgggctcccgtggccgcgtgctgggaggagactggagcccggttaggaagaatggagttggcgactcgctaccaggtgagggtccggccgcccgccgccgtccggacgcacccacagtttgacttccctttgccacccggtcctgctggccttggg

SEQ ID NO: 37801 - DNA, 2300 bp, Homo sapien
ttattttatagctgcaaagcccagagaaacctgaattctttctttgccattgtgatgggtctcaacactgcttctgtcagtcgactgtcgcagacctgggaggtgagccttggagtcccatggtgaggggcacataaaatggaaataaagtaatttacatggattaaatgagataagtactactaaactaaaaatgtttgaaagtcatatgtcaaggtggtagggatctttttgatcaaatggtctttaaacggttgtataatgtgtctgaactagataaaaatggtaacgtgctccccagctagaattagtcttcccctctgtcctgcctgatagtgcagtgctcgttccaggctggtccccacagtctccccgcatgatgatgcgtgctcagaagtgcgtttgctgtgatgctaatgagtttaagcttcgaggcctctcacttgcagggcccctggcaatgtgttcacatggatgatgtatatttttgtaaaatttgcgaaagcaaagtaattttaatattctttttcttaaagaggatccacaaaacgttctaaagtttcagacctcccacttcctggctctgcacgccgaaggctgtttgggttctgagatgcagaggcccactcaagttcgcacaaggtctgacgtgtggactgcgacattcatgtgggaagacctgaaactggggatacccctaaacttagccagacacaggcgcaggactctgcctcactcatggtcccctcaccgtccttccttgggcttttgtttccttcgctctcctttccttcctgactggctacctccctatgtaccacttctcccctcatcattgctctttaagcatcatgcctctgcctctagcctgcgtgtggctcactgtggtctcctcagcctccctcacagtcctctcagatttagttcctatcactgactgtgccattctcttcatggttcccaactcaaactcctacaagagaaaagctgataggccagctatctttttctcggaataggtctctgggcaacctgtggattcgctttctttcagtcaggggtcataccctgaaggaatgcactgtgctgacccaagggtcagagtcagtcctccttaaaggggcccaaaagaaaagaaatgaaagccccgcctgctctgcttaagcaaacaagaccttcacacacaaagcaagatgaaagacatgggtgacagatgccacgattcattagagtaggaggaaaacaaatggcttggcaagggtcagtggggagcgaatttgaattaaaccttgaatgaaactgatttggaaaaattgagaggagaaataactcaattagattcaaccagcttatgtttaatctgcgcattgactgcctgctatgtgcagagcactgcatcagtgccatagcagacaggagatggctacatgagaactgagcatgcctgtgatgacagaagtcttggaccagggcagagcaagtggagggactcattctgcctctgggtagctgagaaaactcgaatgagaagcctcaagctgcagggccttcgaggtccagctgagagttactggagtgtggggatgggcatctcaggtagaggtgaccacaggatctccaggtctggtgactggatgaatggaaagtgatcacacttcccaaatagataatacaggaaaagaaacagatcagaggtcagcaaactgctttggtaaagggccagcgaggaaaaatgtttaggttgtgcaggccacatggtctctgttgcagctgctcaactctgccattggagtgaaagagcagctgtagtacgtgcctgaatgaaggggcgtggcagcaatccaataaaacttgacctcctaaaagtagctcatggctagatttgttccatggctgatctctggagtagatcacttagttcgacttcggacatgttgggtttgaggtgccactgggacatttgtgagggatgtcccacagactaaggtaggcagcttaaaagaaagattggaatcagttgcaaatatctccattttgtgtcttctcatttaattggtcctctgtttgttggggtgtgtgtgtgcgtgcgtgcgtgtgtgtgtgtgtgtgtgtgtgtgtgtagtttccaaacagattaaactacctgtttgctgtgataaactgagtccatattcaaaattaccacatcgaaaaaaatctatctctaaataatgtaaaagtctaattattgtaggagttgcctcattgttttgattccttttagaaacaaaaaatcccagaaatatcttcttatactttgt

SEQ ID NO: 37802 - DNA, 2300 bp, Homo sapien
ttttgtcctttcagagaacagaattatttgtttgttctgtgtgtctcagcatcccagaccctcattctgcctttttgtttttttgttttttgtttttcgttttttggggggtttttttggtcaatatatgcacttctctccagccaccttatttcacttcagccacatagataacaaaggaacccctttggagaaatgaaagatagcaattacacattggtattcatgttacgggagtcccactgtcgtcctcagggagtttcacaatgaatatccagcattaattgccacagtaactgcacgcgtctgaccttgctgaaatgtaatacatcggttttacatagtgaaattatttaccactaaaagattaaaaaagaatgatcataaaattatattgctgtttagaatgacaaatatttttcgtttttaagaaaatcctggaggacttaaattattagcttattgcattttcttaggaatcagaataccaggaggtaaagtcacaattgttatcagtgatttggctggcaattagggcaagattagtgccttcctcttcttatgaaaggtgaatcaaatacattgacatccctgattagcctgtagaaccaattaataaggcacaatggatatttttttctctgttgggggtggggatatcctctttcatgtttgtacctgaccgtaggtaggtaggattttctgtaagtaggggaaacgtgctaggagccctaagcacatagtgccttttttaaagaggtgacatcatctttaaggtgaaacctacttactgtcaacttttcttcctttaatcttttgctccaatcctcagaaatagggaagctagattttcggacatgcatcttatagttcctttctcccgggctaccgtacgcttactgggtattgcacatcaggagaatttcacactaaacactctggaagtgttcatggctccgagttggaggccaccctgctgggtcagcagcaagctgtcctctgtgacagagccacgtcagcgggccacactcactctgggctgtggaagctgtgtgtgcagaaatgaatctgtgtgttcagccatctctcctttttaaaaagggactgaggtgaagaaagtctgtgcagtcatccatggcatccgaatttcagcctagatgagattctaactagagatccatttttgcttatattctggcaaaactagtacattataaatttgaaggccatctcaagtctgaaaaaaaaattgaattgaatgatggagtgggtagttttttttttcttgccgccttttaaagtaagggtgtaaagtaaatgaatatatgtattgattgcaactactgaatagggcttactcattgtcttaatgtttcaataatgtatattttgtatgattcaactttaatagagtgtttaataaacatctaccaggtaaaagagaatatagtatacatgcaattagtatgttgtgctttttgaaactttgaactttgtagtccctaaattgtttaggtagttttaaaaataaactctgaattccacctccactttgttttctatttcctttaaagtatttatgtctgtctaatgttttaagttttcatagcacttgagcctggatactttaatattagagggagatttttgaccagactcctaatttattctcaatctttgaagagatgatactgtaaagcaactctagaaaatacagcttgagttagctccattttccccccacttttaattttctctctctttttccttctctcatccatcatccctgtccacaattaaagcaagatgatgaagtgacgactgttcaggttaaagagcaagaccagagcgtcctggtgctgaagaaagtgcagtgctgtggcccagcccccacagctgggagtgcggagagccattggaggtgagagtttccctgcagccacagaggcacgcgctcccgtttccttttccctgcctgccttcccttcccttgctccatctcactcgctctctgcctcctctaccctccctccctctcttttctctccgcctctccagcgttctagctgactgcagagctcttagcagccagatggactcagttcccagtgaaaggacagggatggcaagatcttttagcatttaggggatgcctttgttagtaaccgttcacaatgggcagctcccggctgagggtctttgaccctcatttggagaggaaagattccgccgcggcgctctcagaccgagagctgcccttgcctaccttcgatgtgccttatttcaaatacatcgacgag

SEQ ID NO: 37803 - DNA, 2300 bp, Homo sapien
actatggagtcctattataaagtcctttccagttaacacacacagcttaaggtgacagggtttaaggccttctgcagtgtgttactagcatccattctggtatcttctcttacttcttcattatgtcatctttcccttcactagcatgacatattttcagtgcccagtgagttctgtgtgataccacctttgtgtttttctcatgtctttctctctttttttttttcttttttgagacggagtctcactctgtcgcgcagtggcgcaatcttggctcactgcaagctccgcctgccgggttcacgccattctcctgcctcagcctcccgagtagctggaactacaggcgcccaccaccacgaccggctaatttttgtatttttagtagagacggggtttcaccttgttagccaggatggtctcgatttcctgacctcgtgatccgcccgcctcagcctcccaacgtgctgggattacaggcgtgagccaccgcgcccggcctcatgtctttcttccttacttgaaggacacctaccctccttctgcctggttgaatcttccccactcacccttaaggtgcagtttaaacttccttcctttcgtggatttagctttgcccatcccaggccagaagcatttctctctcctgtggcctgaagtggtcttacctacacttacttggcaattagcaagagtacaagtgcaatatctttgtttttctggatgtttgtctactcctaggttaagtcttaccttccttaagggcagaggtcacagttcgttcctccttttttgttacatggcatgtttttatacatatttgccaagcacctaccatgtgagtggctgagggcacaatggtaaaccaactctggaccctgacctcctacgattcttgtcattttttaaaaatgtgaataagcttattcaacttttgtaagtcttagacaaagatggggatcccagcgccccactgatgagaagtcaacaccctggctggcccttgttgaagacagattgagctgagatgtgaacattcacactccctggcgtttaaggcactgctggaatagtttcactctcaatgatccagaattcctgcctcctggaagggtgtaaacaatgattcacaccacggcaggcctttacagttcaccaagcacattcatcacagcagcgggctttcagggaaggtcaggttctgacatgctaacagagattcaccttcaggtcaccagacttgcagctactctgctcaacacctatcataaccaacaaaagttttctcccttcgtcctttaaggatgcgtgtgccaagaagggtcggcgcaaagcaattttgcctcatggtgtttgccttgtagcgtgtctattttgaagttccttggccaaaacagttcccaggagtaaagattacgatgaggggccaggctgtgcaaaacgcgcgggagggcggacgactctccagcacacttggttgaagtccaagtcaacccctggctattcgaagaagtgaagcaggacttttcagcctaaggggtagggggacagggacaggacagaagagcgggtttgccggagattctgggaattctgcacctgtggatgagccggtgcccaaggtgccctcttcctcccgggtcccgagtgggagatccgagggggacaggtcccaggcagctttcgcaggcgaaagggcggggcggggcggggcccgcgcacctgggcggggaggggaggagagaggaggggaggggaggcgcgcggggctgagcctcgcgggggccgcggcgcgcgccaatgggcagcggctggcagcgcgccccgcgcccgagccgcagtcgcgccctctcgcttcctggcgaaggcgcggacggcgcgcggaggcgagcgcggtggagaggagcccccggcgccgcagcgccgtcagggcatgaggatggccgtgggctccgtcaagatgcagccgccgtgcgagagcccggccctggccgccgcggcggcggtggtggcggcagacggccccctgcgccgcagccccagcgcccgggagcccgagcgcgagcagccgccggcgtcgctgcggccgcggctgagggacctgcccgcgctgctgcggagcgggctcacgctgcggaggaagcggagcgccgctgggggccgggtgagtggcccggccctgtccgagtgggcacgggcggcgcgcacgtggagcccgcgcccaccccccgggccgctgaggggggcgtctggaagttggggaggtggcggaagggacgcccttctgccggactcggctg

SEQ ID NO: 37804 - DNA, 2300 bp, Homo sapien
atgctctggcattgtattacccgccccccccacaaaaattttttttctttatctcatacctcaaattacaggttatttgtatgcaaaaactgcagctagttcatctgtgatactaactgctggcgactcaataaaagctttttagtaacatgtttttcttaatcgaatattgtgttgcttttataatatctacaaactaattgataaatctcacacttttaatcatttcactttggaacatactctatttattctccacactaaaatattgggcaaaaaaaacttttataagaagtgcagaaataaaattgccaaagtctaattataaaacaaaaatatttggggtttgattttaaatgttttaattagaaaaggaaaagcagttttaagtgcagcttgctatatagccatattcatatcaatatatattattatgttaacacaataataactctttgcccttttcatatggaaaatatattgtgaaaaagagaatgacctttgttctaccaaatgttaaacaataaaagcatatcgttttgtctgaccatttaagacccatgatcacttttaaaactcaacaatgcttggttaaatagtcttaattctttgtagtctgtgctacacatacaaagattacacagatttcttttctaaaactttaaaattattttctagtttcactagaaacaacaggtgtaagattctatttccaccacaaggtgtcagtccacggtaatttaatcttcaaagggctttaaactaatccatggaaagtcagtgactacagaaaatgcttatattaaaacatgaacagtcttcggtgccctagctgtgaataaaaaacaatcatggaaaatgtggttgcgcgtttattttcctttgtgttttctactcagcttagtcctgagaatgttgtataccaaatccccagaattttgcaattcatgtctcagaccctatctcgaggctggttccaacggagagaagtaaatcccctgctcaagttgtctttttctaaaaccttggaatattaacagttaactttactttaggtttggaatacttcattgagctaggatatgggaagctgcacttaaaagctgaggcaaggaagggagggacggagtaaacatggggtttaagggttttttttttcggctggggagcagggtttgtgcgattaaaggtacacaatttgaacaattcagggagcaagtcactctcagaaattcagcttcggattcctcaaactgtcaatcacagccacttcaggaccggctgttaggttttaaataaggtggctgggcgcggtggctcacgcctgtaatctcagcactttgggaggccgaggcgggtggatcacgaggtcaggagttcaggaccagcctggccaagatggtgaaacccccgtctctactaaaaatacaaaaattagccgggcacagtggcaggcgcctgtaatcccagctactcgggaggctgaggcaggagaatcgcttgaacccggggccggaggttgcagttagccaagatcgcgccaccgcactccagcctgggcaacagactgagactccgtctcaaaaaaaaataaaataaaataaaaataaataagctaacgtgtgggagggtttgtaagctctaaacggtctatctcaaagtgtgatctgggaatgcttccatatctcatgggaacttgttagaaatgagaatctcagacctcatcccagacatactgaaccggaaactgtgggtggacagcccaacaatcggtgttttaatatgcccccgggtaatcttatacacgctgaagtctgagaaccactgctctagagaaatgcacaaacgttccttagtggagattaaacaaaaggcgaggggttggagggcgcgaaacggacctcaagggcagggcagacggcatttgagaggaaactgggagaggccggagtgcgacttggggagtcttagcctccaaggacgttcccgaaccctgcggacgcggggcgccagcaggtggcgctggacgcgcaactgacaaggaggcggggcctgcagcaggcttggaggcttcgcgctctggaggctcaggcgccgcgtggggccggcacctcccggcagcagcggcagctgagactcacggtcaagctacggcgaggagtgggtgagtcccttgaatcgttctcactggccgtttgctcctcgagtccgcctgcgtgtccctgcaaggctgggcgcccgctcccagtcttgggaggggtgtagcgggtcgcaagccttctcgtgacctggacggcggc

SEQ ID NO: 37805 - DNA, 2300 bp, Homo sapien
tttcatgtttttaatgtgactactaaaaatattaaattatatatgtggctcacaatatatttctattagacagcattggttagaggatgtaaatagctttggcaagaatggaggggaaagtggaaatcggagaagcagagcctaacagggctcaagggaagaattcttgaccgcatggaattctaagcgcattcctccacccgggcctcacatcctggcagccaggcctggaagagaaacgtccttgagcctgcagccgctgcagtgctttaataacagtttatccatgggagagttccaacttgagcacatgctggctgtgaacacccactctccaaataggttgagttctgagacagactggatgttagtcacttgccggctctcagagggcatttcacataggaaaaaaacgtggttcctgcagacggttgctggtatgtggagtccccccgcccgccgcggggcttactgaacctgtgcagtaggtgaaatctctacttttacaacaaaggaaagcttgatggttcattgttaaacaaaaccatatttgtttgtttgttgtcaatttatacataagaataagaaagagtatgttaaagcagcttctctgcagtactagtactgtgctccaagaaaggcaggtttatacttagctgtggtcctcagtggagtccccagacctgcaatatctgggaacagctaagaaattcaaattctcaggctccagtgcagacttaagagatcagaaactctatctaggggtggagttagcaatctggactgtgaccagccctccaggtgattgtgagaatgcatcctaagacagagaaccacagagccacagaaagaagaggccctgtgaagggagacccgagggtatggagagttgttggctccagcttgggcgcactcgttctctctttctgtttctttcttccctcttcccttctgttctcttttccccttccgcctcctcttcctccccctcctcctcctcttcctcctccccctcctcctcctccttcttcttcttcttctctctctctctccctttctccctccctccctccctccctccctcctctctctcctgtctgctgtcattgggaagctgtgtggtcagccagtcaaaaagcagatttcagagtcaggagttccagggttcacagttgagctccattccctactgggtgactgagggcagtttctaaacttctctgatcctgttctgccctctgaagaaggggaaaataatacatcctgtgtacgattgttattgggaatcaatgagctagtgtatggaagaggctgcatgtggttcttggtacaaagaagcagattattatcagttacatgtaggtgaggcatccaaaatgctaggagaaaaaacctgagcctttacacggtatcgctgtgtccattgttaccttatcaactcccatagcatgctcactttttttcatagaaattgtctattttccatgattattcagtgaatccacaacaatctcattcttggttagggactcattaaagtgttatcagtcttatggaattatttaaaacctgtgaactcccccaaataatgcttgagggttccaaccttccctgccccctcacaatacagcttcagaagctgatttgatcaagtgaaaccactgtgcctcctacttcattttcccgggtttgctgcttttctaagtatgtctcacaaaatgtatgctgctctttttttcttttagtcttcatattgtatattagatccctagacttctttgttctacacatctgctgctctgtattctgacctacatctgcatactgctttaatagaatggatgtttgcagacgtgactgtgatattggaatatggaaggatccatccagggtcaggaagcagcaggctggcttcattctcagtgtttgttttctgggtctttgaaggagaggtgttgcagggaaaaaggtcgtgcatcaggaagtgtcatttaaaaaggacctgagttgggctgagttatcagcaaatacacgccatggctgtgctccccaccccccaccgtacactagcagggcagcagctctgattgtctaacgagcagcagagccgcccagcagcaaccacattaggaaggaatcggaaaccaacgctccgctggctgtcaccccttacccacttgctgtcaggtagagtacttgtttattattaattatctattttcagtatcctgcacctgggggtgaacatcatcggtgctaagactttttagcctatggggatctctgctgagcactaaaac

SEQ ID NO: 37806 - DNA, 2300 bp, Homo sapien
tgctttgaacaatttgacttggaggcaagattgcgatatagaaaatgggccactgtggaggagataagtaaatgctttgtcgcttctaagtgacaggggaaactgatcacgattggtatacttctgacatgtaactttctatatctttagaagatcgtcagggaaatagaaaaaaaaatctgaaatctccaagtaggttctactttgtgtggttccaactaaatgaactaaatttgtgtttaaagattgtaagtctacatgtaatggtgaaagctgaaggttttacactgcacagaaatagtgatttccccccgtggagggcaagaagaccggaataggaggggtgggtgggggaatcaatgtgtaggccaaatatttgaaatttcagtgcaatcttcttagtcatcactttcatttctgtcttctagggaaatctgacacagctagaaagcaatggaaaacactaagagttgcatcagatgttgaagaggaactgatattatgggataaaaaatgattctttaagggagataactggtcatttaaaggtagcagcctttttgggaaaagctaacaagtgttcccgaggccagcctgtctcttgttagcaacattggccctgtgttagaaggaagagtggatgtgttttgatgctattccttttcctctcagcataaatttgcaagcatgtactgtaaatgaattttcatgtcttttcaggatgtttccctatagagcagtttctagattgactctgtggaacagtctacaatagatttaatatggttaggattttgcctaattctgattggtgagtggttttcttttattcattcttaattctgcatctaatattagcttacagtgttactgtcactgtgtgtgacccagggagagaaaggaagtaaaagatgtgacctcagagagctcagaggggagaaacaacacaataatgataactcacattcatatagaactttaaaatttaaaggttactttttactgcgttacctcattcgtcctctctgcaagcacattgggtaggctttactattgccattttacaagtgaaaacagtgaagcttggagaagttaaggaacttcccccagatcacattcctgtaagtggcagtgtctgaacttagtattctgactctaaaagggcatgaggttccattcaaagctagtgagtactgtacaagaacatgctaatgaggctttgtgaatagtcagagtgaaatggggctcttcagggatggtatcttggggaagcacacagtgtatgcagattattgaagagagtcaaaggagatcctgctgtggggagaaggctggaaagtgccatgggaagagaacaaggacagaaatgaggttgacatgtggggcagaggaaggaggcagaccttcataaacagaggaaccatgattgggagtaatgggggctaagtgtaggagacactgggggctgtgtatttaaggggttggggaacagtaacacctggaattttctttctattacctcaagaaacccacagtggaggggctgtgagtgctcctaagaacatgttctgcactggtgcctcaatgggtagaaaagggggttgccaactgagttatatatagaacttgtgcaagggaagttcttatgcaaaatgactaaacacactccattgctctgcctggttacttataaatattgtttatgtgcagaagttgatgggaatccagacattgtctaagagatggctcagagaataaaataacaaaaagttgttgtgaaagacaaagggtttctaggttacctgcagcagttgatgacagtctgtccttctgtcacagtagagacagtttaagccacattcccaacaagcattccgtatatctggcactaacacattggaacttgggggagactatgtgacgtagctttactctagggagggacagacaatctgagggtggagagggaagtgagaccccatacaaacctgggtgatctctacagttatgtaactgtccagccacaaatcacttattaaacaactggattcagaagaccaagatctgcatttgggtcactccagttatcttgagatctgggacccaggtggctggggtggcagctgatcatgtcaggaggactcctctgcacaacatcacaagcacaggagagaatgctaaacttgattgggagctcacagaagacccctggaacccagagcaataaggtgaggaggcttaaagagcctggagagaggagctgggttgcagaagttctctcttaccttcctttgaaattt

SEQ ID NO: 37807 - DNA, 2300 bp, Homo sapien
agagtgtggatcccagaggaaacatctggaagagaaagaaagggaatccctcagagtcacagggcttttctaccctaccgcagtggcagaagagcaagtgccagcaaccccatcaagaaaacattctgaggggttggtgcggtggctcacgcctctaatcccagcacgttgggagggcgagaccagcatggccaacatggtgaaacccgtctctactaaaaataccaaaattagccagatgtggtggcatgtggctgtaatcccggctactcgggaggctgaagcagaagaatcacttgaacctgggaggcggaagttgccgtgagctgagaacgtgccactgcactccagcctggatgacagagcgagactctgtctcaaaaaaagagaaaacattctgggaaggggctgttcctttagcagttgatttaaccgctgctgagctttaacaaaaaaatcaagcttttctcgtggcactgtataaacttccatatggttgtcaatgttccacttaactcacctgttctatttataggccatcaattgtgtattttcaaaataactgcacctcaaattttcaggcttttagtgggtacaaagccctttcatacacatggggctcacttggctccatgtgaacaaattgaggcttagagacattggcagtttgcccaagaatcaacccacaggctagtggaggagcatgagcttgggcccttgtccctgactcagctcctatactttgtcctgtgtgccacaggggaaaggaaatgtttctcctgcaggatggagattaaggttttgaaaactctcaaatttcattctttccagttttatcgaggtaaattgacaaataaaaatttggtatatcaaagtgatgactttatatatacacacacacacatatatacacacatatatacacatacacagagtaatgattaccacagtcaagttaacacatccatcatatcacataactaccattgtgtgtatgtgaacacttaagatctactctcaggaaatttcaagtaaacaatacaatattattatttatagtcactatgctatatgttagactcccagaacttactcattttattactgaaaatttttaccctttgaccaacatggaattccatttttctactcaatccacgtatcatccttctcagaggcatgctttacttccctgaaacttctcaccacagactggagcaaaaggtgacagaggtgagcggcaatctataaggataatggcagtgagccattctccagcatccactctgtggcagacaccaagtgcttcatatacgtgagttcatttcatctcaccataaatctgtgacatgggtactataattattcccattttacacatgtggaaactgaggcacagagaggtaaagacacttgattaagatctcacagtgggtttagtatctgagatctaccaccacaaactgagtttttaacctatgtgactcattcaccaccaccaccacgacaccaaaccaaactgacttttaaccagtgtgattcgtttcaatgaagccttttgagtacaaagggaaggcgagcatcagtatggcattgcgcaaaatattctgaaaactctggggctcaaaaaaatgacttttctttcgcaattaattttccaaacaagttacacttcgggaataagcaatccacacacaacagtacaacactcacaactactgaagagtgtaaaactgtcagtccccctccaccctgtccccagacgcgccgggccacacttgctgttcagtttctggtgtggaaaagccatttggagagcaggagaaagaaacgacgcgggcaggggggcgaaggggggcggtttgagagagagcgggaggtcgggtgtcctcggagtttcctcaggcgaggacctgggcgcgtctgggccaccgggggtaggggtgccgagggcgggaagcgctccaccgaggtcccggcgaggatccaggcgtatctgggcggccacaagctcgccggcccccaggcagagggaagggcggcgaggagcgtggggcagcgcctgggggagaggagcttggccggagggcgggggattctgaggtagccttggcgactttcgagactacccaggccgagcacacccagccccctcagacccaggcatttctgcgtcctctggtttggagggaacccagggggctgaggtgaagcaagccaggactgtttctctgactcttctggaagacgacccgctgctcgggccgcctcatcactgcgggccacgaggtgggtaaagc

SEQ ID NO: 37808 - DNA, 2300 bp, Homo sapien
ggacatgccagccccacactggtggcataggaagccaagttgctgcttcctccctgtgcactcccatttgtctggcctctcttgatctcagctggcgctcacttcacatcagctatgatgcaatccagcaactaaagtattagttaataaatgctgacagcacagccttttctggtcacgtattcatactaaaatacgggggagagttggggggagagggggatatatgggaaatctctgtaccttcctctccattttgctatgacctaaagctgccctttaaaaaatacaaggggctgggcacagtggttcacgcctgtaaacccagcactttgggaggccgaggcgcgtggatcacctgaggtcaggagttcaagacccgcctggccaacatggcaaaaccccgtttctactaaaaatacaaaaagtagctgggcgtggtcgcatgcatctgtagtcccagctactcaggaggctgaggcaagagaattgcttgaacctgggaggcggcggttgaagtgagccaagatcatgccattgccctccagcctgggcaacagagcaagactccttctcaagagaaaaaacaaaacaaaacaagaaaaaacaaagaatgagctctccacgcgaaaaatccattgagatgcaaaggaaggaagctatcattgtggaattgcacatgtcagttacattaacgtttttggagcaaggtagagctcatctctcccacaagcaaattccagcccaaagcattgatactaataaagtgccatgctgcgatgtgcagggggcagacagtgtctccaagctccctacacacatgccttcccacagtttgccctttcttgaccccagaagcatcaggccccttcaccctcgagggccactatcaggagtttgaattaatggcaatcaccatgcacagggaaggctgtggaattctgacataaaaacacttagtggagggcttggaaaaagtctagtaggagcaagacgcaagctggactaattatctaaaacaagagacctggtttggggatcttaatgttctcaaaaaagaaaattattattatttttcattttgcactttgtgccataaaacattttcaacaaaacatagaatctcatttcttttgagggaaaatgattgggagaccagctcattgctggcacagaggcctggttcattcataattccttcataggcaagacaccaggtgaaccgatatagccgagctggaagagctctccaaggcagagactctgagccaaggaatgttcaaagagctagcatgtattgtgggattactatgcgccaggaattttttacactgcatcacgttccatcttcacaacagccctagaaaggaagaactattattacccccgttttataggtgaataaacaagggcacaggtccttgatgtaacagccaggatcaaacagctgggaagacgagaaaacctttcccaggctaggataacagaggatttggttgaaaatacaggcaattaggtgctacctctgggaaaaggggccaggagaggaaggagacacttttccctgcatgccctgatgtcctatttgaacattttatcatgaacacgaacttcctatttaaaaaacactttttattgaaaagataaatctgtgtgttgtattgtgtcactcagttcaagtacttgaaatttattgaattgtattttctaaaaaatagatagttgagtaaaagcaagctcacattacatagacggatcacagtgcacggctgcggagctgggagcagtggcttcgtttcatgcaggaaagagaacttggttcaggagtgtctacgttgcttaagacaggagagcactaaaaatgaaaccatccagccatcctcccccattttcattttcacaccaaagaatcccaccgcggcagaggaccaccgtctctgtttagacaatcggtgaagaatggatgacctcactttccccaacaggcgggtcctgaaatgttatgcacgaaacaaaacttgagtaaatgcccaacagaggtcactgttttatcgatcttgaagagatctcttcttagcaaagcaaagaaaccgattgtgaaggtaacaccatgtttggtaaataagtgttttggtgttgtgcaagggtctggtttcagcctgaagccatctcagagctgtctgggtctctggagactggagggacaacctagtctagagcccatttgcatgagaccaaggatcctcctgcaagagacaccatcctgagggaagagggcttctgaaccagcttgacccaat

SEQ ID NO: 37809 - DNA, 2300 bp, Homo sapien
aggaattttttacactgcatcacgttccatcttcacaacagccctagaaaggaagaactattattacccccgttttataggtgaataaacaagggcacaggtccttgatgtaacagccaggatcaaacagctgggaagacgagaaaacctttcccaggctaggataacagaggatttggttgaaaatacaggcaattaggtgctacctctgggaaaaggggccaggagaggaaggagacacttttccctgcatgccctgatgtcctatttgaacattttatcatgaacacgaacttcctatttaaaaaacactttttattgaaaagataaatctgtgtgttgtattgtgtcactcagttcaagtacttgaaatttattgaattgtattttctaaaaaatagatagttgagtaaaagcaagctcacattacatagacggatcacagtgcacggctgcggagctgggagcagtggcttcgtttcatgcaggaaagagaacttggttcaggagtgtctacgttgcttaagacaggagagcactaaaaatgaaaccatccagccatcctcccccattttcattttcacaccaaagaatcccaccgcggcagaggaccaccgtctctgtttagacaatcggtgaagaatggatgacctcactttccccaacaggcgggtcctgaaatgttatgcacgaaacaaaacttgagtaaatgcccaacagaggtcactgttttatcgatcttgaagagatctcttcttagcaaagcaaagaaaccgattgtgaaggtaacaccatgtttggtaaataagtgttttggtgttgtgcaagggtctggtttcagcctgaagccatctcagagctgtctgggtctctggagactggagggacaacctagtctagagcccatttgcatgagaccaaggatcctcctgcaagagacaccatcctgagggaagagggcttctgaaccagcttgacccaataagaaattcttgggtgccgacgcggaagcagattcagagcctagagccgtgcctgcgtccgtagtttccttctagcttcttttgatttcaaatcaagacttacagggagagggagcgataaacacaaactctgcaagatgccacaaggtcctcctttgacatccccaacaaagaggtgagtagtattctccccctttctgccctgaaccaagtgggcttcagtaatttcagggctccaggagacctggggcccatgcaggtgccccagtgaaacagtggtgaagagactcagtggcaatggggagagcactggcagcacaaggcaaacctctggcacagagagcaaagtcctcactgggaggattcccaaggggtcacttgggagagggcagggcagcagccaacctcctctaagtgggctgaagcaggtgaagaaagtggcagaagccacgcggtggcaaaaaggagtcacacactccacctggagacgccttgaagtaactgcacgaaatttgaggatggccaggcagttctacaacagccgctcacagggagagccagaacacagaagaactcagatgactggtagtattaccttcttcataatcccaggcttggggggctgcgatggagtcagaggaaactcagttcagaacatctttggtttttacaaatacaaattaactggaacgctaaattctagcctgttaatctggtcactgaaaaaaaattttttttttttcaaaaaacatagctttagcttattttttttctctttgtaaaacttcgtgcatgacttcagctttactctttgtcaagacatgccaaagtgctgagtcactaataaaagaaaaaaagaaagtaaaggaagagtggttctgcttcttagcgctagcctcaatgacgacctaagctgcacttttccccctagttgtgtcttgccatgctaaaggacgtcacattgcacaatcttaataaggtttccaatcagccccacccgctctggccccaccctcaccctccaacaaagatttatcaaatgtgggattttcccatgagtctcaatattagagtctcaacccccaataaatataggactggagatgtctgaggctcattctgccctcgagcccaccgggaacgaaagagaagctctatctcccctccaggagcccagctatgaactccttctccacaagtaagtgcaggaaatccttagccctggaactgccagcggcggtcgagccctgtgtgagggaggggtgtgtggcccagggagggctggcgggcggccagcagcagaggcaggctcccagc

SEQ ID NO: 37810 - DNA, 2300 bp, Homo sapien
ctgtctttgagcctgtcttcccccacaccaagttgagggaatgaggacacacccacctttttctgcaggaactggatcaggacttttgtactcatctgcacagctctggcttgttcctcactactctcaaatctgttctggaggtactctaggtatacctcaaactccaaaagaccagtgatgattttcaccaggcaagtctcctaagaggaaagatggtgggaaaattggttatcgccaggagatagaatcaatttgaaaagttaaaattgccacagttcgacatcttttccctctgctcctctagagaacttcaagtacctcttaggcagcatgttttgggacattggacagcaccattttaaataactggacaatcagaggccccatgtaattagttttatccaaagcccaacagatgctagaatgtggcaatggggatccttctctgattgtcccccttgatgttcttcctgcactcttgcccttgttaatgctgggctggaacctccttttataaaataatcagaagacagtgcaggttatctcactgtggagaatgagctgggcagggagggagggcagacctggaccctgccaggggcagccagagagggaaaaggccctgagagtacctttcccaggatgaactaattaaacctgtgggagttttaaacatttgacagttgttaaaatctcaccacagtggcaccatctctggccatacctgtccaagaataaactgcctttaaaaaagcttgaagttggcctcctcatgaaatttacataacattctttacatttacccactttttgttgctgcctggatctatatgtatacaggcactgcatgcaagagggagaagttttgcctaaggaatagtgaaaagtgagtgcgacaagttggtacctcattgaatccagattggaagcatccatctttttcagccatctttggaaggttcaggttgttttctgccagtgcctctttgctgctttcacacatgttactcttgttacatgtctgggaaagaataccagaattgttatcacctaagtgtccctaaaacaaacaccactagagggccttttcattgttcaaccacagccaggaaagtctctaagaaaaatgaagctacaactcattggcatcctggcaagcaaattccagtggagtgggggcacacttgggttcagttccaagctcacctgtgactttaggtgtgttacttaatcctgagtctcagtttccttatctccaaaaaccttccttgcaaatttgttttgaagattagacacaatatttatttaaagtgcctggcacacagtagatacttaataacagcaattttgacaataattaggagaatataattcaagccatagaatgttccagcaggaaggatctatgagatcacctagtccacgcccaattttactgatggagtccagaggtggtagggaatttacccaagatcacaaggctggtttggcagaaccagaattcgagtgtgggctcccaatctcccctcctgtgttcttttctttctaccaaacaggaccaaaataccttgcattgaaagtggggagatgctttaacctatttatgatttgccactttggtgggctctgaggtatgaatcttagctggaatggctttgaggaatcctagccattgagtttacataaccaaaaagtactgcaactgctctgagaagctgaacatgcctttcaggtggcacttttctagtccttccaaagcccgggggacaaaaaggagcttcacagacctaattttttggaaagggaaaaggaagccctgagaagcaataaccctcagctcatgccaaaggtgggcatggatttcagacccattctgcattttccagaaaggaaaggaacttcctgacaccagcaaaggataaatacagaagtcagtctagtcggccccgttggcctcaaatctacagtgctctagaacccagcaaagacctcctaatgcaggcagcccccggccacacgcaggggcaaggggaacgcatgcgcaccgggcccttcaaccccatcgccaagcctacccacctcctttctcagggctgagatgccgtcgaggatgtaccgaatttgtttgtcaattcgttctgaagaggtgagtggctgtctgtgtggggcggctacatctttggaatcttctcctgggggtactggggcagggaaggcagcaggcaacaccaggagcagccccagggagaaggcaactggaccgaaggcgcctgtgccggaggggagcgagcgcaggg

SEQ ID NO: 37811 - DNA, 2300 bp, Homo sapien
aagacatctgacatcaccaactccatcttgcttctaacctccaagctgtccttgttcactcctgggcataggctgaactaactttggaaagaacttttagtttatagcttaaaacaaagatgataacagccctttccctaaacaaatccccttcttgcctaaaaaaattcttttaatccttacaggaatttgtaagattgcagtgcattatagcttattttactaattttgtaaggatttaaatatatatagttggcttcattttacaggtaaggaaactgagattcagagatattaaataattgatcaaagatcacacagttggtttgtgcttttagtcattatattgtcccttgctgttgttatctgagctccaccaaaacataaactatttctttttttttttttgctctttccaacttttactttagtttcagggagtgcatgtgcaggtttggtatacaggctaacagattagcgaaaagattagacattatggtttaggagtcatgcagctggaggctacaagattctgaccctccccaaattgctcctggggataacaactctattgtaaagcctaacatcagtgtttgagatattttgcagaccctgcaaaatggatcagctggaaccacccagataggtaaactggctcatctgatcttgtggtcccaacccaggaactaagattctgacccttcccaaattgctcctgggaataacactattgtaaagcctaacatcagtgcttgagatactttgcagagcctgcaaaatggatcagctggcaccacccagatcggcaaactggctcatctgatcttgtggccccgacccaggaactgaggcagtacaagacagcttccactccctgtgatttcatctctgacccaaccaatcagcacttccgacttactggctgtctccccacgcaccaaattgtccttaaaaactctgatccccgaatgctatgggatactgatttgagtaataataaaactctggtctcctgcacagccagctctgcgtgaattactctttattgtaattccccagtgttgatcaatcggctctgtccaggcagcgggcaaagtgaaccctttgggagcttacagcaagtgacccaatcacagctcactgcagcatcaaactcaagtggtcctcccgcctcagcctcccaaatagccagaattacaggcgcaagccacagaggtcagcaaggggaaatttttaggagcacagacattgggcacagaaaacgactacgtaccttcagaatgaggcaggaaagtcttaaaagtcaaagtcttagaaatgtcttacagccttaaaaatcaattaagtcttagacctgggggggtcaaatctcaaatacgacagcagccagaaatttattacatcagaggttgggaatcacttgggaaacttcaaaggcagatcaatggccagttcccagccccaaactctttagaatttctaggagtaggtctccagcgtgagtatggttttacctctcctaaagtgattctaatgtgcagccagggttgagaaccactgccattctaaaccaatgagggcaagatggccaaacagaagtgtcatttcctatttagtctccttgattgttgcaatggaattcctcagcttcaaaagtccagaatttcatgtgagatttccaaattctaaaatgttggcaagtaattaaaagaaatttttttaaaaaagattgggatcaaagaaaacatggattcgggccctactgagtgtcacttcgtaacctttttgcagttcaacctcaggtttgaacaacctgattctgagaagttaaataatttgtccacggttacacagccagtaggaataagagttaggactaaaacccagtccctctgaatttaattaatgttccttccatgagaaggaaggaacacctgaagatgcgttttaaaaatgggtaacagaaacgcgaagttaccgccagccatgatcgcaaccacgcatgcgcctactactgccggcgaggcggaagagcagggaaggttaaaggcgatgaattacgacctctgctggcgacgctcacgactcctgccgtaaaggccgtgtgtggcgcctgcgcacctcctttccctttcggattcccgacgctgtggttgctgtaaggggtcctccctgcgccacacggccgtcgccatggtgaagctgagcaaagaggccaagcagagactacagcagctcttcaaggggagccagtttgccattcgctggggctttatccctcttgtgatttacctgggtca

SEQ ID NO: 37812 - DNA, 2300 bp, Homo sapien
cctgtttctagtttttcttgtgagtgcctaaaggagatttatggcgaagagcctgtggtggatacaggctcccacttgtatgtgcttttagagattctgtactctcctgctagcccatgagttaccttttagcaatttggcttctaggaatttgttaagaaaattagctaaatgtttcttacctgcttgtattgtggcccatctctccttagaggcacctgtctccctttagggttccggctatgtggaagcccttgttacctcggctctttgatggattcttgagaatttataattttgtagattacctggctttatcttgtttttatggtgggagcaatgttcttgccagtttttaggcctcgcttgcactcttgatgtaatttatacctctttattttgttggaagttgatcaagccactatatccctgttcatttttgtaatttagctgatttttaggaagggtttggcatatctttgaaaattatgcatacacacacactcacacatgcacacacacacacatgcacagacacacacacacatgcacacacactttttccctcaagttgctctgctatttgcaacatgtagcaaatacacttctaagtgattatcagaatgcaaagaaataactactcaggatactgcaagccacactggtagtagattctcattaaaaactgtgggagttacagaataatttggccataaagtgttctgaacatttttctaaggtatataatttattattctctgatttgctttgaaagtataaaatgctttgaaattgccttagctttttttatttctgttctataaatagtcatgttctttagagaagaaatgtacatctataaaattttctttgctattaataggcatttagatgcaattgaaaggaattcaaagatttaaagatacatttttaagaggagtagaatgttaagcaatgtgctaatatgatcttttattttcttcagtaaagatagtttctcattgtattttgttcagttataaataattataatttcttcatttaattcatctaattttatagttataatggagaatgggatctagctcaaaaagcactggatgatattatatacagagcccagctagaattatatccagagccattgctggtaggtgcctgacttatttatgtaaatgttataatttaagatttctcaatttagaactataaattgagagccattcatagtttattaatatgtcattaatactcagtgtattcatgctcttgttatacatggaagttttataacttagaaaagtaacaaataatttttttttaaattttctttgagacggagtttagctcttgttgcccaggctggagtgcaatggcacgatctcggctctccgcaacctccgcctcctgggttcaagcgattttcctgcctcggcctcccgagtagctgggattacaggcacgtgccaccatgcccagctaattttttgtatttttagtagagacaggatttattcatgttggtcaggctgatctcaaactcccgacctcaggtgatcaggccccctcggcctcccaaagtgctgggattacaggcgtgagccactgcacctggccaaaataaaaatttttattagactgacttcctagacacctaactgtctttttaacttatgagaattgttctccttaacatactttagctgcatttattaattaacattaggcatttggaaatctaattgaatattttgaaatttttaactttatcatttacatatttttttaaccatgaatttccctcttagcctcctattcttatcttagaggatttctgtatcatcttataaaatgcttgggaagagcctctttgtataagcctgtttagcatcatgttttatcgaagggttagataatatatctgctctatctgctcatgttgatcttaaactatattttttctccttaggttgctaatgcaataaaggcttcattgcctcatggtcccatgaaatctaataaggaaggtacaaggtgtattcaagttgaaatcacaccaacttcctctcgaatatcaagaaatgcagtaaccagcatgtcaataaggggtcataggtggaaaagacatggtaagaaatacgtaactcttcaagtcaaaccattgttgattcttttacatttttcactgtacttatggtgctataacttctaacttcagtaaatagtaatctggaagaaagagctgtggagttgcccttaactcctaatttattatctaggagcaataggcagtaagaaaa

SEQ ID NO: 37813 - DNA, 2300 bp, Homo sapien
gaatttcctctctaccctgtttttttttctttggattctcaccatttaaaagaaacctgattgcattgtccacatgattaaaagctgttgtctgtccctcattgccttaagaagaaaatctaaacctgagctatccaatatgggagttgttaaagttaaaattaaaaattaatgccagacatggtggttcacacctgtaatcccagcactttgggaggctgaggtgggtggagcacctgaggtcaggagttcgagaccagcctggccaacatggtgaacccctgtctctacaaaaaatacaaaaattagctgggtgtggtggtgagttcatgtaaccccagctactcaggaggctgaggcaggagaattgcttgaacctgggaagtggaagtgcagtgaggtaagatcccaccactgtactccagcctgggtgacagagggagactctgccaaaaaaaaaaaaaattaaaaattgagtttcagccgtgtatggtagttcatgtctgtaatcccagcactttgggaggctgaggtgggaggatcacttaagcactctaccccagtttgggtgacagagtgagaccttgtctcaaaaataaataaataaataaataaatacattgagctcttcagtcacaccacatttcaagtatttgatagccacatgtggctaatggctactattttggacaacacaaatatagaacattttcaccagtgcagaaagctctgctggacagtgcttgtctgaatatcttagtgtagcttgtgaggtcttttacaatctcacctcaaccttttgctccagcccaatttttggccgttcctcatcatttaaccccatctaccttctcaacattccacaatggctctgtgccctttcacagctccatgcctttgaacatggtgttctccctttctgaaataccctttgactttcttctctggcaaactcccatttaccttttaagatccaactcaaacattaccttccttgtggagttcgctgactttcctaaacagtcatttcttgtcctctgtttccattgctcattgaaccaatctctattgtccttatcactgtagtttgttattatttactcattaatctgatcctccctttggagggggatcctatctgttttagcaatctgccctaataattacctgaaattgtttgcttgatacccttttgatatcaagtaatatatcttcttatttatgtgcttgttatttatgagttcagcatgtttgaaaagttcacttagtgtttctggagaaatcctgcccatttctagtgtaaagctagaatgaacttcctgtcttctagggtggaggtcagtttttcttctaattaatcctgaccagtcttgagaaggatgtggtaggagaggtttacaaggtcaaaaacagcagtactgtctgcaggcgcaggttcaggtgttctcgggttccagttattatacaaaacatttagtatatgttcagagaaaaagtagggaggaatgatggaaaaaataaaaacaacccccatggaaagaaaactgaggcatcgtatttgactttttccaggctaagcccaaaagcaatgatgtagtgagggggaagtttgtatttccattttgcaaaaacgtaatttttttttcctcccgggatttgataagattttgataaattcttgtgaatttaattacagggaagtaaatcctactgactagtaaattatcaatttgtttctcttttctcacaaaagagaaacaaattgatacccttcacatcatccggtaaggtttatttttttctgagaaggccataagccctaacggctcagaatctaagagaccttcgctgattgtcatcgcctagcggccaccgcaaaccttacagtcaatcaacttccctcggacgcccggatcacgcccattgctcagaccacgcccactcaaggcgcctcatggctccgccccaggcccagcagaagaagattctcattggtggagaagttgttctgatcccgccccggaggacggcgataggctgaactggcgtggggcggtggtggttggctgcttgaggacgggtccctggtcgtgcctgtcagagaggctggcggcagtggtggctctcccggctgggttgtcagtcagtgagaggagggggaagatggctcaccgggacccgttctgctaggaagaaggggagcaggtggtgctgctactcgggaggaagcagagcagcctccgtcgctgtcgctgagagcctcacgagtcgaggtcctgcaggtggagctccggcagccg

SEQ ID NO: 37814 - DNA, 2300 bp, Homo sapien
aacaaagatcaaaagagacaaagaaggccattacataatggtaaagggatcaattcaacaagaggagctaactatcctaaatatatatgcacccaatacaggagcacccagattcataaagcaagtcctgagtgacctacaaagagacttagactcccacacattaataatgggagactttaacaccccactgtcaacattagacagatcaacgagacagaaagtcaacaaggatacccaggaattgaactcagctctgtaccaagaagacctaatagacatctacagaactctccaccccaaatcaacagaatatacattcttttcagcaccacaccacacctattccaaaattgaccacatagttggaagtaaagctctcctcagcaaatgtaaaagaacagaaattataacaaactatctctcagaccacagtgcaatcaaactagaactcaggattaagaatctcactcaaagccgctcaactacatggaaactgaacaacctgctcctgaatgactactgggtacataacgaaatgaaggcagaaataaagatgttctttgaaaccaacgagaacaaagacacaacataccagaatctctgggacgcattcaaagcagtgtgtagagggaaatttatagcactgaatgcccacaagagaaagcaggaaagatctaaaattgacaccctcacatcacaattaaaagaactagaaaagcaagagcaaacacattcaaaagctagcagaaggcaagaaataactaaaatcagagcagaattgaaggaaatagagacacaaaaaacccttcaaaaaatcaatgaatccaggagctggttttttgaaaggatcaacaaaattgatagaccgctagcaagactaataaagaaaaaaagagagaagaatcaaatagacacaataaaaaatgataaaggggatatcaccactgatcccacagaaatacaaactaccatcagagaatactacaaacacctctacgcaaataaactagaaaatctagaagaaatggatacattcctcgacacatacactctcccaagactaaatcaggaagaagttgaatctctgaatagaccaataacaggagctgaaattggggcaataatcaatagtttaccaaccaaaaagagtccaggaccagatggattcacagccgaattctaccagaggtacaaggaggaactggtaccattccttctgaaactattccaatcaatagaaaaagagggaatcctccgtaactcattttatgaggccagcatcattctgataccaaagccgggcagagacacaaccaaaacagagaattttagaccaatatccttgatgaacattgatgcaaaaatcctcaataaaatactggcaaaccgaatccagcagcacatcaaaaagcttatccaccatgatcaagtgggcttcatccctgggatgcaaggctggttcaatatacgcaaatcaataaatgtaatccagcatataaacagagccaaagacaaaaaccacatgattatctcaatagatgcagaaaaagcctttgacaaaattcaacaacccttcatgctaaaaactctcaataaattaggtattgatgggacgtatttcaaaataataagaactatctatgacaaacccacagccaatatcatactgaatgggcaaaaactggaagcattccctttgaaaactggcacaagacagggatgccctctctcaccactcctattcaacatagtgttggaagttatggccagggcaatcaggcaggagaaggaaataaagggtattcaattaggaaaagaggaagtcaaattgtccctgtttgcagacgacatgattgtttatctagaaaaccccatcgtctcatgtggggaaaagcaagagagatcagattgttactgtgtctgtgtagaaagaagtagacataggagactccattttgttatgtactaagaaaaattcttctgccttgagattctgttaatctataaccttacccccaaccccgtgctctctgaaacatgtgctgtgtcaactcagagttaaatggattaagggcggtgcaagatgtgctttgttaaacagatgcttgaaggcagcatgctccttaagagtcatcaccactccctaatctcaagtacccagggacacaaaaactgcggaaggccgcagggacctctgcctaggaaagccaggtattgtccaaggtttctccccatgtgatagtctgaaatatggcctcgtgggaagggaaagacctgaccgtcccccagcccgacac

SEQ ID NO: 37815 - DNA, 2300 bp, Homo sapien
atgtgcattgcttttgcagacataatattattgcacacttaatagaccacagtatagtgtaaacataacttgcatatgttttgggaaaccaaaaaatttgtgtgattcactttactgcgatatttactttatgtggtggtctggaacagaacccaaaatatctctgaagtatgtgtgtattattaactcagtaaagtaattttaagtgtcttgtgctggcacccctctaagcatttttataaaccttacgccagttccatgtagtaggttctactttcacagataaggagactgaggcataacagaagttaatcaatttgcccaaagttgcacaactagaaagttgagatgtttgactttgcatccaggcaaagtctcatgcttaatccctgtactatataatctctgtggcctctttgagctctgaatcctatggctcttccatgaactttgatgttttatattcagcaatatgtaaaaagactgttctaacatcaaggactaaggatgctgttcctcgtttcttttttgccttattacaggacagcattctttttcatcacttacatttctgcctttgaatcacggatccttcatctcccaaggccttagagttagaagacagatttctacttcttttcaattaaaaaaaaaagaaaaaaatttattccgtttttcttcagtgtcctgggtcatttaataaagtgaatgaaaaattttctcatttataattttattaacaataaattattcctattgccagggttcacctgaaatccccaaatcaactagttaaaatagaggcacatctgagaacctctagattaatagaagaaagataaagagtacagagacataagtatcttactcttttgtaaaaattgaggcgtatatatagcttgctctttcatctggattatgctatatggtttgtcctcaacaagaaaagtatactgtgggccaggcctggccgctcattcctgtaatcccagcactttgggaggcctaggcgggaggattgcataacaccaggagttcgagacaagcctgggcaacatagtgtgacctcttcaccaccaccaccaccaccaccaccaccaccaaaaaaatttaaaaattaaaacttagcccagagtggtgttgcacgcctgtagtttcagctacttgggaggctgagatgggaggattgcttgagcccaggagtgctgaggcttcagtgagctatgattagccactgcaccgcacccccagcctgggcgacagggccgagaccctgcctccaaaaaaaaaaaaaaaagcctcaatggtgtaaattattttacataaaatgtctctgtatagtcctatatagaccgaggaggaaaaccaatgagatataaagttttcataatgttaaataatgtacaatttcaaataatcctgtatattactatacagtagaaagaatatggttacaaaaaacatttccatgagggctgtgattgagttccgtgttcccgtaaaacacttagagaagcctaactgaagatttctagaaccgactgacaactgatttcagttgtaaacacacagtaagccagcctagttaggcagacattcattgcacgccaaggagacaccaacgggactgtgtgctcttgcgttatgaatcccacgaaaataaatcttgtgctccgtgtaacatgactttaacttgcagtaatatcctttcatcatttaatatttattgagcgcctaccatacaccaggctcagatactgcactgaacaccgaccctgtcccatgaagccttacactgatgggagacacctttgcatgttccacaacccaattatcaaaaaaaaaaaaaaaaaaaagataatcacgtaaccgaaacctggaaatctgccttgggcacacaaaagagcaggcgcgacctcggaccagctccgaggcaaaattcactcagcgcgggacagcgacagggaatccggccgcacctgtgcctgcagtctcattgctcggaacggcgcgccactgtgacgtgtcaggccccgcccctgactctcctcatagtgcccccgcctccttgcgcgaagtgcgcaggctcctgggcagggctcgggttctgcccggggacgcagcccagttggtagcgtcgctccctgagcgtttctaagggggccgcccggccttgtctttcggcagtggccgagccaccgccgcctgccgcgcgttccagagctgggcgctgcagctgcactgccgatcgccgtgtttggtcgatagaatccccagtgtgcccagagagtgcgacccct

SEQ ID NO: 37816 - DNA, 2300 bp, Homo sapien
atactgtgggccaggcctggccgctcattcctgtaatcccagcactttgggaggcctaggcgggaggattgcataacaccaggagttcgagacaagcctgggcaacatagtgtgacctcttcaccaccaccaccaccaccaccaccaccaccaaaaaaatttaaaaattaaaacttagcccagagtggtgttgcacgcctgtagtttcagctacttgggaggctgagatgggaggattgcttgagcccaggagtgctgaggcttcagtgagctatgattagccactgcaccgcacccccagcctgggcgacagggccgagaccctgcctccaaaaaaaaaaaaaaaagcctcaatggtgtaaattattttacataaaatgtctctgtatagtcctatatagaccgaggaggaaaaccaatgagatataaagttttcataatgttaaataatgtacaatttcaaataatcctgtatattactatacagtagaaagaatatggttacaaaaaacatttccatgagggctgtgattgagttccgtgttcccgtaaaacacttagagaagcctaactgaagatttctagaaccgactgacaactgatttcagttgtaaacacacagtaagccagcctagttaggcagacattcattgcacgccaaggagacaccaacgggactgtgtgctcttgcgttatgaatcccacgaaaataaatcttgtgctccgtgtaacatgactttaacttgcagtaatatcctttcatcatttaatatttattgagcgcctaccatacaccaggctcagatactgcactgaacaccgaccctgtcccatgaagccttacactgatgggagacacctttgcatgttccacaacccaattatcaaaaaaaaaaaaaaaaaaaagataatcacgtaaccgaaacctggaaatctgccttgggcacacaaaagagcaggcgcgacctcggaccagctccgaggcaaaattcactcagcgcgggacagcgacagggaatccggccgcacctgtgcctgcagtctcattgctcggaacggcgcgccactgtgacgtgtcaggccccgcccctgactctcctcatagtgcccccgcctccttgcgcgaagtgcgcaggctcctgggcagggctcgggttctgcccggggacgcagcccagttggtagcgtcgctccctgagcgtttctaagggggccgcccggccttgtctttcggcagtggccgagccaccgccgcctgccgcgcgttccagagctgggcgctgcagctgcactgccgatcgccgtgtttggtcgatagaatccccagtgtgcccagagagtgcgacccctcgcccggcccggcgagccccgggcgtgaaccgagctgagggaggatggcagcctctggggtggagaagagcagcaagaagaagaccgagaagaaacttgctgctcgggaagaagctaaattgttggcgggtttcatgggcgtcatgaataacatgcggaaacaggtaccgcctctgtgggagtgacggacgacggtgggaggtggtccggggctcgggcccctggttcccggggtggaaccccgcgccctgtggatcgcgcccctctttctctgtcctcgcccctccttccgttttcgcaggcgagcgattccgcagttggtagaggggcgcgtaaaacaattctcgagcaaaagtgcttctcgtctgccgaggatgtagctcccaagtcagactcctgggggactcctcaggctggctttcgccgtcgggtatcggttgtgtaacagctctgccctagttatctctttgtggggcgaggatccttccattggcgagccgttttaaggtgccgtgagatcttgtgtgaagaaacccgttggcatagcccaaaccgaagcccccaaagggaggagagttgctggcctgacatcagctgctcttaaataaggatccccgccccctcctgtgttccccggtggagctagttgaagaggagtcctcctgttcgtgctaatttagagcagaagcagccatcgataaataccatgccatcttctaagggcactgtgcgcctctgttattaagaggagctctttgttctgtccttggtgtgtggtgcattcgtgaaattctgcagcacatcggcgaaaggtgggttatgaaaagaacggattttaacgctggcgaaggtgaaacaaagaggctttttttttttttaattccataacatctacaccgataagcatagaaagtcactttttcctttctgtaagctttatttatagataa

SEQ ID NO: 37817 - DNA, 2300 bp, Homo sapien
catgccaaaccactgacaacaggagaacctggcagattaaggtcagttaatcattgtggaggggacccctggttgttcaccaggtaaccattttttccttcctactcagtaacagaaccctgatttttcagtaattgtacttctattgtaacggtaaataagtgatgttaatatactccaaagctaagaaatgtgagtcactttttaaatccaaagagctaaacggacagtctcagataatcctctgctcctcaagtaaatatttgctgctgcaatccagtttcaccctatttagggattaaggcaatgctttacaatgctatgatccacgaatgaaaacatatattcgagggagtgggagggaacctaatgagtcttcaacgagtttaagccctggttaactatgttcaactaccattacaggcaggcaatagctaaatgcaccagcaatttgaagtctgtggtattgtagatacaaaaaggtttacatgaaaggaacatgaatttgaaaatagatacatgaaagtcagttacataaattaacgaattcaggcattcacagtacttcagcacaaaggccaggccaggaaagatttaaaagcattcccacagactgcactggtgcactgtagcaggagctggtgaacaaagacaaaatcccagcagtcagcgtttgcttatagaaaccagaagttaatatcttcataaaaatcttaaattcctctactgttgcccatattcccagcagaaccaccagacaaagcaaactaggttttgcagttacacataactcacatcctgctttgtccccttgaaacaggatcccagtcaacaaaacccaaacattcccacaaatctacttagatgtgtattatctataaataaagcttacagaaaggaaaaagtgactttctatgcttatcggtgtagatgttatggaattaaaaaaaaaaaaagcctctttgtttcaccttcgccagcgttaaaatccgttcttttcataacccacctttcgccgatgtgctgcagaatttcacgaatgcaccacacaccaaggacagaacaaagagctcctcttaataacagaggcgcacagtgcccttagaagatggcatggtatttatcgatggctgcttctgctctaaattagcacgaacaggaggactcctcttcaactagctccaccggggaacacaggagggggcggggatccttatttaagagcagctgatgtcaggccagcaactctcctccctttgggggcttcggtttgggctatgccaacgggtttcttcacacaagatctcacggcaccttaaaacggctcgccaatggaaggatcctcgccccacaaagagataactagggcagagctgttacacaaccgatacccgacggcgaaagccagcctgaggagtcccccaggagtctgacttgggagctacatcctcggcagacgagaagcacttttgctcgagaattgttttacgcgcccctctaccaactgcggaatcgctcgcctgcgaaaacggaaggaggggcgaggacagagaaagaggggcgcgatccacagggcgcggggttccaccccgggaaccaggggcccgagccccggaccacctcccaccgtcgtccgtcactcccacagaggcggtacctgtttccgcatgttattcatgacgcccatgaaacccgccaacaatttagcttcttcccgagcagcaagtttcttctcggtcttcttcttgctgctcttctccaccccagaggctgccatcctccctcagctcggttcacgcccggggctcgccgggccgggcgaggggtcgcactctctgggcacactggggattctatcgaccaaacacggcgatcggcagtgcagctgcagcgcccagctctggaacgcgcggcaggcggcggtggctcggccactgccgaaagacaaggccgggcggcccccttagaaacgctcagggagcgacgctaccaactgggctgcgtccccgggcagaacccgagccctgcccaggagcctgcgcacttcgcgcaaggaggcgggggcactatgaggagagtcaggggcggggcctgacacgtcacagtggcgcgccgttccgagcaatgagactgcaggcacaggtgcggccggattccctgtcgctgtcccgcgctgagtgaattttgcctcggagctggtccgaggtcgcgcctgctcttttgtgtgcccaaggcagatttccaggtttcggttacgtgattatcttttttttttttttttttttgataattgggttgtg

SEQ ID NO: 37818 - DNA, 2300 bp, Homo sapien
ggaatttttttttctcctttttcgaatgtgtaaaggagcttaaagggggtcccattggccaaattggagatgatctgagcatcaaaataaataatgatagtaatggattataacccattgaataacattggaaatcatgagtccatactgatataaataaataagtgaatgagctaaaagttggatgaacaatcagatttttatatactttcaaagtacctccccacaaaattcttattaataacaaaaaggaaaagaataactttatggtagagcagcttggcagacaccaccttaagcaagtaatccattgagcattacaggtaacaggacaaattgaaattgtgcacaacctgcaatgtgaaaaccgcagcatcacttctgtgataatcctgacaaagatgcataatctgaatctaatcaagagaaaacatcaaacagacctgcactaaggaacctctacagtataagcagcctgtagtctttaatagtgtcaaggtcatgaaaaggaaaaacaaaaaatcttccaaattgaaggagacacaagaaatatgactaagcaacaatgattccgaactgaacccttttcctctaaaggacaatattgggacatttggcaaaacataaatggagtctaaggattagagagtagtagtgcatcagtatcaatgtcctaattttgttggctgtgttgtggttatgtagaatgccctggtttgtttgtagaaaatatacaataagtatttggatcatggggcattaggtctgcaacatagtctcaaatggttcaggaaaaaagttctttgtactgttatttgtaacttttccataaatttgtttcaaaataaatgaattgcattgattaaagaaaataaaaaactagtttggacaagtagttcccgtcctgtagattctgctgtcttcaaaatccaaacaaattacatgagcaagaatgatggctcactcccagctcaataatcctaaaaccaccagcacaaacctgtaatccaacaaagtcagatctattgacttattgcaatcaagaagactgcacaccagaggagctgtggtgtgtctcaccgtacaaaataaaaggtagttattgtatgttttggcggggagagtgaagtttaggtgaaatttaaatgaaatctcaaagcatagctgtgtgtaaaggcattaacatcaggtctggacgagaattgaatgtagggcatgtttccttggaaactgcaaagttaagaaaatacagaatgttttcagaaccgtttatctgaagctctacacctggatagaaattgaggctgcttctctgcgtcaaagagacttagatcctccaggcaaggatgggacttttcactcgttctgatataatttcaaatagcaacgtttatgtggacttgaaagaacaaggtttcggccagacgcggtggctcacacctgtaatcgcagcactttgggaggcggacgcgggcggatcacgaggtcagaaaatagagaccatcctggctaacacggtgaaaccgtgtctactaaaaatacaaaaaaattagccgggcgtggtggcgggcacctgtagtcccagctactcgggaggctgaggcacgagaacggcatgaaccttggaggcagagcttgcctccaagctctgccactgtactccagcctgggcgacagagcgagactccgtctcaaaaaaaaaaaaaaaaaagaagaaataacaaggtttctcagtgtgtagtaagaatgtacttaagtggtaatacttttccgttgcagcatgtcctaaaagaaacattgtttcctcttaacgtcgtctggctttatttgactctgttatccatccagatgaaaggctaggcagtttgttactttctcagcccaagctaagttttaccgtctcagcaagaacgactcagtctctcaaatcatagctaattctcctctgagggccttgctgaagttctgcgtttgcttgctccgctttcctctcattttggacctccagccttcctgtagtccgaggccctgcaccggggtcaaacgcgcctccggtcttcacgtaaccgttcaagcatccctccttcccaggacacactcaaagcgtcagagcggtccgctcttctcaagtcctattggctcaagtccatgcgtctcatggcactgccgggtgagaggcggaaaaaggccttcccaggcgcgagaagatgacgtcacagtagcccggccgggcgccgaggttgccttagggctctctgcccagtaacaggcatcgaacggtgcagactgaagacgccctc

SEQ ID NO: 37819 - DNA, 2300 bp, Homo sapien
tgggaggctgaggcgggtggatcacaaggtcaggagttcgagaccaacctggccaatgtggtgaaaccccatctctactaaaaatacaaaaaaaattagccgggcttggtggtgcatgcctgtaatcccaactactgtggaggctgaggcaggagaattgcctgaacccaggaggccgaggttgcagtaagccgagatgatgccactgcactccagcctgggcaacagagcaagacttcatctcaaaaaaaaaaaaaaaaagaaaaagaaaatcataaggataagaaaatatattgaccattcacatagtggaagtggatcatcataaaagtcttcatccttattgtctttatgttgagtagcagagggataggtgggtgtggtcttgctgtctcaggagtggcagaggcggaagaaaatccctgtacaagtggcccctgtacaagtggaccctgtacagctgtgtgtacagttgacctttgaacagaactgcaagggtccacttgtacagggatgtataagttgttctatgtgtgtatatatgtatacctatgtgtccggaattggtgggttcttggtctcactgacttcaagaatgaagccacggaccctcgcggtgagtgttacagttcttaaagacatcgtgtccggagtttgttccttctgatgttcagatgtgttcggagtttattccttctggtggggtccgtggtctcgctggctcaggagtgaagctgtggaccttcgcggtgagtgttacggctcttaaggcggcccgtctggagttgtttgttcctcccagtgggttcgtggtctcgctggcttcaggagtgaggctgaagaccttcgcggtgagtgttacagctcataaaggcaatgtggacccaaagagtgagcaacagcaagatttattgcaaacagcaaaagaacgaagcttccacagtgtggaagaggagctgagcgggttgccactgctggctggggcagcctgcttttattctcttatctggccccacccacatcgtgctgattggttcattttacagagagccaagtggtctgttttgacagggtgctgattggtgcgtttacaatccctgagctagacacaaaggttctccaagtccccactagattagctagatacagagtgtggacacaaaggttctccaagtcccaaccagagtagctagatacagtgttgattggtgtatttacaaaccctgacctacacacagggtgctgattggtgtgtttacaaaccttgagctagacacagagtgctgattggtgtatttacaatcccctagctagacataaaggttctccaagtccccaccagactcaggagcccagctggcctcacccagtggattccacaccagggccacaggtggagctacccgccagtcccgcggtgtgtgcccacactcctcagcccttgggtggtcgatgggactgggtgccggtggagcagggggtggcgctcctcgtggaggctcaggctgctcaggagcgcacggaggtgagggggaggctcaggcatggcgggctgcaggtcccgagccctgccccgcagggaggcagctaagacccggcaagaaatccagcgcagcgccggtgggccggcactgctgaggacccagcacaccctccgcagccgctggcccgggtgctaagcttctcattgcccggcagggccagccggcagctctgagtgtggggcccaccaagcccacgcccactcggaactccagctggccagcaagggccctgggtagctctggttgccactcgcgcctctccctccacacctccctgcaagctgagggagccagctcaggccttggccagcccagaaaggggctcccacagtgcagcggtgggctgaaggtctcctcaagtgccaccaaagtgggagcccaggtagaggaggtacccagagcgagtgaggaatgtgagggctgccagcaagctgtcacctctcacctatacatatatacgtatacatatatatgattaggatcataatctagtttttctttgttttttgttttgttttgtttttttgagacagagtttcgctctttgttgcccaggctggagtgcagtggcgccatctcagctcactacagcctcggctggccttccgggttcaagcgattctccagtctcagtctcccgagtagctcggattataggcatatgccaccacgccgagctaattttggtatttttagtagaaacagggtttcgccgtgttggcccggctggtcttgaacttctggcctcaggtgatc

SEQ ID NO: 37820 - DNA, 2300 bp, Homo sapien
tgctatgtgccagacaatgtcctaagcattctgtatctagtatattagcaaattgcctcatcacaaccatataacctaggtgctattataacaattctcattttcaaaatgagaagagcaagatttggagacattaaatgacctatccaaagtcactcaacttccaagtagttgagttgtaattcaaacactgaatttaaaggggccatgctttaaaccactctgctataccacatactagattatgaggacactttgtcttttttttttgtattttctacaatagcattacctttatatgtttcccccatttttcctcatatgagtacaatttgcagtcccaccccaaacttactgaatcagtctgtattttaacaagacccaccaaatgatttgtatgcacatgaacatgtcagaaactatttcatgtgtaaaggagatgtacaaaaatgtacacagtattgtttatatagcaaaacagaaagcaccagaagtccatccacgggataatggataaactttggcataatggaatataactgtataatgactcaagttacttgtataaacaaccaccaaaaagggggaaggtacagaatagtatgtatgatataccatttaaagtacaaaagagcaaaacaatactgtagtattatgtatggattcataaacacaggaataatagcatgtggataataagcactgatatgagttggctgtgtccccacccaaaatctcatcttgaattgtaataatccccatgtgtcaagggcaggaccacgtggagacaattgaatcatggagctggtttccctcattctgttcccacgatagtgagttctcatgagatctgatggtttaggggcttccccctttcctgggctcttattctctctgctgccgccatgtgaagaaggatgtgtttgcgtctccttctgccatgattgttaagttttctgaggcctccccagccatgcaaaactgtgagtcaattaaacctcttttctttataaatcacccagtctttattagcagtgtgagaatggactaatacaagcaccaaattcagaacagtgtttacctagggaaagaaaaaaagaaatgggatctgaaaggcacagacagggagctttatatgtgacttaaaaaaaaaaaaaagcttaatatgagaagcataaaatttgacagagctgggcatgatggcacaaacctgtagtcccagctacttgggaggctgaggcaggaggatcattttggcccaggaggtcaaggctgcagtgagccatgatcacaccactgcactccagcctgcatgacagagtgagtcgctgtctcaaaaaaaaatttttttttaattgacactgggtgatgagtagtacatagtaatacgctgttgttttctatactttcccacatgcttgaaataagtctgcaaacttttaaatatttgatttagggggaaaatgcctttttccccaccctaaattgtgtattatcaagtcactttcagatttctgcagtgatcactgtgaatccactggtttgccaaatggtgtccaagcctgttggattaaatatgtcatgctgatgaggcttgtcattcaaacactgaagcacaggagtaaaactagagaactgactgtagaggtggaaaatgtaatttttgctatcagactaacgaaatataaaaggtacacatttgtggaacaaaataaaaatctttgattcactagttgtgtgtttgtttctctaattacactggacgaggaaaataatctagaatcaacatattaagtagttaccttgaggctcttttctcaaccacacatcatcaaccacctggaaatctgttcctttttcctggttatttacaatgcaagcagcttttagccctggcagcacagaagcagaagaattgaggaattctctgccactcctgtagtatcctttaacaggttaagtggttgtcaagcttcttttttaaatttgtaaacctatttgaatcaatttgtgactcctgcattccggcccggcagaaagagctcgaagagacgcagagcgcggcgcgctcccccacggccctccaggccggcgggtgagatggggagatgagctagggggccccggactggctgcgccctctgccctgcagacacggggggccccgctgtggctgcccactggccgggcgcaggcctcgaagccgcggcgaacctctcttccccaccccacctcggtgactgttggcggcggctctccctgcccagaccccgccgccggatcctgcccggcctcgacga

SEQ ID NO: 37821 - DNA, 2300 bp, Homo sapien
aaacaagaaggtgatagtagcctaaaacaacagctaaagaagttggagtcccagagatgtttgctttccctatagaaattaaagatagtatcttcacgtatgtccctgagttgtctttcagaggcttggaccccctaactgaggaccccccaaactgatcaggggcatggcaggtagaccccagataagggggaaatgaagactaaactttattgtcctttgttctaagttttttcctgaagggcttggagaaagtcactccccctaaccagttaactctactggctttacatttttaaacaaagtttctcttccttagccaattgcaaaccagaagatgtttaaatctacctatgacatgtaagcccctagcttcaatatatctcacccttttcggccaaaatcaatgtggagcctccatgtattgatttatgatttgcctgtagcttctgttttcctgacatttacccctgcccttaaaaaccttacctgcaagccatcaaggagttagagacttaagcataagctgacgatttcccttgcttggcaccctgcagtaaatgccttcttttctatcactgcaaaaacctcagtgtgagtatctggttttactgcactggaggagcaggccccagttcacttctataacctgtgtgaacctctcacattggtccttcaggctgaggtcaccagcagcagcttccctgacctccactctttcagcctttccaataactccctacagtaaaagtctcctaaatggaatacacagaggctcttctgatatcctgatccaaccgtgatacagagatctaccttgctcgttttaacagctgaatagtatcccagtgcctaactgtcttataatgaatttaacttctcccttaatgatggacacttgggtttttctagcaatttactaacacaattaatgtcaggatgaactttctttcttgcacacacatacacacatacaagttctttatttgccaccctcaagcacatgactgctgaattgtgctttaaagaactttccatcacaccacgaacatgtcacattgttaggttcgtgtgatcactatgaggaagaggagggggaggggaccatggaggccgtaatgtctagactctttcttccctgtcttcagttcaccaaatgtagttcaactgtggacaaaggggctctttgaagcgtcctctaaatgtttaaaattttgtttttagagataggatcttgttttgttgcccaagctggtcttgaactcctagcatcaagcattcctcccatttcatcctcccaaagtgctgagattacaggcatgagccaccacaccaggcctatatttatttatttattagttttttgaaatacagtctctgtcacccaggctggagtacagtggcacaatctcagctcactgcaacctccttctcccaggttcaagccattctcctgcctcaacctcccgagtagctgggactataggtgtatgccaccacgcccggctaatttttgtactcttagtagagaccgagttttgccatgttggccaggctggtcctgaactcctgacctcaagtgatctgcctgccttggcctcctaaagtgctgacattaccggcgtgagggattaccggtgtgagccaccatgccctgcccctaaatttattttttaattgtcaagttgttaccagcagtgaatccatacaggtctgcaacaacctcagttcttgcctcctcagaagaaagaattcgaccaagggggcataaggtagagtgagagaccaaggcaagttttacaacagtagtgaaagtttattaaaaagttttatggcgggaatgaaagaaagtgaagtacacttggaagagggccaagcggacaacttgagagagtcaagtgtgctgtttgacctttgacttggggttttatatgttggtatgcttctgggggttgcatctcttctcccctgatccttcccttaggttgggctgtccgcatgcgtggtggtcggccagcacctgggcggggggaagcatgcgcagtatgtttactgaggttgtacgcatgctcacttgaggcgttcttcccttaccagcgcagtgctaccagaggaagctaaaccagttaaactacgccattttgcctcttagtgggcatgcttgagtccactcacccaactcctgatatcttattcgtaagttgctaatcaccaatttcagatgtttctatttattgggagacaacctttccctggcactgcgaccaattattattttagagagacagcttaacaaccgc

SEQ ID NO: 37822 - DNA, 2300 bp, Homo sapien
atcaaccattgattatcaagaaacagattatccaacttgtagttctttggaatgaagatctttctcttgttctcttattcacctctgtccagctgcctacattttgactcttgtcctatcagtgcctcttctctttgatggtgcagggaaggaaaaaagacataaaagttgatttgatcattgtgtctccctaaacaaaacgaaggttttgttacagaagaatttaacacttccaatttatttagagacggggtggctaatctggctagaaatatgagccagaactgtgtctgcaacaaaggacaaaaatatctttaaaaatgttaatagtagcttttccttaaattgaaaaggtgtttttttttaattgtaaaagttatgtgtttgtcataaaaagcaaatagtgctgtaggcagctgaggtgggaagatcacttgaggccaggagttcaagaccagcctgggcagcatagtgagatttttgtctctacaaaaaataaaaagcaaataaaaaattagccgagtgtggtggtgtgtgcctgtagtcctacctacttggaaggctgaggtgggaggatcacttgagcctaggagttcaaggctgcaatgagctataatcatgccactgcactccggcctgggcaacagagtgagagcctgtctctaaaaaaaaaaaaaaaaaaagtttttaagtaatttaaaaagcaaataactatatacattattcgctttacattacatgaaactaataagtatttccattattcctttattcatcaatatttgaaaattgtttcagtcatgaataatgtgttcctttcgttgttttccccttcatatttgctgcaaaggctgtaaaaggcactctacagagttgtttgccgccttagggatggaagtcagccactcctgctgtatggattttagtttcataggctatttccattcctccttgacacactgaaccataaatcaataccccaagttttaccctcacctgcaaccaaggtttctactgcactgaaaatggccatgtgaatgtgagtttgagaaaggtcacatatggtaaagttttcatgttgccacattttctgcatactctgtaaccaggaatgatttgactgtataaatttatcttacagacacacttgtttgtacatttaatgcctgctttctataatatgaaaaaatacacagaacgttttatgcaattggctctgagtaatgcaacacataaatgctttgagagcagttaccaaaaattatgcaggttattacaaaagttatatggaattgcacagatattctaaatgtgcttttgagtaaatttctcagctaccagaggcctgggcagctgtttccagcacatcctggcacaacattcatgttatcatccacttatgtattccacaatttcaaatgattgataagacacctcccccatctttgcttcctcttggaggaaaaaaatatacaagcaatcacgagcacaggagcaggtggacaactacatcttaggaaagggtgcgtaactgtgaactctaaacgtgagctgggtgcctgatgcagtataggaaccacagtaagtcgataatcagtgaggctggaggattgaaattttatttggtaaagaatattgagccaggcgcggtggctcatgcctgtaatcccagcactttgggaagccgaggcgggcagatcacaaggtcaggagatcgagaccagcctggccaacatagtgaaacctgcctctactaaaaatacaaaaaattagccgggcatggtggcgggcacctgtaattccagctactcaggaggctgaggcaggagaatggcttgaacctgggaggtggaagttgcagtgagctgagatcgtgccattgcactccagcctgggagacagtgtgagactccatctcaaaaaaaaaaaatgaatattgaaatagagtctataggaaaaaaactccttgaatctagtaaatgtggaatcacaaaattgaaataatgtgcatctgaaaagtgaataaatagatgccaagaaggagtgagtcataagcacatgagttgtaagaggttgaacttgagagaccagatcaggcagtgccgcttaataccatcacatgatcctccccgaggccctgtatttaattaaaatagagagggaggcaccacagatgccagaagaacactgttgctcttggtggacgggcccagaggaattcagagttaaaccttgagtgcctgcgtccgtgagaattcagcatggaatgtctctactatttcctgggatttctgctcctg

SEQ ID NO: 37823 - DNA, 2300 bp, Homo sapien
tggctcacacccgtaatcccaacactttgggaggctgaggcgggtggatcacttgaggtcaggagtttgagaccagcctggccaacatggtgaaaccccgtctctactaaaaatacaaaaattagctgggggtggtggcacgtgcctgtaatcccagctatttgggaggccgaggcaggagaattgcttgaaccctggaggcaaaggttgtggtgaaccgagatggtgccactgcactccagtctgggtgacagagcgagactccatctcaaaaaaaaagtatatgcaaagcttggcattgaaaggatatggtgaggttgccaggcatggtggcttatgcctatactcacagctacagtggggtagattgcttaaggccaggagtttgaaaccagcctgggcaacatagtgagatcctgtctttaaaaaaattaaaaacaaaaattagctggccatggttccacatgcctgtagtcctagctaattgggaggctaaggcaggagcaccgcttgagcccaggagtttgaggatgtagttagctatgattgtgtgactgtactccagtctgggtgacaagagtaagaccccatctctttaaaaaataaaaataaaaaagggtatggtgagtttgaaaaacagcaaaaagcagataaagcgaaaatgattgtagttgatagaagggcagcatggaggatgaaaagagtagaaacagactggagacaggaaagccaggtaggaggcagtctctgtaattaggcaagaactaatgagggtgtggactaaggaagaaacagtggaaatgaagacaagaagctgaactcacagaaacattttggaggtcacataagcaggattttgacaacagattcgtttgttgtatgaagatcctggactgaatgaagtctagggtttgggagttttgaagggataatgacccattaaatgagctggcaaatacaggtggtaaagcaggtctgggatgttcagagaagggtgggaacacggaatggatgccagaagctgggagaaaagccaagttcatgcctgtggaaaaatggaattgaggatggggctaaaattggacagaggaaacttaatctgtaatgtttttcttcttttcaaaaataacttgaagtggttgtacatatctggtgtgatatacacaaatgcttaatttctctatttttaaaaaacttcccaaaattagtgcttggaattatttaaaataatgtagcaaacatttttggagtgcctgctatgtgtctggcactgtttcaggcatttgaaatatttgctctctatgaagccttcctttcagcagttagcaggcctggagttcagaagccagaaactggcttctgattctgacgcagtcagtaagtgtatgacctgggcaagttgcttccctgcggcgtcccacgcccccaaaaccccccacccccccacccgtgccaggaatctatcgcagttctcaagtcctgtgacttaataccgcagctggcacctcagaattccttattcttacagagctggtccccacagtaccgcccctgggcgtaaactcctccatacagggagtgtagatgatgggctgacctaagaacggtttccaaatggtcctttacacctctgcctcccaccccactctagcccaggataacagattttcctcgcgcaatttcaaatttgcaagggaatcttgaatattttctggtaatgagagagggtagattatatgtcctaatcccagcctaatcagattaacagcaacttctggacattcagtaccaggaactgttttaggtgctgtggagagaagagttaaaaatgaaacaaaaattattgccttcatgagcctcacattagtggacagagtccaaaaaaaaagtgacaacgtaatgcgctactgcgacacaaagcaaagcaaggtgggcaagcaacactagttctttattcccgcacgccctaatccccaagtagctcttccgggtcactgcagtcttcacgggctccagactccgcccatggtccgtccttcaggccttgactccgcccacgcatcgacgtagaatttcccggccgggctccatgaagtaccacccacccgcgacgccgacgcaaggctgctgctatggggccgggcggccgtgtggcgcggctgctcgccccactaatgtggcgcagggcggtttcctcggtggcggggtccgcggttggagccgagcccgggcttcggctgctggccgtgcagcggcttcccgtaggagcagcgttctgccgggcttgccagaccccaaac

SEQ ID NO: 37824 - DNA, 2300 bp, Homo sapien
ttgctaaaagatgtgtcatatagcctgattccttttcccacccctgccccttttcaactttcagagcactagacaaactgaatggatttcagttagagaatttcaccttgaaagtagcctatatccctgatgaaatggccgcccagcaaaaccccttgcagcagccccgaggtcgccgggggcttgggcagaggggctcctcaaggcaggggtctccaggatccgtatccaagcagaaaccatgtgatttgcctctgcgcctgctggttcccacccaatttgttggagccatcataggaaaagaaggtgccaccattcggaacatcaccaaacagacccagtctaagtgagtatgctgagtgtgtggtgggtgttcatgagaattccccttggaatcttagtaacagtgtgtcgttctggtacttggtgcccttctgaacacagccatgaggactccttgtacagtacttgggaatgtgtaaaaatcttgcagtatcttggtgttcatttcatataaatctggagctaatcctcattctcaaagggaacgtcagattttcacacatgaatggaaaacaaatgatacctaatcctcttctggttggggaagctctggaagacagaaaggcagcttccaggttgtcctctgtcccaccccttaccccccacctgccctcattgtttttggaagtaattttctgggtccaatccattttatttgtggcctcaatacagaggtggtttttcagtcttgccttactcgaataaagaatcgctcatcttatttgtccgaatttttcctctgattaagccatgtaattagaatggctttttcttctggatattttttgatggttttaattggtgggatttaagggattggaatattcccattcaaatgttggagctaattatcaggagcagaaagcgggaactatttgttttattcactactgtagccccagggccaaggccagggccctgctacatagaaggatcttttatttgtcaaatgactaaaatgactgtatgtgaattatgtttgaagcctttcatgtgtatctaagatacttctcagttctcatgcattatatgttgttttgctttagaaaccatactgttgtacagtatgtggatattttttgacccaaagaagcttggtgacaaactcttccccccatacctagctccgtaacgtgctacgaggcacatcctgttactactgtatttcctgaagaacctgtgagtgtgctgggaagaagaggttgtatccaaaaataccattgtgcaagccttgagccagctacagaagtggcaagattatttttccttttaaatttagaaaggagaattcttttttttcagtgtgatccaacgaaataagcttaatctttctctaaaagttagaactgcactgctgtgtatactttatgtgtttgttccagcaggcctaagaggacatgcatgttcatcataggcaccatgcctgcattggactagctgacccatttctcatgtagaaccaaaaagaactgtactgagtggtggtccatacccacctgctccctgcagtggcatctgatcctgccttcccctgctttgaagcaggagatgttgggtgctggttacctgaatgcaaaattaatcgccctgacctcatcatgtaggagtgggaaagacaactggaccataacctagtcagtcggcctggctttaatcttaaaatttaagggcttcttgcttcccttgatccaccgttacctgcagaaattcattatatggcttcccttccttctcatgtagcagattagaattgttccttttcgagctactcatttccctgtcagatgaaagagctgtgacttaaattgaactgtttgttttacttaaggcaggaagatggggataggggaagggaagcaatttttgttatatccgatgattcatttgcagagctctgccagtggatttaattaactcttgacattgaaattagtcattatcagaacctcgtttctggaatggtctcagagggccattctaatctccaaagccacattcctttctctcaggggatcggagcttagtaatccttagcacagtgaaagggtgaaaataaactgcaaagagggatgctaatgtgttgctggaagacaggcatccctgaaagtgactggggattgaaacagcagccgggaagatgactcctaagattgggactgttatctaagacactatttttttattagttatttttaggtagcccttaatttgtttcatgcccttatttttagttttat

SEQ ID NO: 37825 - DNA, 2300 bp, Homo sapien
atttatttttgactctcagttctattcatggcttcttttctccaactgtatatgtctgatattcttcacactttttgggcaaacagttacagtgtgttgattaaagatttatcatccaatttctttttcccatctgtgtagtcttgtaatttaaaaaaaaaaacagtactgaatatattgcatgtaatttcctgcttttttctcacttaaaccttaagccttttcacacattaaacattgggagttagtcgggtatggtggctcacccctgtaaatcccagcactttgggaggctgaggtgggcagatcaccaggtcacgagtttgagaccagcttggccaatatggtgaaaccccttctctactaaaaaatacaaaaattaggcgggtgtagtggcgtgtgcctgtaatcccacctactcaggaggctgaggcaggagaatcacttgaacctgggagatggaggttgcagtgagccgagatagtgccgctgcactccagcctgggcgacagagtgagactctgtctcaattaaaaaaaaaaaaaaaagggaataattctcacttttgttctgatttataacaacttaaatcgttgaattagtaggtctttttaaaaaacagctttattgaagtatgatggacataaacacatctttaaagtgcacgttttgataagttttaacatacatatacacatgtgaaaccattaagatttacctatgatgtgtgagtcaagagcctattccctttcatagctgagtagtggtttgttgtgtagatatactactatttacttgtttacctgttgaacatttgggctgtttccagtttttaactactacaggtaaaggtgctatgaacatttatgtgtaggtctctatgtggatgtttgcttttgtgaggacccacttgtaacccccagagatagtatgaagattattttaaactaaagacatttgagattcaacagatgcagaaagaagcctaatcagaaattccttactttaactaaaggcagaaacttctgggaatgaggctgctaaaaatctcctcccttggggaatgttcttggactggaaaaaaaaaaaaaaaaaaaaagatggagaagaccactcatctgcataaacaaacattacgacaaaatttatctctgttccccttgaaaccgatttattttcccatagaagccttttctcccgtatcctttttcctcggttaattgagtttgtaaactcccttttttagctgtttagagtactgcttttgtgcacttccatatgcgtatgaaaaagttttggttttttcctcctgttcatctgtgcattgtcagttgaatacgtaggccctcaattactgaacctaagttgataaaggagaaagtttttcttcctggtatattcatttctctcaggtaaatacacaggggtggaataactggatcatatatttaatgtttttaaaaaattctaggccgggcacagtggctcaagcctgtaatcccagcacgttgggaggctgaggcaggtggatcttgaggtcaggagattgagaccatcctggctaacacggtgaaaccccgcctctactaaaacaaaaaattagccgggcgtggtgtcgggcacctgtagtcccagctactcgggaggctgaggcaggagaatggcgtgaacccgggaggcggagcttgcagtgagctgagatcacaccactgcacttcatccagcctgggcaacagagcgagactccatctcaaaaaaaagaaaaaaaaaattctaaacttttccatagtagttgtgccactttatgttctcaccagcaggtccagtccttgacaacacttggtggtttaatattagccattctaaaattgctctgcatccttgccataggtgtgtagtatctcattgtgtgagtatgtgtgtgtgtttataataactttattgagatattcacataccaagtggcttctttctcttagtataatgctctcagtgttcatgggtattgtagcaggttttcagtgctttgttccttttttaaaatcagataatttaaatcagataatttaaaacaaattgtagaataaccataggtttacagggaagtagtacagatagtgtagagttcccacacaccctagacccagtcttctctgttattaacattaatacttgagtatggcacatttgtcacaattaaagaaccaaattattatttcatggtttatagtaaaccaaattccatattgttactcagatttccttagttcttacctaatatcctttatctgttccatgat

SEQ ID NO: 37826 - DNA, 2300 bp, Homo sapien
ttcagttacaaatactgtaacagaaaaacacgtctgtccccctattttataaagtaacaacattttattaaattaaacgtgaatgaaattattgtgaaagtgtgtttacgtttaaaatgttggattcgcttggcaggaaagaaaaacctgtaagaaagaacagttgcatttaaaatggatgatctgacaccttccggttccttaacacaaaattacaaagtaagttccctttaaaagacaaaatgtaaatactctttatatcatgcaacaattcccatgtttaagtctaccattcatcttttaaatgaaaaatacacattttaaaatgctaacaacggttttgacagagaagcaaggctgtatcaattaccgaagatgtttccagtgtaaatcataatatttcctctattcaggataccttttttctaccagtaagagtaccaagtcattaaagattcttgtctatattttcatgttatatagaatttctttcacttaaaaaattagaattttctatcttttcaatagaatacctgttaaaaatatacctgttaaaaacacacaagtatctggtgcaaatgaaacctttgagtggagtacacaatctttaaacgacagttggagattccactagaaccccagcactgccttcgtttccgtattgctcgtctccagttcacattttgttggcccacaaggctccaccgggcccaaatcctcccccgacaaccaccattgtactcattacatatagagaaaattatgtatggctctcatggccaaatccaggcagaaaagaggcagaaagagactcgaacaatttttcaaatgcgaataccacctaggggtaatgcacgacggtcttccagttttaagtctcaagttctccaactaaaattacttaaataaaagtaccagcctactccactcctccccctttaaaaactacaggaagagagggtttccctttaccgacttttcccactttgacttctctcctccagcggcccaggcccccgacgaccccagcccctagccagaaacctccgcccctgcactcccctcccccaccagtggccaagcccgcccccggcctcatttatcctggagccttttctgaatcgcgcaaccaatggcaaacgcgaagccgagagccaccgcgagcgcaggcggaggcggaggaggtgtcgcccagacacccgcccaggacgctgcgggatcccatcccccaccactccggggccgggccgcccccactcgcgcggtgcccagggcccgagaagggcgcacggggtggggcgcgtcgcccgcctgtcttgcccccaccccctgcccccctcacccactcccccacccctcctcgcagcatttccgtccatgccagccttagaaacgtgcctgcggctttgctggggttacacttctaatgccattaaagccaccaggcgagttcgggattgtgactctggttttgttgttaataacctattttgaaaaatcgaatgattaaaactacggtaactagcgctgaggaactgcctgttagtacctctgcccatttcctcattaaaaaaaaaaaaatcaatattccagccctccctcccaggatccgcccagaccagataaccctttacaaactcgagttgtgaccgtcagcgccccgcttggtgccggctgcggttcctttagcattttccttcttcctcctcccccttctcagagtccctctcccaatctcgtttcccctccccctcttcctctcgctcgcttttttctccgaaacccactctaattgaggctctgggattcctcacgtgagacgttgatttgtagtttgaacacgtggctcattcaaaaagccggacactcggagcggattttttccgcctcctgcgccttcctccctcctcctcctcctcctctcccctccctcctgccagtcacccttctgggttttttatggggaggcggcgcctgcctcacgtagtgtgatattttcacagtccgctggccgaagccaaaggggttgggaaggaagagacaaaaagtagttttttcccctcctcctcctcctttctcttgctaatcccgcctcctcctaagacttaggaagactggtggatgcgtttgggttgtagctaggctttttcttttctttctcttttaaaacacatctagacaaggaaaaaacaagcctcggatctgatttttcactcctcgttcttgtgcttggttcttactgtgtttgtgtattttaaaggcgagaagacgaggggaacaaaaccagctggatccatcca

SEQ ID NO: 37827 - DNA, 2300 bp, Homo sapien
ttttatttttccctttcttgtatttcctgtaaactgttggctagatctaaggtttaattagatttgagttcaatttgagggatcaggaatacttcacaggaggaactgggtattttctattgcatcacatcatgaggtatctcgtatctggttatctcacttttaatggtactaagattgatcagtggttcaaatggtatcaacctggctgggcgtggcagctcacgtctgtaatcccagcactttgggaggctgaggcgggcagatcatctgaagtcacaagttccagcccacgctggccaacatggtgaaaccccatctctacgaaaaatacaaaaattagccgggtgtggtggcacgcactgtaatcccagctactcgggaagctgagccaggagaatcacttgaacccggaggtggaggttgcagtgagccgagatcgcgccactgcactccagcctgggtgacagagcaagtctccgtctcaataataataataataatttcttttgtagagatgggggctcaccatgttgaccaggctggtttcgaacttctggcctcaagcgatcttccgcctagggtctccaaagtactgggattacaggcgtcagccaccacacccagccaagttcaacatcttttctaagagccagatgtcatttaagtttatccctatcaataactgacattcaaatgctgaaatcttgcccccagtggtagcaatcttcataataatgccagatgaactttcctaccatagaactatagttgaaagtctatgtcaatctttttactacaaagcactgtaggaaaaaaatttaagatgaaactaatttttaaagttgcattacacaagtaaaactcatctcagagattattactatgattgggaaccaagttgacagatttgggaggtcttcactgtgaagctttatggaaatatctaagtcaaaaaaactagtagggagctaagcattataaaaaaaaaactacacggctgtctctaggagggggaactggagcagggacacgaggcaaggagcagcggctttgcatcataacctcatctgtgcatgtactacgtcgacattacacagggcaaatatggaagaaaagtaatacagtcagctgacaacgtgccccccaaaagcctgttatatatacacgattccagccgggcgcggtggctcaggcctgtaatctcagcactttgggaggccgaggcgagcagatcgcttgagtccacaaattcgagaccagcctgggcagcatgtcaaaaccccatctctgcaaaacacacaaaaattagccgggtgggccgggtacggtggttcacccttgcaatctcagcactttgagaggcccaggcgggcaaatcacctgaggtcaggagtttgagaccagcctgtccaacatggtgaaacccccgtctctgctaaaaatacaaaaattagccgggcgtggtggtgcatgcctgtaatcccagctactggggaggctgaggcaggagaattgcttgaacctgcgaggtggaggttgcaatgaacctagatagcgccactgcacttcagcctgggcaacagagtgagactccgtcccaaaaaagaaaaaaattagccgggcgtggtggcgcgcgcgggagcctgaggtgggaggatcgtctgagcccgggagtttgaggctgtggtgagcagtgatcgcttcactgcacttcagcttgggtgacagagcgagaccctgactcaaaaaataaacaaacataaaaaaacgcttccaatgttttgttcccttacatcagaatccacttggacaatatttaaaggggctaaggtcatataaggctcatctggcgactgaaaagtcttcaaagaggttgacgcgtccgaggtgagtctgaagtttggaggacagcacgggaccgcgattccaaggcgcccaggttgagagcgcaggccgcccgccaacctccaccctcgctccaggcccagccgacacaaagcctcgcgggaggtggagcctcgtgacgtcacagagacgcccgccccctttacgtcgtgctctgaggaggccaggagatttctggcggcgccggcgccattttgctggagcctgcgaccgagtgggagtggagtggagcggctgtggttgccgactctttcctcttccccacggtccagtcagcgggttaattaggccatcggccctcgagccgagacttgtctcttatttagttctggggagcgcctcgtcgacatgagtgatgtggaggaaaacaacttcgagggcagagtgagtac

SEQ ID NO: 37828 - DNA, 2300 bp, Homo sapien
ctgagaaagctcttgatcaaaaaagggaaatgtgaaaattgtcagaatcaaaatggagtcacttgtgttaaaaacaaaacaccctgacagagctggggaaggctaagaagggaaggctttcacatgtgtatacctgataactaaactattgcaaaagactctgcaaaaaccacaaccttacataaagaccactgcaaccttacacaacaagtacttctgtgtggacatctgcccagcaactgcctgttgaacctagaactggagtcacccttattattgatccttgtagccaagcataataatttcaaagcaattatttaatcctcctcattttttctttgtcttcctttacctccctgaatacacacagagtttactgtggcatgtatattcccattgcaatgccctattcttaagtgagtgtctttttcttttagaggtcctattatttaggttgacagctttaaaataaagcttgtttttgttttgttttgttttgtttttgaggaagaggcttgctgtcgcccaggctggagtgcagtggcacaattatggctcactgcagactccacctcctgggctcaaagtgatcctcctgcccccagcctcttgagtagcagggactataggtgcatgccaccacaactggctgactttggtatttttttggggggtacagatggggttttgccatgttgcccaggctggtcttgaactccaggctcaagcaatccacttgcctcagcctcccgaagtgctgagatcataggcatgggccaccgtgcctagtctataataaagcttgttatccggtagcacaagttttcctcctcccactccttctcctcttctttttttttcttcctcctcttcctcatgaatgcttgtctttgctcttccataacattttgaattagcttgtcaagtttctcacacatacacagaaatttattgagattttgttgggaattgcactggctctgtaggtaggtttggagagacttggcatttttcagtattgactcttccaatttatgaacatgttacatctttatttaggtcttcttcagtgtcttccaatgttttcttcaggcaggttttgcatttctttgatcgatttattcctaggtacttgatatttgtttggagctgttggaaatggtatctttaaaaaaattatcttttttactagcatatataaataaatattgattttttaaaatatgatttttgtatctattaaccttgttaaaaacttttattgttaacagtttatctgcagattgttttgaagtgccacaaacaatttttttttttttttgagacggagttctgctcttgttgcccaggctggagtgcagtggcgcgatatcagctcactgcaacctccgcctcctgggttcaagcaattctcccgcctcagctccccgagaggctggaattacaggcgtccgccacctcgccctgctaagttcgtatctgtagtagagacggggtttcaccatgttggccaggctggtctcgaattcccgacctcaggtgatcctcccgtcttggcctcacaaactgctgggattacaggcatgagccaacggcgcccggcctccacgtacataattacataatctatgaaaaaataattttgtttcttcctatttaatcttcaatccttttatttttcttgcctcactccactggctaaggacctttggcttcaataatgggtagtctcatctgtagcacacttaatcatcactaagctttcccagcctcaggtcaatagtattaggaggttggttcctcaccggagggtcgggaacaagacgccagagcccttcttccagcgcctgcagcgagttaaggccgagggtatgcctctggcgggctcatcttccaacacagaagaccccgccgccctctctggttgccgcgcagctgcgtcgttctgacccagggtaggtgcagggcggctggaagcacgtgccgccgcttcctcattctgggactacatcccccacaatgccgcgcgccgcgggcggctggcccccgagtgcgggaagggccggcagggaggcggagcggaagccgagtgcgagggacgagcggagtaaaatctccacaagctgggaacaaacctcgtcccaactcccacccaccggcgtttctccagctcgatctggaggctgcttcgccagtgtgggacgcagctgacgcccgcttattagctctcgctgcgtcgccccggctcagaagctccgtggcggcggcgaccgtgacgagaagcccacggccaggtaatg

SEQ ID NO: 37829 - DNA, 2300 bp, Homo sapien
ttaatttctaattttttttttttgggatggagtttcactcttgttgcccaggctggagtgcaatgttgcaatctcagctcactgcaacttctgcctcctgggttcaagtgattctcctgcctcagcctccctagtagctgggattacaagcatgcgccaccacgtccggctaattttgtatttttagtagagatgggctttcaccattttggtgaactcctgacctcaggtgatccaccaacctcggcctcccaaagtgctgggattacaggtgtgagccaccatgcctggacaatttctaattttgtagctaatttattagtcctgcaaaggtactctagtccccagacaggaggggggttttgggaaaggtaaactaaaaactaagttaaactataagctgagttcctgccagtgctgtggcttatgcctctaatcccagcactttgggaggctgaggcaggtggatagcttgagttcaggagttcgagactagcctggcaacatggcaaaagcccttctctacaaaaaaaaattagccaggtgtggtggtgcatgcctgtggtcccagctactcgggaggctgaggccagaggatagcttgagcctgggaggtggaggctgcagtgagctgagattgcaccactgtactccagcctgagtgacagagcgagaccctgtcttaaaaaataaataaataaatacaattttaaaaaagttcttaaggattattttcagtaagctgtgaaatatctttgtgaaatgcactgttctgactcgagatacatttctatctaaagaattttgctccatttgatgtagtcaaagagttttttttactggacactggtgattcacaccttttttactctcctggtttttctagattctgtgattaacacctttctgtgttttaaaaacttgaagtataaccttttaattttttcttaaattacataaatgcatacctttctcatttaaaatttggaattgtaaatttggaaatatagaaaaatgttccaacctgtttgtttgtttatttatttgtttttgagacaaggtcttgctctgtcacccaggctggagtacagtggaatgatcatggctcactgtacccttaacctctcaggctcaagcagccctgccgccccaccttcctgggtagctgggactacaggcgcatgccaccatgcctggctaatttttaaaatttttgtatagagatgaggtcttcctatgttgatcagactggtctcaaactcctgggctctagggatactcccacctttgcctcccaaagtgttgggcttacaagtgtaagccactgcccctggtctcaagtgttttagtacttgccgttaaatgatcatcattctttatgtctggcatatttttgtatgatataaacttagaaattataacttattttttatcttagattgcatcttggattggatgcttcctaaggttaccttatgcccattagtaataatttctggtgacattttcaaatgttggcacactctgtttatattgtgggaattctttttagacaggcattttgattttccgatcctttttctttccttcttcctaactttcattttgatgttttttcttttttttttgaggaagaatagcttttaggcatttaggttggtgacacgtatttgaatagactgagatctcctatatatctcattataatatccatggttttagttacaaatgagaaacaatttgaagagttttatgaccatggttgcattttttcagttattttcaatgaattgacatttgtttctagtttaaactttgaaaagatacgtaagtgagactgataaaagactagaaagcttacttagtggtggagaaagttgtcaaatatatgacacagttccaaataaaaattatagaatattttctttatagtcgtctgttctgttactgatacagattaagactaatactgtttttcttcttaattttacagagttaatagagtggatacaaccttgctgaagatgaagaatatacaatattgaggatatttttttcttttttttttcaagtcttgatttgtggcttacctcaagttaccatttttcagtcaagtctgtttgtttgcttcttcagaaatgttttttacaatctcaagaaaaaatatgtcccagaaattgagtttactgttgcttgtatttggactcatttggggattgatgttactgcactatacttttcaacaaccaagacatcaaagcagtgtcaagttacgtgagcaaatactagacttaagcaaa

SEQ ID NO: 37830 - DNA, 2300 bp, Homo sapien
agaaacaaatgatgttggtggccctcctttttcctttcttgaatttgggtatgatttctggagttgtaacagctcttgcaaccatgaggaaaatgctctaaaccaatgtgagcaactacctacccccactcttctttaaagcaataaaaaataaaatttatgtttaattaagccactgttagttgaattattctgttattttcagaagaaagcattcttaacctatacatcacagcaaaatgctggcaaatcctatctcataaactttcatgaggattgaataaataaaatgcctaacacttgcctaggcaatttacatgttcctctgtccaccctacttcctagatcaatttagctacacattgggaggaagttatagtttgattatacctttttattaaagcagaggtgagtaccatatacagtattttaatttgcaaatctgtcagctttatgtaaggtcaggataacattttctagtttgttccatactcttattcgtcacgctcaatatttttgttgacttctttggccagaagagtttactgctccagcatcttcctggaagagtccacaattgggctaaatctattttaaccatttccctctagatttttaaattgtacttgcctacacagacattcccctgccacttttctgtaagcctgcagagcctggcattttcttctatttttctttgttagttcagttgctgcctaaaagcaagactaggctctcatagaggtagaatggggctgggcgtggtggctcacgcctgtaatcccagcactttgggaggctgaggcgggcaaatcacgaggtcaggagatcaagaccagcctggccaacatggtgaaaccctgtctctactaaaaatacacacacacacacacacacaaaagccaggcgtggtggctagtgcctgtaatcccagctactcaggaggctgaggcaggagaattgcttgaacctaggaggcagagattgcagtgagtcgagatcccgccactgcactccagccttggagacggagcaagaccccatctgggaggtgtcgggtggaagaggtaaaatggacagcagcaaaccacacgtgtgataggagagaatactgagctgagatcagtttcctaaaatatgaatccgatttcaggatcactcatttatctgactgtcaagaacgcctctgaacaggaggaagactttggggagagggtggggtttgttgaaagggtaccgagaagggaggtgggtggtacccaaacaatttgtttacataatgttttatggacctgaaatatgtagaacagtactttgaaactaaagtactgtactgaagtttaattatttttcttattgtttgcatattctccctcccagatactttacagagggcgctaaagctgatcccctgggagcttcagagtttaatgacttcgcctgaagatttcctattcttttccacaacgtgctaagtcaaattatggccaaattaccaatcgcatggtaattcagcttctaaatatattttgcagagtgtttccaaaagttaaaaaacaacaacaaaacttcacctaaattgtttttacttgcttcaccttaaatcagttattcggttcctttgaagaacatgtagctttagcaacccccaaagtgaacccagatacccaggactactgattgttacatcagagtttttgaaaacgccaatactggaaacaggccgacagttaaggagaggcaggcctcaaactaaagcagaaccttctcaaaactacttatatttcaagagatggattaagcgaaaagagctgtacaaagaaataagccattttctatgcgcctgttatatgcaaggcactgcactcccttgtcacttgttaatttacaagaagactcgccggtccagggaagggagaggggaataggtgcaaggtttgtggagggcggcaaactgcactccatgtggcgcgaggctgcgcttgcggagatccgggttctggtgcctggcgccggcagccagtaggggcgcgcgtcctgcgcagttgccgcgcgcggcctcctcgggcttcaggccgggccaatcaggaggcgggcgggagggggcgcggtaccgggagggaacggggcgggtcgggcttcgaggtcagctggtccgcagggaagcctttggcttccccaccggcaatggagcggttgacgttgcctctcggcggcgcggcggcggtggacgagtacctggagtaccggaggtgaggctgtggctccgggcctgcccccccgccgctccgaggggccag

SEQ ID NO: 37831 - DNA, 2300 bp, Homo sapien
aaagcataaaacatcactcagcgagataaaataagacctaaataaatatactgtgctcatggatcagaagactcaatatagctaagatgtccattctcctcaaattggtgtatacattcaatgtgatcccaatcaaaatcacagcaggctctgtgtgtgtgtgtgtgtgtgtgtgtgtgtgtgtagatgctgacaaattgcttctacgatcgcatgaaataaaactaccgtaattaagacagtgtggtattagtctaaagaaagcaaatagatcagtgtaacagaacagagaatccagaaatagacttgcgtatgtatggttaattgatctctgacaatagtgcaaagacaattcaatagacaaatgacagtgttttaaacaaatgatgctggaaaaattagatatccatatgcaataaaataaaatttgattgtttcacatgttataaaaataaactcaaaaaggactatatatcaaaatgtaaagcttgaacatgtaaaatttctggaagaaaatatagaagaaaacttttgtgaaccaggctagtcggagattccttacatacaacacaaaagcatgaaccataagacaaaaccgataaattagactttattgaaattaaaaacttttgttctttgaagtaccctttttagaaaacaaaaagacagctgtagactgggagaaaatattttcaaacctgaaggagttttatccacagtatataaagaactgtcaaaactcaataataaattcagttagaaaacaggaaaaagcttggacacctcatttaggaagatctggatggaaaataaacataagaaaagtttctcaacatttttagttagtagagaaataaatgcaaattaaaatcacaaggagataccactttaaacatttatacatgaatgtttaaacttaaaaacacaaaccatatcaaatgatggtgaggatatagagcaactagaactctgaaacccgctggtgggaatataaaatagtacaactgtgtaaaactatgcggcaattttttaagcacatatacaattctatgacttggccattccactcctaggtactaacccatgagatatgaaaacatatgtccatacaaagacttgcacacaatagcagctttatttgaaacaattcaaaactggaagcagtccaaacacctattaaaaggtagataaacaaattgtgttatattcatgcagtggaatagtaacagcaataaaacccaacaaactcttgacacataggacgaaatttatcaatcaaaataattatgctattggaaagaagctagattaaatgttcatactgtatgattctattatcgtaaaattctagaaaatgcaaactaatatatggtgacagaaagcagaacgggagctgggaggagtcaggtattacaaccgggcatgaggaaactttgaggtgatggaaaagtttatcttaattgtggaggtgatttcaacagtgtatacatatgttcacccttaacaaattatgcacttttgatatctgcagtttattgtactttaaccttcaagctgttaaaaattaaccggagataattttcaattgttgtgtaaggtttgccacaaagtgtaatatctgcaaagaagcagacaactaattttttcttcttaagattgtggaaaaagttgtaatactacagagagctgtggaatctaaggattagttgaccaacgcttgtaaagctaccaatctgaaaaacacattttcagttaccaaagttattttctctcttccatcgtgtaaatagaatgtcggggttcttctaatttgggtgtttctaaaatttaaatccacgtgaacagattaggaaagaccacgaaatcctacgtcacctctaaagtcacagcttgaagccttgcgaaaggaactggccctagaccccaccccggcctataaatcaccagggcgcagcctcagtgcctgggggtcggcagcagccagcgtcaggcggctcccgcacgcttcttcctaggcggcaggccgtggctgccacgtgactcccgctaacaccggatgatggcgcagcgctgtgcacgcaggcgcagtgtggggcccttgcggtcgaagctcacgcggtaagccgctgcacgtgtgctacggcgggcggagggccgaaagtccagtatgtgggtccagggtcactcttctagagcttccgcaacggaaagtgtgaggtcagtagtagtttttgtggtacgtgcagtggtggccgcttcaaggactattttcgtcgctgcttgcgttttaagtctccaat

SEQ ID NO: 37832 - DNA, 2300 bp, Homo sapien
acaaagaatgtctgttttcaggccttactaggaaaacaaacaaacaatggcagttactgcctgtttttatcactgataagctacaataaagctcaaatgatggatggtttacgtgtgtgatattaagtacaaaatgaaagccattataattttaccaaaagaaacacgaaaaatatgggaagaagtgaaatgaacatggcatgggtcccaaagattacgatatgtttcagaacaggattttgaaaacaaacaatttctgtgaatatttcttatactagaaagatccaaagcaaatctaggcaagcttagccctaccttgtcaaagataaatactcagataagttggaagttccgtttgctaaagtgcatctgggatcatatctaccctgctacttagagacagccaggaaggtggccatcactcatgctctttcactctttctgtgtcttatcaagagtcacacgtaacaatttttttttcaaaccaaatgctttatatagtgaactacaggaaaaacaattctaaatacacttttaaaatgctagagagttaagataacctcattaaagaaaaaatactgaaaatgtaaagggtccatacaaactaagagctgtattaagtgtatactttctattttaataattcacttggctgtgctcttaaaatgagagaagcagatattttacccatgtcttctggcaagagattcaaaagcagaagtagcaggactgtaaaatttcataaaatttgtgggattttttaaagctaaattattcaatatcttgtacagttttgtacccatatattaccccggaatatatgtacagcatcccagcaacagtgactgcaacaaaagtaaggtaaataggtctacaaagcatttgatttccttattagagaaagtttttatagaggaaatgcaaacaactgcaattcagatcacattatataagcttgatgattatttaaaccttatataaaattaaatctaacccttaccactacaaatctgtaaggaatcagaaaaggatttatagtacacaagtcttgattactgtttcattccactttgatatcactctgagctaaaacagcattcttccaagatttaaagaaaaatagattttataaaagggattcttttacattattattgttactgacagaaacaagttttgcttttttccactataattcgctctgatgaaagaaataattctctctcttaactcctaacaaacgctacattttcaagactaagggaattactggtggcattctttctccttgatctaaactatttgtctctaaaatatgtcaagtaagcttttaaagattcaggaaggggcagcgttgtgatttttttctcagtaaattttgaggtggctcctctggcttcattgcttcactgtgatctttttcttcctcttctttgttatcttccattttttcatcctcctctctgtccagaggctgaggaataagctgattacccacaaatatgtatgtgttagttctctgtttaactctctttttttttttccttttgggtggagccctttgcggaatccccttggcctgcatctcatcatttatgaaatttctaagtgtgcgtcgaatgtaaatacaagccaagccctgtggattcctgacagcacagggagggagtcccacagaatctggtttaccattatcattcttacttggctgcacaagtggagcaaatgacacaataaggatatttttcctttcccaagtgttttgtccagttctgcgttaactgatcctctacaggcatgatcctctacattcatttgatcttcaatcagtgataccctttcttccacttgatcaaatcagctactgaagcttgtgcatgcgtcacgtagttctcgtgccatggttctcagctccatcaggtcattaaggacttctctacactgtttattctagttagccattcgtctaatttttttcaaggtttttagcttctttgcagtgggtttgaacatcctcctttagcttggagaagtttgttattaccaatcgtctgaagccttcttctctcaactcatcaaagtcattctccatccagctttgttccgttgctggcgaggagctgcgttcttttggagaagaggcgctctgatttttagaattttcggcttttctgctttggtctctccccatctttgtggttttatctactttttgtctttgatgatggtgacgtacagatggggttttggtgtggatgtcctttctgtttgttagttttccttctaacagtcaggacctt

SEQ ID NO: 37833 - DNA, 2300 bp, Homo sapien
taattgaagcagttaaaaataaatattaatttgaaataaaaatcagcagctagattctattatattttattcaaatttggaatttttttttttttttttgagacagagtctggctttgttgcccaggctggagtgctgtggcacaatctcgcctcgctgcaacctctgcctccctaactcaagccatcctctcaccttagcctcctaagtagctaagctacaggcatgcaccaccacacccatgtattttttcgtagagacggggttttgccacattgtccaggctggtctcaaacttctgagctcaaaccatctgtcctccttggcctcccaaagtgttggaattacaggcatgagccactgtgcccagccaaaaattatttaaattatagcagaaatacagtttcctatttgggtctcacgagaatgtgtttattctttgtttcagcaagagaaggcagctgctgtggatttgactaaccacttagaatacactctgaagacctatatagataccagaatgaaaaatctggcagctaagatggaaatactgaaagaaatgaggtaggtaaaagcatatttttcagaaggatattttaaactaatttttaatcaattggtgctttgtttaaattgtgtgcttgccatttttgctttaaaatttaacctttgtatttttatgacttcaaagagagaaagatagttatttctgagatgaattttatactgtttttgtcaggtttctactgtcactgcttggagctagagtgttctaaggttataactgagactgaaattgaaaaaacagcaacatagcttttaagtgatagtttgatgggaaactaccatatccagttattttgcttggggttattttcaggagtacagcatgtccttgaataacgtgttttcattcaacattatttcattataacattgaagaagaaaatcaattcctagctggagccccactgtctgtgtggagtttgcacattctctccatatttgggtggttttcttggaatactgtggtttcctctcacatcccacttaggtgaattggtgtgtctgtattgtcccagtatgagtgagtgtgtggatgagggtgagtgtgccctgcaatgcaagggtgtcatgtccaggattggttcctaccttaatgctctgagctgctgagatagatgtggccacctgcaacccctggattggaataagcgggttggaaaatgaatgagtgaatgagtatatacagattatcataaaataaaaatttgtgaagtatgcaagaatcatacagatgcctttgcaataagcgatgtgacatgaaagcattcagcaagcccactacgtttgttattgtttgtttttgaacctgtggtggtagggggcgcttcttagaattttcgcttgcaaacatttattccttgatttaaccctactgtcacccactcattcaccaaagtttgggtaaataattatctttgttgtttttattgctttttcttaaatgtgtgtataggacacgtatattttagtgtttaatattagaaatgttttgggtctttatttggaagtgctgtttttgtgactaaaaatatgccataggaacttaactcttgtttagatcaattagcctatgatactatgggtttcttatatgtcttttctcttagacattgtaaattatctgtagaccaaaaattgaaggttcatttgataccatttcaaattctgcagactttcgaagttgccttttttatagtttaaaaaatttttaattttttcatattttttatgtcatgaaattagtatatccacagttgttttttaattaaaagtttatattaaattatgcatgtctgcataaaaatatgtggactgaaaaaaataagttatacatgattttatataaagttttaaaaggtaccccttcaaagccagtgctgtaaacactaacttttagaccattactattaaagtgtaactttttctcacaccagctttctaatttattgatcttcttctttttgatgtttttaaaaataggcatgtcgacatcagtgtccgtttcggaaaagacctttcagatgctatacaagtgttggatgaagggtgctttactactccagcttctttgaatggattagagataatatgggcagaatacagtctggctcaggagaatattaaaacttgtgaatatgtggtgagttgggaatttttctctattgtggtttttatctgttgaacataaggaagtgtttttttaatttcttctaaaaaaaataacaggatacatg

SEQ ID NO: 37834 - DNA, 2300 bp, Homo sapien
catggcacatgtatacatatgtaacaaacctgcacgttgtgcacatgtaccctagaacttaaagtataataataaaaataagtatataaaagtcattaaataaagctttgtctcacaagaaaaaaaaataaagtttccctcatttccctaaatagaatatgtccttaataggatatactttcctttttttttgggtgaacttattatagtcatccaatatctttttaaaattcttgattttcttacatttctccttgaaatctcagctgtgttatcagtacaatcttctactctttaatttcttcttctcattgatctgggaaactgttaatcatgataataagataattaatttggccttagttgctacacattctagaatgtgtagcaggctacaggtagaattgcactttccttttccaaattatagcattcaaagaagatagaaaagtacttataaaattaaaaaataaaattagatttgatttaacttaaaataatgaattatgtttaaattggaatgatgtataattataatgagattttcatcttggaattacgagtgcctctttctttggtacaagggctattctgtggatgttgacacagaagccaaggtgattgagagagcagccacctaccatagagcttggagagaagctgaaggagactcagggttactgccattgatattcctgtttttatgtaaggtaaagttcttatgctaatctcttgcagaaaccattttatcttgcagaaactattttatttaaaataaattttagctccaggttttagagcagcagttcattccccttaacataaaagaaaaattatcccatagaatcaatgtatgctaaaaatatgttgaagaagtttttacttggagtcacattctctgttttgcttcttagtctgatcctatggcttatctgatggtcccatactaccctagggcaaacctgaatgctgttcaagccaacatgcctttaaattcagaagtaagtaaaaagcactatttatttccatggatgtattaaatgagaaaataacacctgatatttattcaggcatactacatgctatgtattttgtaaaattttgactcatggtattctatttgtcacctcaagcctgtgatagaagttatcgtgttatatagatgagaaaaagcgttaaagggattagattaagtgacttgcacagggtccgttagccagaggtagagctgggactcgaaattaagtctttctggttccaaagcccaaacttacaactgctaagctgtgctgtatgtgaactgcctaatatagcacttggtactgtaagtgcttaagtggcagctttaatttttgtcattgtaagtttaggattagtaataacagtaaaggaggccctgattcttcttatggagtaacactgtttcagtctcttatagctactttacatggttggtatttgtaatccaagtcttctttgagatgatagaacaggtgtcctcagaccccaggtcgcagactggtaccagtctgtggcctgttaagaacagggcggcacagcaggaggtgagtggcaggtgagcaagcattactgcctgagctccacttcctgtaagatcagtagaggcattagattctcataggagcataaactctattgtgaactgtgcatgtgagggatctaggttgcgcactccttgtaagaatctaatgcctgtgatctgaggtggaacagtttgatcctgaaaccaaccccctgcatccatggaaaaattgtctttcatgaaaccggtccctggtgcccaaaaggtatgattgtacacacacacacacacacacacacacacacacacacacacaaacacacacaggcacacatggtatcaccattacaaaatcaagccttcatctggtctttctctatgctgtattcttattaatggttcatttcgaggaaactttactcacttctagagcagtcttttaattagagaacagtttcaagattaaaatgatttgcctacttcctcacttcttttatgtgtacttatctataggaaactttaaaggtcatgaaaggtgttgcccagggtctgcatacattgcataaggctgacataattcatggatcacttcatcagaacaatgtatttgctttaaaccgtgaacaaggaattgttggagattttgacttcaccaaatctgtggtaagatatcatggttttacaaataggttctagactttatttaatattattaagcagtagttcagcacttatatataatataatactttattat

SEQ ID NO: 37835 - DNA, 2300 bp, Homo sapien
tatcagtaagacctcctaattgcaaaccacatggacctttaccggttatttgacttctctcggtcattaccttctctagtctccactgattcacctccttttgaatctcaacaagctcaacagtatctcaatgttatcttaacaaagctgttagaaataaacaacttgactttgaaacaaaggagagaaatggctcagcagctaggagaagatgcagggttgagttgccaacagttggttttgtttgtattttggccaggggatgtggcttggactggagagaaaggagataaggatgtaagcacatgtagggcatatcaccccctattttttattctctgaatccttaaccctcagaataagttcttattcttgagaatcaatgacattatcttaagctaaattaatcaagcctccacagtgttcttctctcaatagtggtgtgggccttcctagaagtaatttttcccaaattcagtgatacattttaagttcagattttaattgatatgaatctgtgatacactctaaaataagattattttattgaaaagtggactgtaactttccctttatctaggaagagctctaagttagaagatgttttgcacttttaccgaaggctgtgtcttgtaagcacccccgagcaactctgagagccttgatttttgtgtcctcagcatatgtttgtgtaatacagaaagagaagcagttgccaagtgaaagggatgttggtctccaaaattatagtttgatcccacaaacacacaaacacatacatgcaaaggattgtttgcttcacggtttttgatatttaattcaatgctgttggaacagcacaaaaactaagtgtcagtttaacagaatcacttgtccttttagcattaaaataacatggaacttaatgctttaatttcccaacatgcctttttatttagaaagattcagacttatatttcatttagaaataaaatgccattttatttagaaagatacaggagcattcattcacggaactttcagatctcagtccactgcataaaatcttgatcctgtaataatagtttctgtatcttgcatattcattcaacaggtttaacgcgatgagcaaattaatgttcatcgtttttaacatgtttcatcttaatcagaacccacattctcaacgttaattgaacgtacataggactatacaagggttagtaaataagacagaaactgttgttcatttaaccaccgtcactttggaccaaaaaagaaaaaatatatatttttaaaattgagcttaaaagagtctctagaagctggaagcgtggctctttttcagcaaactgggggaataggtttaccgtgttccccctctggggaattttgagtcgccacactcatgtctcgaccgagcctggctcgctgcgtctgagcgagtacttgaggaaggctgatctagaaaaaccagctgagagaaggggcagaagcccctgaaaccacgggcgggggtggggtggggagcgcagctttgggaccctctagccggagacttccggcagctgcctccgacttgttctaagtacaggaaaaatctgtgcgcccagttgcctcactccaacagcgcgcagttgtgcccggcgaggatgccgcgctagtcgtggagatgccccaccacaaagaggattcaggtgcttcctactccggcacccagtgggttggtagtcctgttggcaggagacaagaatcgtctgggctgctcctatctctggcaggactagacggggcgtgaaggaaagaaggaaagaaggaaagcagggatcgggcactgcccgagggcagatacttgggctttggtgttgtccagcgcgctcggagtgcgctgcctcgctcacgcggtcccaggccccgcttcttcaggcagtgcctggggcgggagggttggggtgtgggtggctccctaagtcgacactcgtgcggctgcggttccagccccctccccccgccactcaggggcgggaagtggcgggtgggagtcacccaagcgtgactgcccgaggcccctcctgccgcggcgaggaagctccataaaagccctgtcgcgacccgctctctgcaccccatccgctggctctcacccctcggagacgctcgcccgacagcatagtacttgccgcccagccacgcccgcgcgccagccaccgtgagtgctacgacccgtctgtctaggggtgggagcgaacggggcgcccgcgaacttgctagagacgcagcctcccgctctgtggagccctggggccctgggatgatcgcgc

SEQ ID NO: 37836 - DNA, 2300 bp, Homo sapien
ggagtggtgccagctttaagtcaggtaggtctgcatgtaatttgaggggcagagcctaccccaaaccctccctccctaaaacttcctcagttaacatcattctacttgcagggagcaggggtagagtaggttaggacattgtttccagaagacccttgaggaaataaaagtgcactattaaggatcactaacatatctggaaatgacattcataccctacctcccaccccaaccccagagaagctcagggcaagtaactaagtggctgggtccaaggggatgtgttaaggttaagagtcagaagggaaaagagttcacaagcctgggtagggtacagcagggaggacccatgggtgtcctgtgagaagcaagtgggcctggggcagcaagaaggacctgaaaggtcttgctgacaccccgagaagacaaaccccatccttccgctttgtctctgccttgggctccgagcccactccacttcatttcatccagccatcctgactacagggggcccaaagctactctgtgccctgggcacgtttgagtctccttaaatgcttccaattacctttgcctgggtttgtggttccaggaaagaaggttctaaattaacactgtacaaggcccccctgcatgttggtttgcaaaattaatgatcctaatggaaaagtaaattaatctttgatgcttggttgaggataaacacaaaaatcactgttttggacactggaccttcttaatacatctcatcaatagtattttctctctcccttccatgcctgccacattcacaaagagaggagacaatacaacttataacttcatctctgaatccaaagggccatgatgcacgcatttattctgcaaacacttattaatggtctggtttgtgcaaggtgcccaagagaagccaggaaaggctgcacagaggaggccacctcataacactcctcacacgtaaagtttgacttgcactttctacgttcatggtttgaaaagattgcagtaagcattttgtaaaatgtaaattacattcttcaattttaggaagaacacaatagtttttccaaaagccgcctgtcacaggtctgagggttcacagagctcttttaaggggatcggaagttctctggctgccttgctatgtttttctagccagaagtctctgctgcagtgcattgctcagttcctttcaactgaaaaattaaatctgcacttctgtcaaaatgtgtcatctacacatccggacactcatcacagttcaccaagctctacgcagagtccaggctgaaaggatggcatgccctccccaaccccacccttttgaggtctgggaagcccaggtgctggggaggagctgaacaactgtgtccagggagtgtctggcaaagccgacccagggagttccacgggagcctcggtgctatgaaaagagccagtgtccatgcatttcctcgggtgtgaatcacactgcccggtcgggcctttgggaaaaaattaatgaaggacacagtcagcgccgtagaacctgccaaatacacatcagatccagtggagtctgtgaagggggagggggagatttttccagaggcttttcttctcgttccatttctcttttgtgccccacgactgggttcttgaatgtaaaactctcagaaaggtcagggcggagcctgttttatgccccgaggagtatcttgcccacccgtaaatgctgacagacagctgcgacttcggcccaggagacccggcggggactgggtccgaccagccctctctcgcgggcgcaggtccgggacccctgaagcgagccggccgggcgcagagcgcagtcagtctgggcgctcagaagctgggagggggctccacctgggcgcccagccgcggcgggaggggcggggcccggctttccggaggcggtggcacctcctcgcgcccgagcgcgcgctccccgacgtccggcgcacgcgcgaggccggctgggagcgcgcccaagcggcggcggcggcggcggctggaggaggaggaggaggaggaggaggaggaggagggcggctgaggcgcggctggctgcgcgcgcggaggcagcggcgggggcgaccggagctggggcagagtggggagcgagggagggggaggagagagagggaggcggagggcagtgagagacgcatttccagttctcaactacgagccacgagtttgcagatggggctgctcggcggcgcctgtggctgagggagagcagcggcggcggggagcgaccgggagcggcggcagcggcggcgcggaggcggctg

SEQ ID NO: 37837 - DNA, 2300 bp, Homo sapien
tttcccaacccttcacccattctggtcttctttcagtatcttgaacgtgccagggtcgtttccttcctctggattttgccctgctgtttcctctgcctgaatgctgacctccttattttcatttagttctcagcttaactgtaatttactactcagtctttttccaatcactttatctaaagtagatctcttaaaattctttgtgcctgttttgtttctttcatggtagttatcacaacttggtatttcttatgtttatttccactttatctcctccactaaaggataggaaccctctctcttattcattgtcatacccactgattctgaaacatagtagacaccttaataggaactcaataaatatttgtagaatatgtagaggtatagtgaaattcaaaacaccatcttacgaaaagctttacttatgtagaacccattgcttatgtactccccacatcattccaaaatgactaaaattactttatgaaatataaacagtgcctggacaaaaacataaataaaagtatgtgagtatgtgttttggtggaggatgggcagcatgtaaggttaatcttcaaaaaacacttctaagattctctgatcttatagagaggtagcaagtttggctttgagcttaacagccactgcaaattgggtaccatgttgtacatgggccatgagataaaaatctttcgaaaaggatgatatagtggagctggaaaccagtcacctgcagtaattgttttgttactgtagattcattccaagattattttcagcagtcttttaattaggaattttatcctaatataagtgaggcaaaagatgcagaatactcataaatgtaaacatgagtgttgttggaaagaataagacatgaacagatggcagtgttgtctttaacactatatggattagattttgaagattaataccagaattaccagaaatatatctaacctatttattatattcacttctagttggagtttgagcaagtaaatatgcattgtaatacaaacatttccttttaaaactcttcaacaggactctgacttgaagaaaacagtggatgaaagtgcacggattcagagagcatacaaccactattttgatttgatcatcataaatgataatctagacaaagcctttgaaaaactgcaaactgccatagagaaactgagaatggaaccacagtgggtcccaatcagctgggtttactgatgattcagtaaggttaacaatgaaaattaaactcttaaaaagtgactgcaacaaataaaccttctactgagaaaatacatcacagatagaagattatctgctaagtccaggcatttttatggtgtagattgaaataatagtacacttctgaatttttatataaaatgtggttggaaggtgtactaatatataatttatcttaatttttctaactttgtatggataatctttctattcatatcacataaagaaatgcgttgaagcattttgtatatgttttgatttagtacccttgcctttttcatcaaaggaattttcaaatcattcactctaacattggtctcatattttcactgtgataatgaatattacttgaaatagttttgtaaagctgtcatttagttcagtattcaaatagtgaagggttagtcttaatagaagaaaatatagttattgaccttccttcttataaatttcttacaaaagcagaattttaagtcagtgttatagctagtctactaccatctaaatctgacatcaaaagtctgatcagtttacgtattttcattatttcggagatgtatggctatccattctaatttatacagctatattagttttgtctcttcatttctatctttactgaaaaattgaagagcaataccttgcactctcttttgaggttattctttttatttgttgcagtgatatgatgctaactaatttaacatgtacacagtaagctctggggctggaagcaaggtcatgcagactgagagagtgccttatcctgtaaaaccttacagcaaaatgacacttgaagaaagtttattttcacatgtaaaattttgactgacaaaaggaacctactactttaaacaatggttttattagaacatggtcagcaaatgtatcatgcctctgcaaattttagtgatgtttagagatgcctctaagtttgcagttggaggtttttgtgcttttagaaatgtgatgtgatccttagggtacctgttttgtctgttgtgttgagaaccaaacccattgaacaacttaaaaaattgggaaataat

SEQ ID NO: 37838 - DNA, 2300 bp, Homo sapien
tgacatcttcttcggaggtgtgtctagagtggcttttcagaacacacagacaaatcttgactgttccttcctgctgtggatcaagtcttggggacagggtttccaggagtggtaataagcctaagaccagacctgtgtcctgaagataaaatttctgtctttgctgtactttgtagaacctaggactgtcctgtttattagaaaatgatatttctgtggcctaaacacagtggagagattgagcctttgctatgtgtgagactctaccttacatgctttccatatataaacccgcagcagaacccgtcaggtagctatcattaattatctccaaattgctcatgaaagtctgaggttcagggaaatgaatgttacccaaattctcccggttagtaatattagagtagggatagaatcctaacctctttatctctgctctgcccttcttcccaaggcattgcccaaaatgtttgttttccatgagatattaacaaaaaaagtccatgaataggataaatttttacaccattcttatttttgggctggtggtacaggagatgattctctgttttataaatttcaaaggtgattgaatggtgattacttctgattaaccctggttgaggagtgggttttcttgattgcagtggaagaagtgtaggtgaagtatgggtgttggggcagtgagtggatggaaagaagcctttcagactgccggtgggtttgaatcccctgtgaagggcagccgggagcccaggagagccttgggtcaggacaatggaaaaggccaagtgtgaggttcctagtggactcttaatgtctccttaccaaatggtgatgatagagactatttttaaaatcattatttttatttgttattatttttatattttcttagagataaggtgttgctctgtcacccaggctggcgtgcagtggcatgatcattgctcacttgtaaccttatactcctgggttcaggtgatcctctcacctcagcctctagggtagctggtgttgcccaggttggtcttgaacttctgacctcaagggatcctcctgcctcagcctcctaaattgctgggattacaaatgtgagccaccacacagagactatttttagggtggtttttgtttggattacaaaagagaatagtagaaacctggagatgtgagaaggctgacagttcagatatgagatcagacatttatcattttaaaaagggcatgtccactgaccttatcaggaagtcagagataaggaattatatgatgaggaattgaatgactgggtagaggtcagagagagaatcataaatatgggaagggaataatttgactggagatggtaataagggccaggggattgttttccaagactggtgggtgggtagacaagatgcccccagacaggcctaggtggccaaggaaggctgtcctctcgcggtgcatccagaataggggctgctgttctctctctgtttagttgtcttctttgtctagtccctttcagtcttcaccctggaaaagtacacatttaaaatggtctattgatccacctggatagtggttaaacaggcgctaactttattcattagtcctttctgtgcacctttctatacgtattgggattgaaaaccaatgaaagagaaaagcttctagtggagccctggtcactggtccactgtgtgcccgtggtccacacacacacacacacacacacacacacacacacacacacacacacacacgtgctgcactggtccactgtgtgcccgcggtccacacacacacacacacacacacacacacgtgctgccctgttttcttgcccacacacacagcatggctgccggctttccatctgagtgccagccttctgctttccggggctctgcacaggcttggaaagctaaatgacccaagacatcttggtggccttatcatcatcggcttcctctgctcgtctcctccattccagtggtcgtggagtcggactttgtgaaatacgagggcaagtttgcaaaccacgtgagtggaaccctggagactgcactggggaaggtcaagctgaacctggggggcagcagccgcgtagagagccagtcttcatttggaaccctgaggaagcaggaggtggatttgcagcagctcatcagagactctgccgagaggtaaggagacttgtttggcattttggattttgacacatctcacatttaaaggtcattcagttggacctttgttaaaagggcgacagatttgatctctgccgatcaataaacatgtattgaatgcgc

SEQ ID NO: 37839 - DNA, 2300 bp, Homo sapien
tttgtaacttgaaacccccaaatagttgtaaggattaaatgagccaatcattgcatgtaatgtactcagaagcatgcttggtgacagtagacagaaagtgctacataaataatagcagctgatattattactatcttcctcgggcatttaattaaaagactaggcaggacaaaaaaaaaagtgacagaatttgaagccacttagtaactgttgcatcaaaaagttcacccactctgaattacaagtggtaactatctagatagaggactggggctttttggggtgggaacctgatgagtatgctgtttatgaggatattcttaaggtcagtaccctagcgggggatgcaataatctctggcaacaagccagaatcatcaccgtataattttataatgatagagaaccaatagcatacatgaaaagtctcttgacagggctgggattctttctttcgtccaacatctcatcacattagcaaatcaggggcctaccaccatggaccatttcgaaccacttcttcatccaataaccactaattgtgcacttattttgcgctgggtactgcaaggatgtgtactgccccacagtctaggtggagaaacaaacaaaaggattcatttcttaattcaacaattatttactggatagctaccatgtgtcaaatcctaaactaggtgctgggcatagggaacaaaacagaccagctgccctcatgctgctgacattttacaggagaggataatacatgaaataagaggcacacagtctatcagatggtggtgagtgcaaagagaaaaataaagcagaggaggaactaggaggtgttcccgtgggtgggtgggcagcacttttaatttggatagtcaggaaaggctttacagtgaggtggataattgcaatctagagatatgtttaaagcatagcggggcccaagggaaagcgctgccgggcttctctacctgccctccccgaacagcctttaagacagccacacaactccatactgtgtgagctctcgcagggcagaaatttcattttctcttactctttgctctcagcttagtagagagcattgcacagtgaagacgatacactgactgaaagtgtcactgagcaatgggctcgtaacctgaggcacacagaaaccaaactgtggcacaggcttttgagaaaagaaaaacttctattgccagtcaactggcaaggagacaagaggcaaagcttaaatctgtcttctggacctgggagcgggtcaggcgtttttggcatttctaaccagtcccaggtgatgccaatgcagccttctgcggggcgcgcggtgttcacaattagaaagctttccctcttgcacacgcccgggagattttggctctgcctcgctgtaacaacttaagtaatggttaatcggtttcagctggtcctaatgttacaaaaagagctaatatttaagtcagttcatcagaaagcaatgtttgagcaccagctatgctgagattccctcgttcagtattcgttgagcacccagtgtgtgagagcgcctggttttgccctcaaggagcttagagtggagtttacaggaatgaatcactgattagcggcaggcctaagtgtgggcactgtcgcaccacacacccagatactactccaggcacgggcattaggggctcccacaggctggacaggccttggactttcctggttgaaccgtgaggccgcggtgtcagtccacactccactgtgggtggcgggttcggccccgcgaggaggcgccgctctcaaaccccacggtcccgcgcagcgaagaggcgaggcggccgcggaaggcaggcgcagcccactcttcccgagaggccccgacatctcccgggtgagtcccgaaaagcgcgcggggactccggctgagcgctgggccgtcagcaacccggctcccagagagtcacacgaaggaggggaagcggctctctctggggcttctgggaggtctggcccgggcccctcccgcagcctccggcggccagtcccgcggctctggggcgcccggaccgagcaaaggtcccggcgggcgggccctctctccgccctccccaagcgcccgccccccgccggcccagcgcaggctcctccgactccgccagcgcagggggcgcggctgccggggacccagcagcgggcgcgcgggtaagtgcgcggcgggcgcgggctgcgggatccgctccgggctccactccggatcctctttggtctgtttgggtgtcccgggccgggggcagccgaggccgcgcggcgctttctctctgg

SEQ ID NO: 37840 - DNA, 2300 bp, Homo sapien
tccccccaccattggacagggagagcagcagactggggtcaggtgagatcttgaacacaagtcatccctctctcccaacacagaccatgctcctacactgcttgggtggggggacccctactgcacttctgcacttcttattttctgttctggagagtctaccctatggtgggttaaaactcagatggtgctgaacaacctgggttaaaatcttggctctgtctcttcccagttgtatgagcattccagtttgtgcctcaattccctcatttgtaacttgaaacccccaaatagttgtaaggattaaatgagccaatcattgcatgtaatgtactcagaagcatgcttggtgacagtagacagaaagtgctacataaataatagcagctgatattattactatcttcctcgggcatttaattaaaagactaggcaggacaaaaaaaaaagtgacagaatttgaagccacttagtaactgttgcatcaaaaagttcacccactctgaattacaagtggtaactatctagatagaggactggggctttttggggtgggaacctgatgagtatgctgtttatgaggatattcttaaggtcagtaccctagcgggggatgcaataatctctggcaacaagccagaatcatcaccgtataattttataatgatagagaaccaatagcatacatgaaaagtctcttgacagggctgggattctttctttcgtccaacatctcatcacattagcaaatcaggggcctaccaccatggaccatttcgaaccacttcttcatccaataaccactaattgtgcacttattttgcgctgggtactgcaaggatgtgtactgccccacagtctaggtggagaaacaaacaaaaggattcatttcttaattcaacaattatttactggatagctaccatgtgtcaaatcctaaactaggtgctgggcatagggaacaaaacagaccagctgccctcatgctgctgacattttacaggagaggataatacatgaaataagaggcacacagtctatcagatggtggtgagtgcaaagagaaaaataaagcagaggaggaactaggaggtgttcccgtgggtgggtgggcagcacttttaatttggatagtcaggaaaggctttacagtgaggtggataattgcaatctagagatatgtttaaagcatagcggggcccaagggaaagcgctgccgggcttctctacctgccctccccgaacagcctttaagacagccacacaactccatactgtgtgagctctcgcagggcagaaatttcattttctcttactctttgctctcagcttagtagagagcattgcacagtgaagacgatacactgactgaaagtgtcactgagcaatgggctcgtaacctgaggcacacagaaaccaaactgtggcacaggcttttgagaaaagaaaaacttctattgccagtcaactggcaaggagacaagaggcaaagcttaaatctgtcttctggacctgggagcgggtcaggcgtttttggcatttctaaccagtcccaggtgatgccaatgcagccttctgcggggcgcgcggtgttcacaattagaaagctttccctcttgcacacgcccgggagattttggctctgcctcgctgtaacaacttaagtaatggttaatcggtttcagctggtcctaatgttacaaaaagagctaatatttaagtcagttcatcagaaagcaatgtttgagcaccagctatgctgagattccctcgttcagtattcgttgagcacccagtgtgtgagagcgcctggttttgccctcaaggagcttagagtggagtttacaggaatgaatcactgattagcggcaggcctaagtgtgggcactgtcgcaccacacacccagatactactccaggcacgggcattaggggctcccacaggctggacaggccttggactttcctggttgaaccgtgaggccgcggtgtcagtccacactccactgtgggtggcgggttcggccccgcgaggaggcgccgctctcaaaccccacggtcccgcgcagcgaagaggcgaggcggccgcggaaggcaggcgcagcccactcttcccgagaggccccgacatctcccgggtgagtcccgaaaagcgcgcggggactccggctgagcgctgggccgtcagcaacccggctcccagagagtcacacgaaggaggggaagcggctctctctggggcttctgggaggtctggcccgggcccctcccgcagcctccggcggccagtcccgcggctc

SEQ ID NO: 37841 - DNA, 2300 bp, Homo sapien
gagtgtggagcatccaagtaagccctcccaggacagtcttgacactcttttccaagctctctggggtacccttctgtaacctataaataccaactagcggtacaatctgtagaagtagaatagaggcccaaaaactcaggcaacttgctcaaggtcacacagccagtaagtggcagaaccaggatgcaagcctggttacattccttctactgcaccaaaggacctatttcagacggtgccaagcacatattaggggctcaatgaatgtgttgagtgaattttctctctttatcttcactcattcacttaactaacataacacaatatgatagaataaaacaatgtaatacaatgtaatataaatgctgtttctgctgactctaaataaacaaaaacattaatgtgtccaccacaaattgaagagctcataataatctgactgaaaggtctcctttccggggaggctttccttgaccactatatcaaaaattccaaaagttgccccatgtaactctttggcctttcctttattttgttccttttagcatttacagttacctgacatgccttatatttgtttttttcaagatgttttctttatctttggctttctgaagtttcaatacgatacgcctagctttagtttttttgtcatttatcctgcttggtgttctctgatattcctgggtctgtggtttgctgtctgatgttaatttggggaaattctgtcattgttgctctaaatattgcttctggttctctctctctctcttcttatatttccattacgctaatgttacaccttttgcagttgtcccagtttgggaatattcagttcttttttttttttcagccttttttctttttgctttttggttttgaagtttctattgatgtatactcaagctcagaggatttcttcttttctcagtggtgtccagtctacgaatgagcccatcaaaggcattctttatttctgttacagtatttttgatctctagcattttttggttctttcatagaattctcatctctctgcttatattactcttaggttctttctggggtgatttctggcaccaaccagttctctgattctgcaattctctgacaccagctgggcgttcaacaattcaatcccattctgaaatcaactcccagagttagcatagaccccacaggtgaagagctgagtcttacaagttgcaagtatcaggtttccaagtaacccacacttctgtgtaaccgggctgcaaatgtggcgattctcacgactttctcctcaggttcaataattctctggaatgactcacagaactcaggaaaggctatacttactattaacagtttatcataaaggatacaactcagcaacagtcaaacaaaagagatgcatagggcaagatatgggtggagggaggaagacaaagcttcctgtcctctccaggcacacccagtacctcaatgtgttcaccaatgtggaagctctgtgaacctcatcatttaggagtgtttatggaggttccatgatgtaggcatggttgattaaatcgtcagccattggtgattgaattcaatctccagccccttttccctccctggggcttgggtgtagggctgaaagttccaaccctctaatcacatggtttggtctttctgggacaagtcccattctgaagtcatctatggaccctcagccaagagccatgtcattaaacaccaaaaacaaacttaccgtgcaggagttccaagggttttaggagctctgtgccaggaaccagggacatagaccaaatctattttattatgccaaaattatccatctgttcttgcatgttgtctacttttcccatattaattatagtgaatttttaattcctgggctgataatttcaacatccctgccatatctgtgtctggtgctgatgcttgctttgtcttttcagattgcatgcgtgtgtttttgttttgtttagttttttacttttcagcatgcctcgcaattttttgttgaaagctgaacatgatgtactgagaaagaggaactgtggaaaataagcttttagtgatgtggtggagaggtatagggctgggggaggcgttctatagtcctattaatcagtctttagtgagcctatgtcctgggctgtgaaacttagttccctccccccattatgtggggcagaatggctagaggggactggagttgagttaggctctgataaaaccccaatcgtttaggctttggtgaaacagtttctcttgaagacaggcctcgttaagaacagaatgctctggca

SEQ ID NO: 37842 - DNA, 2300 bp, Homo sapien
cacacacacacacacacacacacacacacagagagagagagagagagagagaatgtacactctattattatttgattaggaagacattaatgaaaaagctcggaacgggatgctaaacaacaaagccctatgcaaatcacttcctttcggattgaaggcttgtctcctacagaaaaaccaatgctaaagaaacaggcggagaggctgaaggtggagagcaaaagaaaaagaaagaaaatagcttgaacgaggaaagggactggcaggaggaggacagagcaagcctctctcagagagaaattacagaaagacggaaggaggtttgggaaaacccagtctaagctgctccgacggcggggctgggcgtgggcaaggtgcctccttggacggtccgcgcgcctgccagacgcgtccttccactacccgtccagccacctggcgctggtcgggctttgcgaggtggtttaggaaccgcggagtcattcgatttgaaatcttctccaataagcttctccgtgtgccgacgtgggcagcatgacagtggatttgctcggcagcatctctggcgcctcccgccctcgcccgccgcctgccagatccgaaacagacagtcccagacatttcgcgagggggatggttccagaaagcgaagatctgagcgtggtgaatgaaatgtgaacagaatagctccggaaagagtctcagaaaccttgaattggggtcagtttggagactgaaaatgcgtcgagcgctgcaggtggtggttggcagggggatttaacactgtggagcccttactccgtcccaggcgctgagcccagcgagccacgcgcggtgcccagctcggtgaggtcggttagttgggtcttcagggaggctaaataccctgtatttgctattcccttcgcctggaacgctctgtgcgagactgggtgtggcagctcctttcccaggctcaggaatctgggtaaaagccaccctcgcctagaggccctcagggtgagcgccccatcacgcgctaaaccactttcgaaagtggacttggccctcctctcagtactaacagtctgtcagccttttattttttgcatagatatgtattttctcttctttattgtctgtctttccacaaaaaatgcaagccccgtgagtactggagcctggtgcgcctttctcacagttgcaagctcgcaactgctcctggcatatactaggtgctcactaaatgctcatgcccttcccacccgccacctgcggcactcgacacatttgcagtctgcaaactgaccccaaaccatcagctgcttgcattcgtcctaggatcaaagaaggccattgggctagtgggaagtcaagtcgggtggacttttccgtctttcagggagatttaatagtaacgacggtgctctccccacctcctacccccttgcacataaactgcacagaacaaaatcaccccggcacgaatctgcacgactgcctctggaggtagggtcacggtctccgagccccgggtctcacactgatgctgtcctttgtcatctcgtgcctagagtgctgcctccctatgtatttcctctgttctcgactcctctgccacagtctgactttctcgggaggtcgagttctcctagcctgtgcgaccgcaagggtcccctggagccttctccgtaaacctgcccctcccgcgctgccctcactttttcctccttccctggcccggaaaagccactagaggaacatttaccgaacgcctaccgcgcgcaggcaccgagctgggccaccgggagccccacccagtgcctcgccgcaggactcgcctccctccgccctcccaacccatccggaatccggggtccctagttcccccgccgcgtcatggaatccgctggcttcttccgaggacatcgccccacctccttcccgaaaggcgacttctgattggtgagattgtgcatcactctgccgccctcccgccccctcggggccccgcccctgggcctctcaggcccctcccctgcgctcccgcccttgcgcggctcctcgggctaatcgccgggcggcgcgcgccgagaagttctgggcaaagtactcagaactggccgcgtgctggtggcgcccgccagccggcccgggagaggggacttgagcgcttcgcggccggtgcgcagcgcggctccggccccgcagtctgtctgcaagtggccatccccgcccccgactcctgcggccggtgcgggagctgtcagctgcacgttgcgggggtaccggagaagccggggttgccttctcccggttct

SEQ ID NO: 37843 - DNA, 2300 bp, Homo sapien
tgagcttgaagatgggctatttgaaaatacacactcagaagagacaaaagaaaaaagaataaaaatgaatgaggtacacctataagatctagaaactggcttcaaagggcaaatctaagagttactggccataaagaggagctagagagagagatcagggtagaaagtttattcagcgagataatgacagagaacttcccaaacctagagaaagatatcaatattcaagtacaagaaggttataaaacaccaagcagatttaacccaacgaagacaccccaaaacatttaataatcaaactcccaaagatccaggataaagaaagaatcctaaaagcaagcaagagaaaagaaacaaataacataaaaaggagttctaataagtctggcagcaaacttatcagtggaactttacaggccgggagggagtggcattacatatttaaagtgctgagggaaaaaacttttatcctagaatagtacatccagtgaaaatatccttcagatgtgagggagaaataaagactttcccaggcaaacagaagctgagggatttcatcaacaccagacctgtcctacaagaaatgctaaagggagttcctcagtctgaaagaaaaggacattcgtaagcaataagaaaccacctgaaggtacaaaactcactactaatagtaagtacacagaaaaacacacaatattataatactgtaattgtgtgtaaactgttcatatcttgagtagaaagacttagagattaacctaacttatcaaaaataatagctataacaacttttcaagacatagtataataatatataaatagaaacaagaaaaagttttaaaagtggggagagtgaagttaaagtgcagagtttttcttagttttctctttgatttttgtttatgcaatcaatgttatgttgtcatcagtttaaaacaatgggttataaaatattatttgccctgggcgtggtggctcacacctgtaatcccagcactttgggaggccgatgcgggtgaatcacctgaggtcaggagttcgagaccagcctgaccaaatagtgaaaccccatctctactaaaaatacaaaaattagctgggcgtggtggtttgctcccgtagtcccagctacttggggggctgagacattaaatggcgccactgaagaagaatgaataaggtctagtaatacaacagggtgactacactcaacaataatttattgtacattaaacaaactaaaagtataattggattgcttgtaacagaaaaaaaggataaatgcttgaggtgatggatagaccgtttaccctgatgtgattattatacattgtatgcctgtatcaaaatatctcatgtacctcttaagtatatatatatatttacctacttcgtactcataaaaattttaaaaggtacataaatgttatcattgcatcctcttaattttatttttcagttccagagggataatcctgtctctgccgcaaatgcagcaccttcctcagtcttggggcgtccatcaagcggagagctggaatgtgactgaaagtaacagagtataggtggaactagaacaaggtcacgagctggtgcccaactcgtgtaactcctggttccaggctgtccctctaggatgctgttggcgccagccgtggtagtaggacagagtctgggtaaaggtcgcctgctgacaagatggtagctaggagacctctaggtgcgccaaaattagggcgtcttttcctggaccggcaaaacgccctgctcaaagctcattacatcaccacgcccaagaactgatactttagcagggcaacgcaccaaccaagcgactccgccccaccctccccgctcctccagcacacgcaagcgcacagaggcccgcgagtgacgtcacctctcccgacaccacctcgttgtcgtacgaccaaaggcctgtcgtaacggccgggaaaagcctcgagaagaagggcacgcacgccgtacaccctaacatgctcgccagcatgcgcgcgcaggtccttggcgcaggcattgggactggagccaatgaggtgcggcgacgttactgcgtagccgccagctcggccgcacgtcagggcgcgggagcgcggagcgagtttggttgcacttacaccggtacttaagcgcggaccggcgtgtccttggacttagagagtggggacgtccggcttcggagcgggagtgttcgttgtgccagcgactaaaaagaggtgagagcgggtcgcggaggccgcacctggttagaggcagagctgtgggaggcgcgcacttgc

SEQ ID NO: 37844 - DNA, 2300 bp, Homo sapien
ctttatccctgaataagtaagccacatatttgttaaaggtttataggggtagcagtgccttttaccatgattactgtatatgtaaaatggaatcactctaatctcacagggttgctatgaacagcataacccttaggcccaggaactttagaaggccccacactttagagggccagttctggccttcctctggctgtggccctttctgtggagcaagaggatatgttcgtctggagcccatgctcctctgtctccctcccctgaccatgatcttgaaccacagaattccctgaccaaatggctttaaacccaatcctaggcccttcttagggtctcttccttatgtccatcttcccaagggttggcagtgctgccaagctggtatatacctcatggccaaaggagtgaccaaaacatgactgcatgcctgtttgctagaagtgaggtggtgggtaaatggggcgggtaaagaagaaagcagtcagggtgctgaggccaggggccagcggctggctctccctgaaccaccctgtcccagtgcagaactcgaagtagtccaagaagtccaaatttaaacctggtcttccaggttgttccagagatattttgtcaaagcaggtgaaaggaacatattttatttaacatttatttacttgatttataaatttaactatttagtgaaatggaatacagacttccatttgtactttcatcccaggccctcaagtgttaagggtgggcctggctgtgagggcacccagcagcctaatgttgaagaaatgctacttccacacttgccaccactatccatacctctgctcctgctgttcctttggcctccacatctctgcacatcattcaaggcccagtttctgcatataacatgacatggcctcttgtcttcaccctccctccctgtttcccagctccacttccccattcaggtgaattcaatctctcccttctttgaactttcaaataattgtgtctcatggtcgagcatggtagctcatgtctataatcctaacgcttgataggctgaagtaggaggatctcttgaggtcaggagtttgagaccagcctgggcaacatgatgagaccctgtctctacaaaaagtattttttaaagaaaaagccaggagtggtggtacaggcctgtagtccaggctgttcaggaggctgaggccagagaatcacttgagcccaagggttggaggtttcagtgagctatgattgtaccactgcactccagcctgggtggcagggtgagaccctgtctctggaaaaaaaaaaaaaaaaaaaaaaagtgtctttacttcttttatgacaaagaattacttgttaaaatctttttgtcatttgtgtttcatggtttatctcccctactagccaatatgttcctggatggcaagatttgttttggatccatgcttgtttgcagccactactgtgcacatataggtgcttagtaaatattaagtatcataagagagatactgagaaaaggtgaatttctaagtaatcaaaaagactgcagtgaaactcacttattcactcatgtttacatgcatagctcttttgaaaatataaaataaaactctctagttacgtctgaagaatgaaaattttatttgaatttgagtgatttaaacttcattggaaattcataaaagacatcaaatggtttcatttcaggcatggaaggaaaagtagaaggcacacaattttagctaaacttagccaaaagaccaccttagagccctttgtattgctaataaaatttcactggaggtagaatattcagggacatttctccaatacacattatcaaagtcccagctaaggcaaaagacttttagaaaagaccttaccatttatttgatagaatattgtgtttaactctatatatggttccaattatagcaattagtaattaactagtaattaatgacaaaaaaaaaaccattctgacgtcagcctggaatttcctttgcctctttcctgctgagatcatgaatcaggtcttattctactagatgacattaacagcagtaatctttatgttcatattttagtttcccagaggtgttgagaaaaataagccagtattctacccaaaacctcctaaaaccttcgctcctaacacttctttaaattcatgggaccctatttgctctgccaaagaagccaacatacaaagaaatcttgagaggtcccactggctcacttcgtacactcatgattttacaggtatgagttcactttcatacaagtaaaaattagaacaaaattggaatatt

SEQ ID NO: 37845 - DNA, 2300 bp, Homo sapien
gcaatccaataccactttcttttgttactaagattggcaatgaggagctctttgagttcgctcctatattcttttgacatttccccatcatcgtggggttttggctttcttttttttttccttttagcatttcctttctttctgtcactctgcaataatccaggctcatcttatataatagcttccagagtggccgggcgcagtggctcatgcctgtaatcccagcactttgggaggccgaggcaggtggatcacaaggtcaggagttcaagaccagcctggccaacatggtgaaaccccatctctactacagatacaaaaaattagttgggtgtggtggtgagcacctgtaatcccagctacttgggaggctgaggcaggagaatcccttgaacctgggaggcggaggttgcagtgagctgagatcctgccattgcactccagcctggatgacagagcaagactctgtctcaaaaataatagtaatagtaataataactcccagaaaccctgactcctttgattggggacaggtgttagaagccgagatctgagcacccagtatcctccgtgccacaggagtcctctatcaagcttaacagaaattattaagctgccatttaaaaaattgtgtttcagctaaagacctattcaaaaggctattaaaattaacttctaggtttttttggtctttctattttttaaaaaacgacaaagtgaagaacccttgtcttgagcttttcaaattctcttcataaacagtttgaaaagtaaagtcctttttgttaggtcatatttcttggattcacctttctgcttgtagcctggcaagttccaaggtgggaggccggaagtctgagatgaagacctcagcagggttggttccttctgaggactgtgatagagactctgtcccgtgcctctcccctggcttctgggctttgctggtgatctttggcactccttggcttgtagatgcatcatcccgatctctgccttatcttcacatggcatcctcctcaggtgtttgtctgtgtccaactttccctttcctaaaaggataccaggcatcttgggttaggggcccaccctgctccagtatggaataactcggtcttaactaagtatatctgtaatgaccctatttccatacaaggttacaatatgtggccctggagactaggatttcaatatatggatgagggcggaagggaggaattcaacacataaacacttggtcttgcttttttctgcttaattttcttgttatgaataacatttctctatcccatggacttcctaattttgcttttcttctagtttagacagctcccacatggtttttttttaacctctgccagttctccaaatgataggaaaattatatccctatggtctctttaacatgtttattttttccttcagtgtgctagctgtttttggctttttgattttgaagcagtactgtgtatataaacaggggttatattttgttgattgttgattgttgattgattgcttaaagaaacagatggcctgggttgaaagttcattcaaagatggttagagatcactttgctgaagcagaatgcccaaaacaattcctgggagcctcttaaaataagacacagtaattaaaagcaactataccattctacaaacacaaaactcatttattttttgctttatattttttatacgagttatgaaacttactcactgacaaagaattgggcatgatttattttaaaattaaatttagttttgtctagcaaaattaagaaaatgtcctgttttgtggtatacattccaagagaatgctaattccatgagcacagggacattgactcactgtcctatcccccagcattagaacagtttctgccatttaaaaaagggtcccaataaatttttgatgattaattttttcaaccatacttctttctgttcttttcattttgttttgtttcctcaataaatcttagagagatctgcttgccatatccaattgaacacccctaccacacacacatctgtcgcggcgccatgttccccaccttcacgtcacctgaggacctctacacgggcattaaagcccgcacccagcagccctttcctcccacggtgccaaccaaggcttatgattcaacagttttgaagacaagaggtaaaatgtgacctggaatcagaactgtattaattcttattattgggatttcttcaataataaaattaaagcaaggagcacaaaggactcaagtcacaaatgtgtgactcaatagatcaggaaacttgttcac

SEQ ID NO: 37846 - DNA, 2300 bp, Homo sapien
tgctcagttattcctcccaggaagaatcaagccatgggaaaataggactaaggttgaggatgagaaaaaggtgaagtatagaaagtactggaagactggggacatgaaatgggctggggagacaaggaatttaatgggagatcctgaacacagaggagcagaaaaggggcaaaagcttacaatgaactaccagaaattggaggggaaataaagatgtcaaagataaaagccagtttcacctaatacacaactctgtctccagcaggatctattcctctaggcttagtgggtggtaactactggaaggtcggcagaggtgcaggaactaagaaataaaccaagactacaaaattaccactgtgcctacttcaatacacctttcttcccccactccaggtaacactcacatagaaggcacagcacaaaatgaatgcccactggttggttagtagaaagttgtaaagtaggcagagaatagcaaaggcaccatcatactgttaccaagcaaaggaggctcgctgcccgaggcactagaagtcaatactataacactgggtttttgataaaataaaaacttttattgcatgtcaaccaacaaagaaataggaagtccagctcaaatctgtctccctgtgctggctttaggacaattattttattagaaatggttttgagtgtggattctgggattagcaggtgcttggtggaaggaaagaggaagtctggaaagtccttgcgcatgtgctcttatttcttcatgctacctaagggttccacgtgcaaattcagtgaggagttagtatgaaacatggcagtagaaattcagctgtaaggtcagcaagctggatctgtgcagactctagttggccttatatgttccagtggatttcagccagttttattaacctacaagcccaggcatttcagcatttcagcaatttgtttcttttatctgccatcctgtaaactcaagaatttctatgactgttttctttaactctttggcacacagtttcaacgcccttcttctcagaggtggtcattctcaccctcaccttctggttcctgcaggctcatttctagcctcccacactgtattagtcttttctcacaatgctgtaaagaactgcccaagactgggtaatttataaacgaaggaggtttagttgactcacaatctcacatggctgcggaggcctcaggaaacttacaatcatggcagaaggccacggagaagcagttaccttctccacaagggggcaggaaggaaaagtgctgggagaagggagaagagcctcttataaaaccatcagatctcgtgagaattcactcgctattacgagaacagcatgggggaaactgcccccatgatccaattacttccacctggtctctcctttgacaagcggggattatgggtattacaattcaagatgagatttgagtggggacacaaagcctaaccatatcacacatatacacacaacctaacctcctcacatcccattccttgatggggtggcaggtggcgaggggggggtgacatcccttattgtcagccatcacaggaactcatgaccctgtaggtgcagattcatggctcacatttgtatcttttggggaaaactgaggtaatcaaggtggggctaggccctggggacgaggcaagtaaaggactttgccatgtccgcacccaccagggaaggagcagagactctgttagggcgccatgccaggggctgcagtttcagaatcctgcagactccaccctctatctggccacactgtccccaatttttgcgaggtgacctggggagggaggacaggtcggatgctccgacctcaccagggactccactggaccggagctcttcctcctccgcccagtccacatgagagagctccctggccggccctgagacagctccagacctggtagccctggaaaaagaaactggtatcgccatcgccgccgccgctagagggcgcctgggggcggggcgcgggtggggcaaggcggggtccgactggaggcagggcggtgagccgagaggggcggggcaagggaccgggaggcggggccaggggtcgcaaggcggaagagcccctctcgcctccgacccggcgcctcgcactccgttcactctcggttcctcttcgcattcttgccagtcccgtagcgctgggctggtttcctccgaggtctctaagagcctcctactgcgccccgctcgccgcccggaagcccccagcccctcaaggacgcatcacctaatgccgcggtcacggccaccgtcaca

SEQ ID NO: 37847 - DNA, 2300 bp, Homo sapien
atccaggctggagtgcaatggtgtgatctcagctcacggcaacctccacctcctggattcaagcgattctcctgcctcagcctcctgagtagctgggattacaggcatgtgccaccattcctggctaatttttgtatttttagtagagatggagtttcagcatgttggccaggctggtcttgaactcctgacctcaggtgatctgccagcctcagcctcccaaagtgctgggattacagacatgagccacgtgcctggcccaagccccatattaataagataattctaattaccttccaaacgtggagtcctaacctggtggaggcagggagcaattaagtcatatgtgtatgctgattgtcatcaggaaaattctaatggatctgccaacacccattagtagcagcactgaaaactggtgagctgcttaatttgcattttatctgaaaatgacaactagataaaaatacattttgaaaaagactcaggctgatgccttctgctttttctggggtgtgaattcagtcaacaaaacttgccccttgattcattcatttctcaaaagtttggatctactgactacacacacatacatacacacacacacacacacacacacacacacacacacaaagaaattccatcagcagtttgcaaaagaacaatttggaagagaaatgtattaaatcctcagggaaattaaacccaaataatccaataatggcattacaaaattaacgatagactatgaattgaattaattgcctcctactgtggggttcttggctactacaaaccaaaacaaatgaagccaatgatgtcaaatgccttaagagagaccataggcaagtttgtatcacaagagttcacccactgtggtttttcaactttctggcttgttctggagatcaatatgaagaaagatcttcacttctgccatctcacgtctcaaattacatacggtaggttggtgagagaggtgagaggtggcacagttctagacacaacagagcaattttacaactctttgtgaattacctctaactgtctgtgtctagaagtagctggactgtaggaaatccatgcaagtctttttctcctgaaagggctgaagggactggtgggaacaagtaaaggtgtctctagaacccaggcagtctagtgataaggcagatatttaagaacagtcagctgctccaaaagagattcgctttggcatttcagtaaatgcgcatttatttctgtaaattctcttttaatgtcatgatgacagcacacctttggcaatacgcgattacctaaataatatgcgtcctgggaccaatagagttagcatgtgtatgacttaccaagcccctgctagtctccctaaggactttgagagggaaggtaggatgcagcatcttgatagaaagttttggtgattgacacagctttaccaaataagacccatagagcaaatacagagggcctgactgcctccagcttctcctgagacgccagtttgtcaaaatgcctatcaagtatttgctcatatacacatccttcatgttacggctaacattgacccctgaagctttttaataaccaaacagcattttacaaaaaaactaattcatggcattttgttgggatattataatttttttcacattcttaattttgcttgacattttgaaaatactacgcctaactcttttgtgcagattaaaaaaaaaaaaacatagctagcatggattgaatacttccttttccttccctcaagaattgacacaaacaccaaaaacaaaatactttttgtttaagcttagagaaatgaagcattctgtctgtttggaatcttaattactatccccccaaacttacctaattagaagctcttttataatgaggaaaattattttcaaagttaatgaatttgcaagcacaaacattgctgtcttcccagaatgaattattcacattccttacatgcatattttagttgtacactctaattaatattagtacttaaaatgtgtgagattgatttcactgtttaaaaaaaactttcctttgtttttagacgatataaaaacaccacaatttttttctcctctcataaacattgggctgcacatagagacttaattttagatttagacaaaatggaaattatttcatcaaaactattcattttattgactttagccacttcaagcttgttaacatcaaacattttttgtgcagatgaattagtgatctccaatcttcacagcaaagaaaattatgacaaatattctgaggtaagttttttaaat

SEQ ID NO: 37848 - DNA, 2300 bp, Homo sapien
caggtcaggcctcaggacctttgcacaggcagttgcctctggtaggattgctttcttctcttgacctggttaatttctatatgtctttctgaacttacttcttttaggaagtaaaagaagtacttttaccttttacagactaccggctgctggtaggtcttcctaatgtcatgttcacagacctcattctttatgattgaatcacctttacaggtgaggaaacagaaatgttaagtaacttgcttgggggtccaggtagtggctttgtgaaaacacacaatggatcattttcactttaatagcagctacatctcttgtcaacgattagagttctgtgtcaagttttggtttctaaatgatgtgtagatgctggaatgagttgagagaaaagaaacaagctaattaaagagtagatgagtaggacctttgaagaaagagcaaaggaggtggggattgtttaatatggtgtggggacatgggaagaaaaccggatttagagttttcaagtttggggaggttattacagcagagatggcaataaaaatactttttgactggccatggggtacagaagatgatatttctcatctctataaagatgagaaattgtagctggagggggtttggtttcacaaaagaaagggtgattaaagatttgaacaagacacagagttagtttctagaatgtctttttgcagatgtggttaaaagcaggatcaatagccttctaattcacctggtggctcaggcattgacctatttcaggcagggagctgggcctgctgacctcctgaggttgttttgaatgaatgactaactgaatgaatgaatgaatgaatgaatgaatgagaaagtgaaccttgccatctgtcacaggctagattgtgcctctgccctgcctggcatggaaaaagaaatattgagtgacatgcgtccctaaggtttcctcagctgatcacactcagttggccttatctgccacacaggtgtttccatttattgctgataaactgtcggctgagagtcagctttggggtaagaggtgggggaatgagtggaggaaagggtaataccccagatgttttccaagaagacgggagaaagttattcctcagtactaatacatttcgtcatcctatctgcctgcagatgttaaatttgggaacacttccaggttctctttttgctcttaaaataaaataagttgtgtatttaaaaacatccaggacccagtcttccctggggatgtatctcttttgcatatggatgaagctttggggacttaagaggatcctaaattttactggctatgtttcttgcagcctcaccagtcctgtcaggtttctctgtcagaaaccaggaaaaatgaaaataatcagaagtgccaattactgagtgcctactgtgtgtcatacaaaattaaatcaccatggcaatactgcaagggccgtattaacatccattttacccttggggagttcacccaaagattgtcatttctccaagttcacaaaagtgctaagtagccaaacctggttcaaacccaggtctgtgtaacttcaaataataatggcaacattttgagagctttctagtgtcccagtcactcattaaatcctatggaggaggcactattaggtccttctgaaggtaaggaaactgaggcataggtcatacagctagtaaacgcagagtagagagtcaaagccccagcaacctggcttcagagcttatgaccctgtactgatttccatcccctttcaacactgcatagagaacttgggttgcctggatgcaagctttagttaaatgatctcagcttcagtatctcgagtaagaaacctttcttccctgtgttgtcttatctttccattgatcttctgttgtgggagcagctgcaggctccccaccctgtgagagctttcgtgtgccaagtcattggctacaggtggcaaagttgtggctccagttcaagtctctcccctggagctggatgttccagaaaggacactcagttcttcagggctgtctctgtgatccaggctttgatctgggaaaggttgcgcctcattgcagagttgaagctatctgcctgctttgtttacacgaacgcccttccaggactctgtctgcttttggggtggaagtgccctgccaaaaactccagctctccatgctggctgtgtggccagcatacctcctgccttttcaacgattcctctgccctggatagagagcggtgtctcataacagtttggaaactacaaaagtttccctggcaggatgaatgattgactcgg

SEQ ID NO: 37849 - DNA, 2300 bp, Homo sapien
aaagtcaagggtatgtaggattgtctcctggttaacactttcctgcaaggtcttttaggtacccttgttcttcccaccagtcaagagccagagttaagccatgcttttgaagtgtatagtctgaaagatatttaacactatgattaccaattcacattgtaaaatggtgaggggttagcccacttcccaacaaatgttagaagtttgtatgtgcttcctgttcccagtctattcagatttctcaaaatacatctcaagtgtaacctcctcaattcaactaatattttttttgagcatcaactgtgtgtaagattctggagggcaccgccttgaagaaggcaccgcctctactctcaatagttttagagctccctatataaaccttgaagtaatttacatctaagtattttggcaattgagtacattatttctcttgtttcttagtgtctcacaaatttttatctcatctccctagtaaaaccataagcttacggaaggaaagaactccgtttcatatccttcatgcctccagcacagcctcaggcagttagtaggttctcagtaaaaagctgaaggcagcatttactaagctgagactctaaatccgctgttcaaagactaaatgctgtgaacggggtcttgataacctggcaatcacctttcttcatcctctttgccaccccaacccatcttccaaggcttaacacagaggaagcaactttcctctgctcccctgtttctgctcccctggtccccattcttttctcttcttactacactagcccaggagagagatgagaaagccaggtggagggaggggccttttaaaacaagtcttgctcaactttttacacaactgcccattctcagttgggcatcccctcctgtccccttttcttccaaggaagggagctaaggttagtaaaacctacccttgcaaggcccagtgctgggtactgtgcatggacaaaggtgaaccaaacaggttccttgtcctcaagaatttacaatgggcaaatcagaccgattctcatctacaacacagagttgaatgggccaactgttacaatgttggcaaacggagaaatcacggtgcaacagatgggggagagattaatgccaactggtgaaaattcagaggatgtagctttggagctaagccttgagggtgagtaacacaaacaatgggtagcagggagcacttcctacccatgcagtgctgtggtcggtggtttacatgcattatctcatttggggctcacaaaaggtctgctggggaggtgctattattagtctcattttacagtgagaaaactgaggcacagagaaaaggagagatttgtccaaggtcgcccctcaagtggaggggggacttgaactcactcagggtaactgtagagctggtgctgtcaaccctcaaggaaacaacggataaggagcaaaggataccgagaggaggtctagcactatgcagagcacgcccagagaagagagaggggtctgtgaggctgggactggggtgtgcggagtggtgggatgactgatcccaatggcaacggtggaatttatatgtgaaactccgaactttacacgaaatatttcatctgacctcaacacatccctgtttgacaggctctatgatccccattttacagatagcggaactgagacagagaggttactcttgcccactctgcccgccaagtgtcctcacgttggggtggaagcccgttgcaagctgccaggcccctcgtagctgcccagtcactctccgcccagtctacacatcctgtcccttcccacccagctacccaccacctagccctccaccccaactcccgcccttggctttcagcaaggatggcccagctcacggccacagggtggcaaggggccacttggtgcccagaacaacttctgctcccagaaagccttgcgttccccggacataaagaggctttgagctcggggagccccgccccgtgcggcccctcccacgggcgcgggccccgggcggcagggggcgtgttcctgtcggctgcgcccgcggccgggggcggagcttggccaccgcgccgggctgcgggcggctgggcgaacgggctcggcgctcaggtggctccttcttcgcttctcccgatccccggcggtgccaggcacggtgccggctgccgagggaacgcctttgtgcccggtgctgggaacccgcgacggccgccacgcgccccggtccattgtttcgcttatctgggttccaggcaggtgcgggcggcgcgcggggtccgcacgtgtcaccccgg

SEQ ID NO: 37850 - DNA, 2300 bp, Homo sapien
ctgtgaacggggtcttgataacctggcaatcacctttcttcatcctctttgccaccccaacccatcttccaaggcttaacacagaggaagcaactttcctctgctcccctgtttctgctcccctggtccccattcttttctcttcttactacactagcccaggagagagatgagaaagccaggtggagggaggggccttttaaaacaagtcttgctcaactttttacacaactgcccattctcagttgggcatcccctcctgtccccttttcttccaaggaagggagctaaggttagtaaaacctacccttgcaaggcccagtgctgggtactgtgcatggacaaaggtgaaccaaacaggttccttgtcctcaagaatttacaatgggcaaatcagaccgattctcatctacaacacagagttgaatgggccaactgttacaatgttggcaaacggagaaatcacggtgcaacagatgggggagagattaatgccaactggtgaaaattcagaggatgtagctttggagctaagccttgagggtgagtaacacaaacaatgggtagcagggagcacttcctacccatgcagtgctgtggtcggtggtttacatgcattatctcatttggggctcacaaaaggtctgctggggaggtgctattattagtctcattttacagtgagaaaactgaggcacagagaaaaggagagatttgtccaaggtcgcccctcaagtggaggggggacttgaactcactcagggtaactgtagagctggtgctgtcaaccctcaaggaaacaacggataaggagcaaaggataccgagaggaggtctagcactatgcagagcacgcccagagaagagagaggggtctgtgaggctgggactggggtgtgcggagtggtgggatgactgatcccaatggcaacggtggaatttatatgtgaaactccgaactttacacgaaatatttcatctgacctcaacacatccctgtttgacaggctctatgatccccattttacagatagcggaactgagacagagaggttactcttgcccactctgcccgccaagtgtcctcacgttggggtggaagcccgttgcaagctgccaggcccctcgtagctgcccagtcactctccgcccagtctacacatcctgtcccttcccacccagctacccaccacctagccctccaccccaactcccgcccttggctttcagcaaggatggcccagctcacggccacagggtggcaaggggccacttggtgcccagaacaacttctgctcccagaaagccttgcgttccccggacataaagaggctttgagctcggggagccccgccccgtgcggcccctcccacgggcgcgggccccgggcggcagggggcgtgttcctgtcggctgcgcccgcggccgggggcggagcttggccaccgcgccgggctgcgggcggctgggcgaacgggctcggcgctcaggtggctccttcttcgcttctcccgatccccggcggtgccaggcacggtgccggctgccgagggaacgcctttgtgcccggtgctgggaacccgcgacggccgccacgcgccccggtccattgtttcgcttatctgggttccaggcaggtgcgggcggcgcgcggggtccgcacgtgtcaccccggcggctggggcgccgggacccgcgggcgccggcaggggcgttcccgggcgcgcggcggcgatgaagcacctgaagcggtggtggtcggccggcggcggcctcctgcacctcaccctcctgctgagcttggcggggctccgcgtagacctagatctttacctgctgctgccgccgcccaccctgctgcaggacgagctgctgttcctgggcggcccggccagctccgcctacgcgctcagccccttctcggcctcgggagggtgggggcgcgcgggccacttgcaccccaagggccgggagctggaccctgccgcgccgcccgagggccagctgctccgggaggtgcgcgcgctcggggtccccttcgtccctcgcaccagcgtggatgcatggctggtgcacagcgtggctgccgggagcgcggacgaggcccacgggctgctcggcgccgccgccgcctcgtccaccggaggagccggcgccagcgtggacggcggcagccaggctgtgcaggggggcggcggggacccccgagcggctcggagtggccccttggacgccggggaagaggagaaggcacccgcggaaccgacggctcaggtgccggacgctggcggatgtgcgag

SEQ ID NO: 37851 - DNA, 2300 bp, Homo sapien
ataaacacgtgaacaaaggtctctggttttcctaggcagaggtccctgtggccttccgcagtgtttgtgtccctgggtacttgagattagggagtggtgatgactcttaatgagcatgctgccttcaagcatctgtttaacaaagcacatcttgcaccgcccttaatccatttaaccctgagttgacacagcacatgtttcagagagcagggggttgggagtaaggttatagattaacagcatcccaaggcagaagaatttttcttagtacagaacaaaatggagtctcctgtgtctacttctttctacacagacacagtaacaatctgatctctcgttcttttccccacatttcccccttttctttttgacaaaaccgccatcgtcatcatggcccattctcgatggtcactgtctcttcggagctgttgggtacacctgcagaaaggctgtcacttcacacttggaagattgcacagcagccaggcagaggcgctcctcacttcccagacggggcggccgggcagaggcgctcctcacatcccagacgatgggcagccgggcagaggcgctcctcacatcccagacggggtggccaggcagaggcgctcctcacttcccagacggggtggccaggcagaggcgctcctcacatcccagacgatgggcagccgggcagaggcgctcctcacatcccagacggggtggccaggcagaggcgctcctcacttcccagacggggtggccaggcagaggcgctcctcacatcccagacgatgggcagccgggcagaggcgctcctcacttcccagacggggtggccaggcagaggcgctcctcacttcccagacggggtggccaggcagaggcgctcctcacttcccagacgatgggtggccgggcagaggcactcctcacctcccagacggggcggccgggcagaggcgctcctcacatcccagacgatgggcggccaggcagagatgctcctcacttcctagacggggtggcagccgggcagaggcgctcctcacatcccagacggggtggccgggcagaggcgctcctcacatcccagacgatgggcggccaggcagagatgctcctcacttcctagacggggtggcagccgggcagaggcgctcctcacatcccagacggggtggccgggcagaggcgctccttacatcccagacgatgggtggccaggcagagacgctcctcacttcctagacagggtggcggctgggcagaagctgtaattttagcactttgggaggccaaggcaggcagctgggaggtggaggttgtagcgagccgagatcatgccactgcactccagcctgggcaacattgagcattgagtgagcgagactccctctgcaatcccagcacctcgggaggccgaggcgggcagatcactcgaggtcaggagctggagaccagcctggccaacacggcgaaaccccatctccaccaaaaatacaaaaaccagtcaggcatggcggcgcgtccctgcaatcccaggcactgggcgggccgaggcaggacaatcacgggagcccgaggcagggaggttgcagcgagccaagatcacggcagtagagtccaggctcagcaatggagggagaccgtcgaaaggagggaaggagggaggaagggaggaaggaaggaatcaattttcaacagaaaactaaaactgcctgctggcaacattaatttccaaatctaatctaactcatgagtattttaaattcaggggctttataagtgcatgttaatttaaattgcacagattagaacagcctgtctcaggacaggatgtaaaactgacctttgtttctgaattaaatgtttctttgatactgaaatattgaaatgccggtcttagcttttgacttgtgggttttcatggtccctgaacaataagcacaatgcagttttaaagactgtttgcttatttgatgaaatttcgtacttttataggagaatggggtactaagagaaaagcacgaagctgtggatcatagttcccagcatgaggaaaatgaagaaagggtgtcagcccagaaggagaactcacttcagcagaatgatgatgatgaaaacaaaatagcagagaaacctgactgggaggcagaaaagaccactgaatctagaaatgaggtaagcctgtcagaatattcaagccttgccgttttggttttaatgtagattttgtggcattgacagtttgtgtcaagaatgagcatgtaaaacagtatgctctactattaacaaatatgatatatgaaaatacc

SEQ ID NO: 37852 - DNA, 2300 bp, Homo sapien
attaaaaatgacataaatagccatgagtcagcatatgcaaaagtcaggattcctagtcctctgaaaaagactctaaatcagtgtttaaattgttcataggaacagaatctataaggcaagaacagactatcatgaaaaaagaaaaagatctagaaaagagcccaaatgaaattctagatatgaaaaaagtcattttcattgaaaattcagtggaagtgatgtgaacagctaaggaaaagggtaagttggaagaaagatctaagaaaattatctagaatataccagagaagatgcaaaatatgaaagcaaaattgagacaatgatagaagagaaaaatctaagttacttctaataggagtcccagaagaaactataaaatatgaaagataagcaatatttaaaatgagtttatggcaaaatatttccagaaaagtcctcagattaaaggactacacagagctcctaacgaaaacaaattaagtcctagacataccagattgaaacagaacgtcaagaactaagaagaaacattttttaaattacctgagatagaaaagtttcattataaataacactgagagcaaacttaccagtagtaataaatgccataagacagagtactgagggaaaacattaaaccttatatttttaccagttaactcatcatttaagcatgaaggcaaaataattccatgtaggccgggcatggtgtctcatgcctgtaatcccaactctttgtgaggccaaggcaggtggatcacctgtggtcagtagttcaagacaagcctggccaacatggcaaaacgccagctctactaaaaatataaaaattggccaggcgcagtgacacatgcctgtagtcccagctattcgggaggctgacacacaagaatcaatcacttgaacccaggaggcggagattgcagtgagctgagatctcaccagtgctctccagcctgggcgacaggacaagactgtctcaaaataattccatgtaacaaaaactgggtttactgctcaggtcctctctaaaaagaactctgaagagttctttcaactagaaagaggctaaagcataaaggccaggagtgagatgaagcatcgataaattggttttaaaaaaacaaattggagtaaatgtaaataagtattgactgtaaaaatattttttgagacgagatctcattctgttaggctggagtgtggcagcgctgtcacgactcactgcagcctcaacctcctggactcaggcagtcctcctgcctcaccatcccggagtagctgggaccacaggtgcacaccaccacacccagctaatttaatttgtagaaacggtcttgttgtgttgcccaagctggtctccaactcctgggctcaggcgatctgcctgctttggcctcccaaagtgctgggattacaagcgtgagccaccacacctggccaaaattatataattgtgtaaccaactgggagggctggctatggaggggcaaaataagctgaaactaacaattagccaaaaattacatggaagttgtttatggtaggaatagaaatactgattagctttggacttttaagtatgcatgttgaaatactgagtaccataatcagagaaataggtcagctgcagtggctcacgtctgtaatcccagcactttgggaggcctaggtgggtggatcacttgcggtcaaaagttcgagaccaacttggccaacatggtgaaaccctgtctctactaaaaatacaaaaattagccagacgtggtggtgcacagctgtaatcccagctactccggaggctaaggcaggagaatcctttgaacctgggaggcagagggtgtagtgagccgagattgcaccactgcactccattctgggccagagtgagatccgtctcaaaatataataaaaagtagaacttccaaccaaggaacataatagcataaaaatccagtgtggaaataatacctggtgatcctttaaagataaagcctaaagccccaaccagttcagtcttttatgtgaaagatgcactttttgtgtttctctacagagacatctgaatgggacagatacttctttctctctggaagacttattccagttgctttcatcacagcctgaaaattcactggaggtaattggaactttggcttttatcctcgcaggaacatatctgcactgaccttttggtgaacaaatacaactcctttacttggatgacacagcagtttaaagtaatgcttatttttacagaagcacttcagcttagaattaaccaaatatgtatagcattc

SEQ ID NO: 37853 - DNA, 2300 bp, Homo sapien
cccaggcccaaaacagttttgcacatcaatccatacgcattacaggaaggagcctctgaagccatgttttaatcgaagtataactaaggacaaaatcgttatttcactttcctcgtaatcatctataaaggtccatggatctgtcccgtaagggttaaacttctcagtaacaacattacttaaaatgagtcagctctacaacttaaacggaatccttaagaacagtaaaggattctgacgcgaatatccctcccccgcccagaaaaccaccttcgtccctgcccctcgtggccgatggcttccaatttatgtttattttgccgcggttcatctgtcgttttactgactgcagacccagataaaaccgttactcaaaggaaaaaaaagacaggaaaaacataaaatggtttctttgtcctacggctcgcattgaacccggcccgacgccctgggtggtgatatcttctctgaaaccgggcccgcaaacccggagcaccccccctccccgctcttcggtgtggcttccgaacgcaatggcgccatttcatcgaggggaaggctgagcgcctttaatgaggtgcgcaggactctaaagatccaagctcacaaaacactccaaatccacctcgaaacgatatgaaaacagcccgagaagaaaaaaaaatagttaaccacttctacttcttgatagagaaagcacactaagaaaataaaagagttataaggaaaacgctgagaggaaggcgagccatgaaaatggcggccgccaaatccggttcccgggagagagggggaggggaagctccgcagcctcgctcacgaggacctgctgcccgccgaaacgctcgccgaggagacgccgtggcccccgaagcagcgtgctttagaaagggaataagaattcccgcctccgcgccccactttcaccccagcggggcagcgtccgccatgtgaaagctccccatcccccacccccagtgaagggaaatggcgccgggaggctgagggtggggaagctgtttgtacgctcaggcctccgctcaagaccccgttcataaaccttaagccccactgctactgaattggtccgatttcctgcctctctcccacggaggcggctggccgacttccactgaggcgccaacggcctcgccatgcccttttcaataactcattgatttcaaacccgttacctccatcgcggactcagtcgcttcagcccgatttcccgcagccgagcgagatgagagagatctccgcggacgaacacgaaccggactcgtcctggcgctgtagtgagaactgccgctgctcgagaaacaactctgcgaggagcacctccgcacgggacccggcgctgctgctactgccgctagagccgctgccgccgcttttctagaaccttcccccccactaacgcgtcttccgctacgtcaggccgtcgcgtaaacgccctatccgccgccaatggcgggaaggctctacgccccaccttacgccaaatgcgtactcctcccacccttgcggccagagacagtacccgacgttacttccgtaaatgcgctcaatgaattgcggaaggctagagtcctgctagttactacctcttggaatagggtcccgccccctgccttggcgcaaggcaggtgagaaacggtcgcgcagtttgaaattaacgccgacgggaggggcttaatccgcagcctggagatccagccccctcaacccgggaggtggtccctgcagttacgccaatgataacccccgccagaaaaatcttagtagccttccctttttgttttccgtgccccaactcggcggattgactcggccccttccggaaacacccgaatcaacttctagtcaaattattgttcacgccgcaatgacccacccctggcccgcgtctgtggaactgacccctggtgtacaggagagttcgctgctgaaagtggtcccaaaggggtactagtttttaagctcccaactccccctcccccagcgtctggaggattccacaccctcgcaccgcaggggcgaggaagtgggcggagtccggttttggcgccagccgctgaggctgccaagcagaaaagccaccgctgaggagactccggtcactgtcctcgccccgcctcccccttccctccccttggggaccaccgggcgccacgccgcgaacggtaagtgccgcggtcgtcggcgcctccgccctccccctagggccccaattcccagcgggcgcggcgcgcggcccctccccccgccgggcgcgcgcccgctgccccgcccttcgtggc

SEQ ID NO: 37854 - DNA, 2300 bp, Homo sapien
taaaggattctgacgcgaatatccctcccccgcccagaaaaccaccttcgtccctgcccctcgtggccgatggcttccaatttatgtttattttgccgcggttcatctgtcgttttactgactgcagacccagataaaaccgttactcaaaggaaaaaaaagacaggaaaaacataaaatggtttctttgtcctacggctcgcattgaacccggcccgacgccctgggtggtgatatcttctctgaaaccgggcccgcaaacccggagcaccccccctccccgctcttcggtgtggcttccgaacgcaatggcgccatttcatcgaggggaaggctgagcgcctttaatgaggtgcgcaggactctaaagatccaagctcacaaaacactccaaatccacctcgaaacgatatgaaaacagcccgagaagaaaaaaaaatagttaaccacttctacttcttgatagagaaagcacactaagaaaataaaagagttataaggaaaacgctgagaggaaggcgagccatgaaaatggcggccgccaaatccggttcccgggagagagggggaggggaagctccgcagcctcgctcacgaggacctgctgcccgccgaaacgctcgccgaggagacgccgtggcccccgaagcagcgtgctttagaaagggaataagaattcccgcctccgcgccccactttcaccccagcggggcagcgtccgccatgtgaaagctccccatcccccacccccagtgaagggaaatggcgccgggaggctgagggtggggaagctgtttgtacgctcaggcctccgctcaagaccccgttcataaaccttaagccccactgctactgaattggtccgatttcctgcctctctcccacggaggcggctggccgacttccactgaggcgccaacggcctcgccatgcccttttcaataactcattgatttcaaacccgttacctccatcgcggactcagtcgcttcagcccgatttcccgcagccgagcgagatgagagagatctccgcggacgaacacgaaccggactcgtcctggcgctgtagtgagaactgccgctgctcgagaaacaactctgcgaggagcacctccgcacgggacccggcgctgctgctactgccgctagagccgctgccgccgcttttctagaaccttcccccccactaacgcgtcttccgctacgtcaggccgtcgcgtaaacgccctatccgccgccaatggcgggaaggctctacgccccaccttacgccaaatgcgtactcctcccacccttgcggccagagacagtacccgacgttacttccgtaaatgcgctcaatgaattgcggaaggctagagtcctgctagttactacctcttggaatagggtcccgccccctgccttggcgcaaggcaggtgagaaacggtcgcgcagtttgaaattaacgccgacgggaggggcttaatccgcagcctggagatccagccccctcaacccgggaggtggtccctgcagttacgccaatgataacccccgccagaaaaatcttagtagccttccctttttgttttccgtgccccaactcggcggattgactcggccccttccggaaacacccgaatcaacttctagtcaaattattgttcacgccgcaatgacccacccctggcccgcgtctgtggaactgacccctggtgtacaggagagttcgctgctgaaagtggtcccaaaggggtactagtttttaagctcccaactccccctcccccagcgtctggaggattccacaccctcgcaccgcaggggcgaggaagtgggcggagtccggttttggcgccagccgctgaggctgccaagcagaaaagccaccgctgaggagactccggtcactgtcctcgccccgcctcccccttccctccccttggggaccaccgggcgccacgccgcgaacggtaagtgccgcggtcgtcggcgcctccgccctccccctagggccccaattcccagcgggcgcggcgcgcggcccctccccccgccgggcgcgcgcccgctgccccgcccttcgtggccgcccggcgtgggcggtgccacccctccccccggcggccccgcgcgcagctcccggctccctcccccttcggatgtggcttgagctgtaggcgcggagggccggagacgctgcagacccgcgacccggagcagctcggaggcggtgaagtcggtggctttccttctctctagctctcgctcgctggtggtgcttcagatgccacacgcgtcccgggggcccggtt

SEQ ID NO: 37855 - DNA, 2300 bp, Homo sapien
gagtagatctgcgctcctacctacattgcttatgatgtacttaagtacgtgtcctaaccatgtgagtctagaaagactttactggggatcctggtacctaaaacagcttcacatggcttaaaataggggaccaatgtcttttccaatctaagtcccatttataataaagtccatgttccatttttaaaggacaatcctttcggtttaaaaccaggcacgattacccaaacaactcacaacggtaaagcactgtgaatcttctctgttctgcaatcccaacttggtttctgctcagaaaccctccctctttccaatcggtaattaaataacaaaaggaaaaaacttaagatgcttcaaccccgtttcgtgacactttgaaaaaagaatcacctcttgcaaacacccgctcccgacccccgccgctgaagcccggcgtccagaggcctaagcgcgggtgcccgcccccacccgggagcgcgggcctcgtggtcagcgcatccgcggggagaaacaaaggccgcggcacgggggctcaagggcactgcgccacaccgcacgcgcctacccccgcggcggccacgttaactgggcggtcgccgcagcctcgggacagccggccgcgcgccgccaggcctcgcggacgcgggaccacgcgccgccctccgggaggcccaagtctcgacccagccccgcgtggcggctgggggagggggcgcctccgccggaacgcgggtgggggaggggagggggaaatgcgctttgtctcgaaatggggcaaccgtcgccacagctccctaccccctcgagggcagagcagtccccccactaactaccggcgctggccgcgcgccaggccagccgcgaggccaccgcccgaccctccactccttcccgcagctcccggcgcggggtccggcgagaaggggaggggaggggagcggagaaccgggcccccgggacgcgtgtggcatctgaagcaccaccagcgagcgagagctagagagaaggaaagccaccgacttcaccgcctccgagctgctccgggtcgcgggtctgcagcgtctccggccctccgcgcctacagctcaagccacatccgaagggggagggagccgggagctgcgcgcggggccgccggggggaggggtggcaccgcccacgccgggcggccacgaagggcggggcagcgggcgcgcgcccggcggggggaggggccgcgcgccgcgcccgctgggaattggggccctagggggagggcggaggcgccgacgaccgcggcacttaccgttcgcggcgtggcgcccggtggtccccaaggggagggaagggggaggcggggcgaggacagtgaccggagtctcctcagcggtggcttttctgcttggcagcctcagcggctggcgccaaaaccggactccgcccacttcctcgcccctgcggtgcgagggtgtggaatcctccagacgctgggggagggggagttgggagcttaaaaactagtacccctttgggaccactttcagcagcgaactctcctgtacaccaggggtcagttccacagacgcgggccaggggtgggtcattgcggcgtgaacaataatttgactagaagttgattcgggtgtttccggaaggggccgagtcaatccgccgagttggggcacggaaaacaaaaagggaaggctactaagatttttctggcgggggttatcattggcgtaactgcagggaccacctcccgggttgagggggctggatctccaggctgcggattaagcccctcccgtcggcgttaatttcaaactgcgcgaccgtttctcacctgccttgcgccaaggcagggggcgggaccctattccaagaggtagtaactagcaggactctagccttccgcaattcattgagcgcatttacggaagtaacgtcgggtactgtctctggccgcaagggtgggaggagtacgcatttggcgtaaggtggggcgtagagccttcccgccattggcggcggatagggcgtttacgcgacggcctgacgtagcggaagacgcgttagtgggggggaaggttctagaaaagcggcggcagcggctctagcggcagtagcagcagcgccgggtcccgtgcggaggtgctcctcgcagagttgtttctcgagcagcggcagttctcactacagcgccaggacgagtccggttcgtgttcgtccgcggagatctctctcatctcgctcggctgcgggaaatcgggctgaagcgactgagtccgcgatggaggtaacgggtttgaaatcaatgagtt

SEQ ID NO: 37856 - DNA, 2300 bp, Homo sapien
gctgaataagataaaaaaaaaatctagccttttctcccttctggctcatatttgcgatttcgatcattttgtttaaaaaacaaaacactgcaatgaattaaacttaatattcttctatgttttagagtaagttaaaacaagataaagtgaccaaagtaatttgaaagattcaatgacttttgctccaacctaggtgcacaaggtaccttgttctttaaattgggctttaatgaaaatacttctccagaattctggggatttaagaaaaattatgccaaccaacaagggctttaccattttatgtaacatttttcaacgctgcaaaaatgtgtgtatttctatttgaagataaaaatcctcagcaaaatccacattgcactgtccttcaaagattagccttctttgaactagttaagacactattaagccaagccagtatctccctgtaatgaattcgtttttctcttaattttcccctgtaatttacactgggagagctgggaaatatgtggatgtaaatttctcagccacagagatgcaaagttatactgtggggaaaaaaaacttgagttaaatccttacatattttaggttttcattaacttaccaatgtagttttgttggaggccattttttattgcagacttgaagagctattactagaaaaatgcatgacagttaaggtaagtttgcatgacacaaaaaaggtaactaaatacaaattctgtttggattccaacccccaagtagagagcgcacatttcaaacgtgaatacaaatccagagtagatctgcgctcctacctacattgcttatgatgtacttaagtacgtgtcctaaccatgtgagtctagaaagactttactggggatcctggtacctaaaacagcttcacatggcttaaaataggggaccaatgtcttttccaatctaagtcccatttataataaagtccatgttccatttttaaaggacaatcctttcggtttaaaaccaggcacgattacccaaacaactcacaacggtaaagcactgtgaatcttctctgttctgcaatcccaacttggtttctgctcagaaaccctccctctttccaatcggtaattaaataacaaaaggaaaaaacttaagatgcttcaaccccgtttcgtgacactttgaaaaaagaatcacctcttgcaaacacccgctcccgacccccgccgctgaagcccggcgtccagaggcctaagcgcgggtgcccgcccccacccgggagcgcgggcctcgtggtcagcgcatccgcggggagaaacaaaggccgcggcacgggggctcaagggcactgcgccacaccgcacgcgcctacccccgcggcggccacgttaactgggcggtcgccgcagcctcgggacagccggccgcgcgccgccaggcctcgcggacgcgggaccacgcgccgccctccgggaggcccaagtctcgacccagccccgcgtggcggctgggggagggggcgcctccgccggaacgcgggtgggggaggggagggggaaatgcgctttgtctcgaaatggggcaaccgtcgccacagctccctaccccctcgagggcagagcagtccccccactaactaccggcgctggccgcgcgccaggccagccgcgaggccaccgcccgaccctccactccttcccgcagctcccggcgcggggtccggcgagaaggggaggggaggggagcggagaaccgggcccccgggacgcgtgtggcatctgaagcaccaccagcgagcgagagctagagagaaggaaagccaccgacttcaccgcctccgagctgctccgggtcgcgggtctgcagcgtctccggccctccgcgcctacagctcaagccacatccgaagggggagggagccgggagctgcgcgcggggccgccggggggaggggtggcaccgcccacgccgggcggccacgaagggcggggcagcgggcgcgcgcccggcggggggaggggccgcgcgccgcgcccgctgggaattggggccctagggggagggcggaggcgccgacgaccgcggcacttaccgttcgcggcgtggcgcccggtggtccccaaggggagggaagggggaggcggggcgaggacagtgaccggagtctcctcagcggtggcttttctgcttggcagcctcagcggctggcgccaaaaccggactccgcccacttcctcgcccctgcggtgcgagggtgtggaatcctccagacgctgggggagggggagttgggagcttaaaaactagtacccctttgggaccac

SEQ ID NO: 37857 - DNA, 2300 bp, Homo sapien
ctttgtattgccaaacaataccttgattttgaagtctgtaatctttgataatagttaaacacttttcttggcatgaattgagacattcagttcattcactatacatgtgttttggtccagtctttgctttacttatgtctctgtggcgtcaggcaaatcaggtaacttcttacttacacccttgattgtaaaacagattatacttgtcttgcctactgacctagtgtggcaatttggggaaacatcttggtgctgaattaggttctaggctcaggcactaaacatgatttaaaacttgatcatttgaactagaagccaagtacaaccttcaagacaactctgtataaggtcataggtataatcactattttacagatgaggaaacgagattgactacaaatttggttttgaaaataaatcacatgctcaacagaagcagttttggccaggcacggtggctcgcacctataatcccagcaccttgggaaaccaaagcaggaacatcgcttgagcccaggagttggaggccagtttgggcaacatagtgagaccccatctctacaaagaaaaaaaaaagaatcagcaagacgtggtggacacctcctgtagtctcagctacttgggaggctgaggcagaaggattgcttgagcctgggagttcaaggtgcagtgagctgtgatcatgccagtgcactttggcctaggcaacggagcaagaccttgtctcaaaaaattattaaataataaatcaggcacaactttaacaacacttattgagtccttagcatgtgctatactgtgtgccaaattatttgcttttaatgtgctgtgaaatatctgtgcagtagatactaaaattctgttttattaacctaaaccacaaagaggttaattaacttgcccaaagccacacagctcgtaagtggggtaggtccatcattctcacccaggcagtgtgactccagagcttgtgacattgatgtaaaactctgacaggaataaaggatttattgatatcattggttctcaaactttttttggtctcagggcctctttatactctaaaaaaattattgaggatccccagagagcttttgtttatatgggttataattatcaatactaacagtagaaattaaaacaaatttctaaaatgacttttctaaaaaagctgagaagagtagcattttacatttttacagatattcaacatgtgtcttaaggcaattttacttaaacacatttgattgctgtggcggatcattttggtggaggtatatgaagacaatccaaagtcacaaatagatgaaaaaagggggccttacacaaccccctcccaaaaaggactctggaatccccagtgaatccgtagaccacattttgagagccactggtttatattaagtactttctagcgcagggggtccaatcttttggcagccctgggccacattaggagaattgtcgagggctacacataaaatagacttaataccaaccatagctgatgagctaaaaaaaaaaaaaaaaaaaatcgcaagaaagtttcaatgttttaagaaagtttacaaatttgtgttgggcctccaaagccatcctgggccacaggttacacaagtttgttctaacatttactatcatttagaatgattacagatagttggtatgagttttaacatttttaatatttcttaccgtttgtgttttgtttatgcttttaaaatgtgtcagtaattcagactaattcctggaagtcatttgaaatatattaactttcaagactttattattaccagaaataaagaggttagtttttctgtatgcccacacaactctgactttggtgtcattgaacgcagtaattttcttgactttttattctgaatgttttcagaaattttaagtattctacgttgagtatcaaactcaggtttttctgcttgtaaagttaatggaaatcagatgtttttaattaccaaatatgggttcttgctctagtcatttccatctcactattggaatgtttttatttaaaatacgccatgaaaacaatttaatactctgagtttgctgtatgaaaaaatgtcttctaaacaggctgacaaaccaagaggatttgccagaggtcttgatcctgaaagaataattggtgccacagacagcagtggagaattgatgtttctcatgaaatggtgagtatgcagagattgttacatttgaaagtaagagtagctttttttttttaatttgtgaaatggtttttcatcattaggtagggaaaaactatctgctgagaggat

SEQ ID NO: 37858 - DNA, 2300 bp, Homo sapien
tctttcttttttttttgtttgagagagagagtctcactctgtcacccaggctggagtgcagtagcgggatcctggctcactgcaacctctgcctcccagtgcaagtgattctcctgtctcagcctcccaagaagctgggattacaggcacgcaccaccatatccggctaatttttgtattttagtagagatggggctttcaccatgttggccaggcgggtctcaagctcctgatgatccacctgcctcggcctcccaaagtgctgggattacaggcgtgagccaccagcccagccagtaggcaaggtttcttaaccaccgtagagtcccagtttttacccaatcccactgatggtataacaaaaatgccacaacctaaaaaaggtgaccatcacttaagtttcctggattcaggttgcaagttaccagtcttttttttttttttttttttttttttgagacggagtctcgctctgtcgcccaggctggagtgcagtggcgggatctcggctcactgcaagctccgcctcccgggttcacgccattctcctgcctcagcctcccaagtagctgggactacaggcgcccgccactacgcccggctaattttttgtatttttagtagagacggggtttcaccgttttagccgggatggtctcgatctcctgacctcgtgatccgcccgcctcggcctcccaaagtgctgggattacaggcgtgagccaccgcgcccggcccaagttaccagtcttaatagggtcaaaattctaacagatattcaaatgactttcagtagactctccaagggtttgttgctgctttgtctacagctgtaaagtcatgctcttgacaataagttcagaaagattttaattttacagaatctcttaggatcttagatacatgctgcattttgttttctactcaatgtttttctttgcggagcatagggacaagaatataaaaaatacactttaatttgattttctttcttttttttttgagacagaatcttgctctgtcgcccaggctggagtgcaatggcatgatctcggctcactgcaacctctgcctcccgggttcaagctattctcctgcctcagcctcccgagtagctgggattacaggcgcgcgccaccacgcccagctaagtttttgtatttttagtagagacggcatttcaccatgtcagccaggatggtctccatctcctgaccttgtaatccacccgcctcggcctcccagagtgctgggattacaagcgtgagccaccacaccagcttaatttgattttcaaaagtgatcatggttgcattcacttgtgtgtcatgacttgggtgcaattttaggaaattaaataccagtgattgagggttcagcaatacaacttcaagatccaagatgttaagacacaacattgtatatttatacgttttgttagggagttaatgtaggtgtggtgaacagatgcgttttcaggtgggcctggaatggtccctggaggatgatcagcgacaagctgtatctaatgggaaaattcatgcttgaaaaatgaaatattaggctatgcttattattctgtgtcattcagtcacttattagcagtttaagtgatgattgtggtttcccatgcaaacaggtgtggggacccagcctcaggtgccatttgggaaatgctttcctcagtcaggtcccttggcagatctcattagctttccccccaaatgttttattgagacatttcaaacatagacaaaaactgaaataattttatataaacaccatagcccaccacctagatgctatgaacattctgccattcttgtttatcacgttatttatccgtcctcctccccatcggcaatcctccccataactgtggggtcagggttaggaagcttaaggtgactcaggtggcgaattccgaagggtgccgctggagcacctccagcctcaacgtccggactaatgggggcatttcctccctaactcaatttcaggaagcaggaggctagctctgcagggtgggggcgcacctgggctgggctgcgcggaggcggcggaagcactaggcgcggcgcccacaggcggacggctggcgctgagcgcgggcgcggggccgctacgtgcgcggggagcgcggggagcgcggggagcgcggggctgcgctcgtgtgcgctcctgggcgctcgccgccgccgctgccgccgcgcgcctttgagtcagcaaactccgcggcccgcaagcccggctcggcccggccctgctctgttctgcccggaggagccgcccgtaagtga

SEQ ID NO: 37859 - DNA, 2300 bp, Homo sapien
atttttagtagagacggcatttcaccatgtcagccaggatggtctccatctcctgaccttgtaatccacccgcctcggcctcccagagtgctgggattacaagcgtgagccaccacaccagcttaatttgattttcaaaagtgatcatggttgcattcacttgtgtgtcatgacttgggtgcaattttaggaaattaaataccagtgattgagggttcagcaatacaacttcaagatccaagatgttaagacacaacattgtatatttatacgttttgttagggagttaatgtaggtgtggtgaacagatgcgttttcaggtgggcctggaatggtccctggaggatgatcagcgacaagctgtatctaatgggaaaattcatgcttgaaaaatgaaatattaggctatgcttattattctgtgtcattcagtcacttattagcagtttaagtgatgattgtggtttcccatgcaaacaggtgtggggacccagcctcaggtgccatttgggaaatgctttcctcagtcaggtcccttggcagatctcattagctttccccccaaatgttttattgagacatttcaaacatagacaaaaactgaaataattttatataaacaccatagcccaccacctagatgctatgaacattctgccattcttgtttatcacgttatttatccgtcctcctccccatcggcaatcctccccataactgtggggtcagggttaggaagcttaaggtgactcaggtggcgaattccgaagggtgccgctggagcacctccagcctcaacgtccggactaatgggggcatttcctccctaactcaatttcaggaagcaggaggctagctctgcagggtgggggcgcacctgggctgggctgcgcggaggcggcggaagcactaggcgcggcgcccacaggcggacggctggcgctgagcgcgggcgcggggccgctacgtgcgcggggagcgcggggagcgcggggagcgcggggctgcgctcgtgtgcgctcctgggcgctcgccgccgccgctgccgccgcgcgcctttgagtcagcaaactccgcggcccgcaagcccggctcggcccggccctgctctgttctgcccggaggagccgcccgtaagtgacaagagacccgctgagggggcctcccctgcaccgcccaggtggggacggcggcccttctttccagaggcgcgggcccttcccgctgttcccaggtgcccgcacccttgcgggctggaaagaggtttgggtcccttgggcttggagcagaggagccgcctccttttcagccgaggtgtgccgggcagggagaaatgatcagcgcggtagagcggggagatggagcgcgtcgatccagggattcttggctaaaaagacaccccggggagagggtggggcagaggtggattctagattacggaagaagtgctgtggcaccttacaccaggccgggtagaagggggtggggaggtggtttttaaaatttatttatttatttttttattcattcattaacgggtagccttgagttgaggaattgggaggggtaggcaggtttattcgtgggattgtgggattgagggagaaggcccaggggaaaatccatataattgactgattatcagatttggtgaccaggaaagcaacagcctgtttttcagttccgatgcatcatacttttctcaaattacacggattattgagggggatcgtcacggaatggggagcaacatgtcctgctgaaaggaagggcttctatctctacaagacacgttaaaaatgatggtatcagaaaattagaacggggaggaggcttgcacatgatctccatcaaacctttcattttacagacagggaggctaaggccgagggacgctgagtgttgggaccaggatcattcagccagatgggagcagaaccaggcctacaacctggcaggcttctgacttccaccccggagttatgtccacctctggggcctgggaactgggtttggattgcataagctccccctcctctcccaggagggggctgggctggaggctgaggccttcgccaggaagaagcagggactgcttggatagttgaccagcttctgcaggggctcctcagtgagagaatggaggtgaggtcagggactcctgccttgcctctgccatcacttccagtgatgcctattcctaaggtaggtacatagctggaccttcattattcttaatattatttacttttttctttttcttttgagacaaggtattattctgtcacccaggctggatt

SEQ ID NO: 37860 - DNA, 2300 bp, Homo sapien
aatgtcttgctaagggagtgtggagtgcctttcctcagcagtggggaacagagatatttgagttagttactgtgtattgattccagataaacgaataaagcatatagtatgtatatattttttatagtttttttggtatattttcatgaaaagtgtgtatgattttagtgaaaccataaaaatccattttcattccaatttagattctgttttaaagtagttgccaaggaaactagtaagtgactggttatgcccgattttccctaagttcaaaattagatgcaaattcttcaaagagactacttgaaggccagtaaacatttcaaaggcagtcaagctcagacgcctgggtgtgtgggtgcaggagggttagaaggggggttctgatgttcctggagggaagagatgccttgcctgtgtaggcaaagagctactttgagggaaaaaagctgaatgagttagaggtgagtgcccaggaagagaagctggaagtgagaggttccactgaagtgcctagaaacagacactctttaatggagacaagaccaaatttctggagttttcctttgtttacatctttttatcttgtctcgtttcaaaaaggagttaactttaaatatgtccctgaataaacacgaggcagcatgactccatcgcaggtagagataggactaaaacatgattctcctaaactttaaccctggagttagctcacttaatcctgtaaatctctgcaaagactaactttgttccctggctcctccgtggttgccaggtggtggatatacattctacaacagaagaaactggaatcgctagaggtgtctttttttagggcaaggaagcatttcccagaaaaccccaacagatgtcccctggcttggccttggccaggactggtcacatgctcttttctaagccagtgcctgggcaagggaaggggttggtcataacggatttagactacttaggatttacttctgggccaaggagagggagggggtgagggagggggtgagggagggggtgagggagggggtgagggtgggggcggggggctggcccggcctaagatggctgggggtgatgcgttcgggggacaaaggagtgctggacagttgtgtgagctgtaagaaggacccggaaaatactgcagagtgattgagagtgtagaggggcctgggttctcacctgtgctccctcccaccttagctgggttatgctgggaacctttcaaggctttgctaagcctgggtttccaggagtgcaataagatcgctgtgataaacatgtaggtaaagcagttggcatagtaccttgcgtagaatagtcctcagcatatgtttactactgtcgttgttgctattaataaaagtgacctagctcctctcctcgagaagttcacaaggggcccaaatgtgacagggggagctatcagaaggcgggaggtgacttcttgccagggagcaagccagggcaagaagagaggcgccgtgaagcctgcgttccctcccgcacgcggcttgcctcggtggccacacggggagctcagcaaggcccagggttcgggaggcgggtcctgcacagcgacgcagccttgtcccggtggccgcaggcctggggagcagggcgcagcacacccgccgcccgcttgcaggcgagacgagagcggggcgccgggatgctggcgtccaatttaaccaccagggcgcacgggacggaggccgggggtcccgcttttccgtcagagttcgcggtcacgagtggaacccactgagcactctagtttcctggtattttcatggcagtaattggatgacagagtcaagaggcagggcctgcgccgacactgactagcaacgcgcggcctctgagccgcgcccggccgcccaccccttcctcctccagcaccgggccggctccccctcccggcccggctcggcggctggggggtgggcggagccgcggccgggcagttcattatgttggacagggcgcgtctgcgcctccggccgccgcggctcccggggcctccgcctgcagccggcggcggaacgagggcaggcggctgagacaggcgagctatttgcattccccggcagtcatttttatatgcggaggtaatgaagttgtcagcggcgccccgagtgtggcagagcctgatattcaaatcgccctgcccgctccgcctgctcccgcccgctggtcccgggagccccaggctgcgcgcgcccgcaccgcatcgccgctttgccccgcgaccgcgcgcgcctcctcgtcctcccccgcgcctttgtttc

SEQ ID NO: 37861 - DNA, 2300 bp, Homo sapien
actcaggccaatacacttttattaaaacaaatagaatttaattcaaaccagcattcaatacgttttctcaaagcaatgaaattaagctgtaccagtacttctgctcaatatgttttcccaatcaaatccatttgaacaaagtgaaatatatttatcatagatagcacatttttattaaaaacaaattcactgaaaccaagtttccctttgaactgatagatagaaattctaaccaattgcacaattagatcatagaaacggatgtatttttactttagcaaaaagcatttctgttcaggtccactttaaaacacactaatgaataataaaagttgctccaacaatgtctttaatggaatattctgtccaaggtatgtcctttgaggttgaagcacagtctagaaatttttttttaatgtagggaaaagaatagtgctgaaatagaattacaataacttcagatacttaatgactaaatatttatcctacctatgtgtacttaaaagtgatgttgttggatgtgtacaaatgaattaaagacatgcttgggggtgtcctttttagttgcatttgctactataccacattagccagaaaaaactttccttgtcattgatgaaaaacactctctcttcttacctgtctgaggttaactagggattgccatgcatagagagaacttaatggtatgggaggtcatttatttgtgtggctctttggagggaatttcaattttggtgcctagattacaaaccatattcaagtcttctgaagaaccatggaaaaggagaacaacttacaaatgccacacaccttttgggaggcaacaaactccctacgagcaagagtatccaaataacgtcccacctctctgcagggccactaatgctcccgacacagggcagacctccaagtagagaagcatctctggagaaattagagcctccccacaaggaatatgagggctccgatcagtggccacaaggaacccctccctgctgcctccacagtggccccacactctgtcttctctgctcccatcttaccccaaggctgcaggaccttgggatagaaatcttctcccctaagcagcccagagaatgctccttaacccaagacagtgggttctcagtactacttcctccttcctgcctggaaaagtgcaaaaagtatagatatgcccacagttcactgggcaaataatgtactgacctccgggggatcctggccttgaatggactagatctgccttctctgaaacacaactggtcatggagggtaccctgcgaacagatgttcatcacagaattatttaaaaagatgaaatgttagaaacccaaatatctagcatccaggggattggttaaacatattgtaataatatcttcctgatgtattctacaatattaatatcaatacagtatcataagcattcagtgtcactgtagaggtatttaattgaatgggaaatattcatagtacattatcaaataaaaacgtttaaaagatatagtaatttcttatctttgcaaaatagatatgcatatctatgcataaacaaaaacatgggaagatgacactaaaatgttaatagtggtgagtgatagatgatagatttctctctctctctctctctccacctctctctttgaagctgtattttacaaatttcctgaaattcacctgtattacttttgatataagcaaaaattattttaaaagtggttattttttaaaatatggcattaagtccaatttaaaaggtagtgagcaaatgttgggtcggcttctgtagtcttaattctggtatcctttcagagagggtcagtactccacgtctcattctttgttcttttgcaaaactttatttgaaggctttcatcaactggtcattcgacatgcacttaaacaggaacccaggtaataaattctgccttgagtttgttccaggaagcagtgcggcttgacacaaaggatgtgcatgctttatgttgtcagatgatataaactgtgttgccccagattctgccttttgccttagctcagagccacctggctgttttaatcatctcatctcagatgcctggcaacatctaattcctcagctccttttcagtaatttcagttctattttcttactctatcattctggtgttttcattgcattttcttataaaagagatccagatttattttggaaatagatttgaatgacgaaaacatcctatagaagcaaatcctaaacaaatataaatatttgaccatgattatgcaaagaaagctcctgcttcctcctctgt

SEQ ID NO: 37862 - DNA, 2300 bp, Homo sapien
gtagcttctgggcaaagccagtggcttcattgtggtcactgtaattgtgccaagtcacgaacctgtaggctgagccaggaaggccccaaagcagataagccaggctggcaacatgagcgcccctcacctcacatcctgccccacaaatggcttgagcaggaaccacgaagcctggagcagactcggctgtgctgcgtgctcttgggaaaagacccacagccaagccaagaccacagtctgaagaccctgagccccacggaaaggcattatttgtgaggcctccacgttgggggtgtggtagggagagcaagattttgaaatcagagagcctaaagtggaatcccagttgtaccctctgggattgtctggagacaagcggctttagctctggaactcagctcccttgcacatacgtgcagatgacaacgcctgcccttcaaggttgtgaagattcatcaagaccacatgagtgaagcacctggcatcaggtgtggcacaaagcaggtgctcaggaaatgccaatctgcttaataataagaagagaggccgggagtggcagctcatgcctgtaatcccagcactttgggaggctgaggtgggcagacctcccaaagtcctgggatgacaggagttggagaccagcctagccaacatggtaaaactctgtctctacaaaaaatactaaaagttagccgggcgtggtggcatgtgcctgtaattccagctacttgggaggctgaggcaggagaatcgcttgaactgggaggtggaggttgcagtgagctgagatcatgccactacactccagcctgggcaacagagccaggctctgtcaaaaaaaagaagaagaaaaatgaggaggaagagggaggaggaagaagaaggaggaaggaggaaggagatgacacctaggagtggttactatgtacactcagtgccttcccattccttatctcacttaatcccaatgactgtctgatgcaagtcccattgttattctcacctgacagctgcagacgtggaagctcacagaggtggagtcatcgcccagggttacacacctgatgagcagagagctgggattcgaacccaggcagctgggggctgaggaggccgagggagaagcagctggtgatgaagcctagaaacgaatcaggtctgcttccttgcttggcattcggtgccattgacagcagcctcccctcagcaagcaaaacttgctccaaattgagctgcgagtttcttgcagggtggagctgccctcggctgagtggagccaggagggtgaagcaggagtgtgaacggtgtgaagcacccattacaaatttctggccgccatcctaattttagaggcttcatgtttcaatatgaaatgctgttgttcgtgccacaaaaggaggaaacaaacagaatcgtgccaggagaaaccccctcccccaccaagtttgatgctgtaaaaatgtctaatggggaaatcttttcagtggtaaattaccccactgccttcttttcctcttattttgcatcggaagctctcctcagttcctactggaagatgttcaaggctgggccaggagaattctagagactttttcccctaataggcaccgtgtttgtggagaagtccactaagaatcccagacttgacatagccctggcattcagcggccgcctcactcccatgtggagtgaaaaccaggaagacagcagaaggtggcaaacccactgtcaagaaccagagtagcaatttcttgccattgtagtgataaattgctacactggctgaactaaaaattgtaataataataacaattaacatttatgcagcatgtacaatgctccagtaaaatattcttttaaggtcacaatgtacctttatcatgatgttgtcataatgtatccacaataatagcagcactagctaacatttattgaataattactgtggttactttatctgcatcatcacattaatctttaaaacttcacaacaatgctttgagcctggtgcttttattattcccattgtacagttaataaaacaggtttacgtagttagtggctgagctgggttgcagactcaggcacgtctgaatccggagctggggttcttacccactccagtgactgcctctcagaaaagaacagggcaatgtccattctccttttattttctttaagcacctgatcattctaaaagcatgtgttcctccgtgtgtgtgagttgtgtacacgtgtgtgtgtgttcctttcttttctcggactccaggctcatgactgcttatttgcatggtgttttg

SEQ ID NO: 37863 - DNA, 2300 bp, Homo sapien
taaacactaataaaggagtctaactctactgcaaataaataaggtaaccacattcaaggaacagggaagaaaataactaatctaaaccactgtggaaaacagtattccgctggatgctgaaaagccaagggcatggaactgtgcataaacgctgtgatcagttagtaaaagcatttctcatggcagtatgagctagccgttcaaaactactttatatagatacagttgacccttgaacaatgcaggtttgaactgcgagggtccacttatacatgggcttttttcaaccaggcgtggtttacggtattcgagggatttgaaacctgcagaggcggagggcagacttttcctctactcatgttgcccaggtctgacttcggaacttgagtatgcacgaactttggcatgggtgagggggtcctggaaccaaacccctgtgtataccaagggacaacggtagtggaattgaacaaataagtaaatatattgtatatgatgagagccagggttttcactgttggagaaagatgtcacaaataagagaagaaacaagtataaaatgatttcctgtggtatagcttagaatcatgggtatcactatgaactcaagatctttaaagagggcaggagagaagaagacagaggtagatgggtatgtttgtgcagcttagcatgcacacatatatacctagccctctgttttgagggcttaaaagcaataccattccaataacaatggacccatctacaacatagatcttggtctctccacaccattctcctgtaaaaggaaccaggaatcgtgaagaagtggctgattcccaagccaggacatggaaaacacaaggtcagtctgaaacatcttgtggtgccagaaaataagaaaatgctcaaaataaagataagagtctgtcaaaagagctcgggaaccaatgtgaaagagcgaagagctgagacgatctgagcagcaagataaagatagcgttacattttaagctagactaaaaacatccacaaatacaataattaaacatccacactgatatgaataaacaaacaaaaaccacataaataatgaaggagaaaagacagcgcttctgcacagtggaacgccaatgaatacatgtagaagggaagaggacaggactccacagagtgagcactgcagacaagatctgctgagggatgctagcactggtgagtgaaagctggaggacaaacaggccatgcctagtctcaaagcgtcagcctagatacttatccactgcaaagggaaagataataacttgacagtgagaaacccagcagacaccaccttaatcaagtgaccaagatcaatgtcaccagttataagatgtggctctcatgaaccccttgaatgatgcactgaggaagatgtgccatgatttttgtgtattctcaccaaaaaggcataaccttaccccactcatgagaatgcacaaacaaacccaaactgagggatattctcctgtggaaccgatccattttcttccaaagtgtcagggtcatgaaagtaaaggagagaccatggaaccgttacccagtggaggagaagaaggagaaatacagctaaatgcaatttaggatcttagattagatcctgagcagaaaaaaaggacattagtggaaaaaaattgtgagtttcaaataggactgtagttcagttagttacattgtgccgatgttaatttccagttcttaatagttgtactatggttatataagatggtgatatcaggggaaatgatagaagagatataaggaaagtatatattacttttgccacttttctgtaagtctaaaattagttcaaaacaaaaatttctttaaaaaaatcctatgtcctttcttttaacattagatgagatatgttgattgaactaaataaaaaaggaccaagcatggctttgttttcgagttatttatgtatgcagatttcagccttctgggtgagctttcctgccgctgagtatcacagattgttccaacactcactttcatcatttccttcacgaggaaagaggcccacgaaggttaaatgacttatatgaggtcacaaagtcacttggagacaaaatcagcagtaggatctcggtttccagcccagtgcaatttctgctctatcccgctgacctcattgttgaggtaggtggtaatgtaaagggaagagctaccccttatgggatgtttctttctatcagcctttagagggtcaggtttatttgctggtggtagactgacagcccaactacttgatagaaaccctacgttgatgtcag

SEQ ID NO: 37864 - DNA, 2300 bp, Homo sapien
agccaggcattgacttctactctatagctacgaaagtcctagatggcattgttttccaataagtgttgtttcatctacactgaaactctttgtttagtatagccaccttcatcagatatcttagctagatttttttttttttttttttttttttgagatggagtctcgctctgtcgcccaggctggagtatagtggcgcaatcttggctcactgcaaactctgcctcctgggttcacgccattctcctgcctcagcctcccgagtagctgggactacaggcgcctgccaccacacccggctaattttcttttttttttgtatcttttttttagtagagacggggtttcactgtgttagccaggatggtcccgatctcctgacctcatgatccgcccgcctcatcctcccaaagtgctaggattacaggcatgagccactgcacctggccttagctagatctttttgataacttgctgcagctgcttcaccagcatttgctgcttcaccttacaattttatgctctgaagatggcttatttccttaaacatcatgaaccaacctctgctaacttccaacttttcttctgcagcttctttacctctcagccttcgtagacttgaagagagttagggccttgcactcgattaggcgttggcttaagggaatgttatgtctggtttgatcttctatccagaacatgaaaacgtttctttaccagcaataagcctccttcgctttcttatcattcgtgtgttcactggagtagcatttttactttccttcaaggacttttcccttgcattcactacctggctgtttggtgcaagagccctagcttttggtctgtctcggctttcaatatgccttcctcactaagcttaatcatttctagcttttgatttaaagtaagcttttgatttaaagtaaaatgattcttttactggaacactcagaggccatcgtagggttattaattggcttaatgtcaatattgttgtgtctcaaggaatggggaggcccaagagagggagagatatggaggaaggtatagggttggtagagcagtcagaacacacacatttatggattacagtcgctgtcttatatgggtgctgtttgtgatgtcccaaagtaattataatagtaacttcaaagatcaccataacatatacaataataatgaaaaagtttgaaatattgttagaatcaccaaaatgtgacagagacatgaactgagcacatgcttttggaaaaatggcgcccacagatttgcttgatgcagggttgccacaaaccttcaatttgttaaaaaatgcaatatctgggaagcacaaagatgtatgcctgttaaaggttttaaagaagccattttttttaaaagagaaaacttttaagaagctttacagatagaagacagtaagtatttgttgactaaatggtcaagttggagtgagcagattttataattttattctactaaccaccaccagcaattttatttttgatgcttgtagatggacagtggtgccaatgtctattcggccttctgtttttttgttttgttttgtttgttttttcctgccaaaggacggtgcttagaacttcccagtcttccttgtagtggggaaaatctgtcaccccaaggatacgaattaggtagaaaagtaatgtaagagccaatcacaacgcgcgctccggagcggctccagactggcttcgcccggacgactggcggaagacgagacttcgttacctccgttcaatcggacaaagaaggccataatagtttaggacaagagaaaattccttgtgggttaaactgcggtgggactgactgttacgcagaaggcgtaatcgcaaaacttgtatacactctgtatcatggatacattattttctggaatcctgcagaaacgatcagcagttgtgatggcaccagtaccgaaaatggctgtaaggcgctccggacgctggatcaggtgacgcagcatcaggtgacgcagcctcagtccgcccccttcccaccagtggctcctcctcctgcttcccggcgtagcggtgggcgtggcttgcccacaggctctttcttctggggccgggaaaaccgaggaatacacatgcgcagttggacccctcaggcccttcgtgtcccttcccacccatctccccgccccggccctctgggcggggctgggccgacagtccagctgcagctcgctggagattcagtgacttccttgttgtgagccccggcccggcagtgtcccgactcgtagccccgctgttcttaatccgggc

SEQ ID NO: 37865 - DNA, 2300 bp, Homo sapien
cgcctttcgctatatcctactttcaaggacaagggaggggagagctgtacatatagttagataaaagatgagaagattccttctggcatgtttctgttggcaaagggaactattttccaaaaggtcatctgaaaggaacagtaggttctgtgaattctcctaaaagcaggagggatgttaaggcccaccagaaaatgtatgctggcacccaatctggatgaaggtgttaaccccgcaccaagtctctggtccagaattatctgcaaatatattatcctggccaggagctccccagataggattagaaaggaagaaagagactgtaaatggaaagaaagataagctaagcatgtgctttgggtaagaagtcccagcccaaggagatgcctgggctgttgtctggggctggagccgcctcagtgggaggtagtcagagtgtctgaggtagaagaccccggggaaggaacgcagggcgaagagctggacttctctgaggattcctcggccttctcgtcgtttcctggcggggtggccggagagatgggcaagagaccctccttctcacgtttcttttgcttcattcggcggttctggaaccagatcttcacttgggtctcgttgagctgcagggatgcagcgatctccaccctgcgggcgcgcgtcaggtacttgttgaagtggaactccttctccagttccgtgagctgcttggtagtgaagttggtgcgcaccgcgttgggttgacccaggtagccgtactctccaactttccctggggcaaagtgggaagccatgagacggaaatgtaaaaatttttaaatcgacttgagattccccacacgcttcatggcaacactcaggtaaagaaaagatcaagaactcagcacaaatcgggctgtggagggtgagtgatgaggtgtaaagtgttaacctgatgtaaaccattagcatggtcagaccggtgattaatggagcctcaagatattaacagaacactaccgtcacaataaccacccccacatacttcctatttcccaaatgtataaaatccttgaaaacacaccaatccctgagacttctttgccccaacacctctgggcaccctctccatgcactacaacactagtctgatacaaaagccttttaaaaaaaagatcattattaatttccttggaaattaagcataccagctccttccagaataatcaaggagcatccaccaaccagcaggactgacctgttttgggagggtttcttttgactttcatccagtcaaaagtctgcgctggagaagatgtctccgatgcgggggagcgacaggcttcttggtggctggcgtggagaggggacaaggagttattatacgtagccagggccaggctctggtgctcctgtccatatgagtggtgaatgtattgaggcgagcccaccgcgcccccagcataaccctggtggtggtggtgatgctggaccatgggagatgagagatttccagagtaaacagcgggagcgcactgggggtacccaccacttacgtctgcttcctgatttaacgcgtaggggctgtaaggcgcactgaagttctgtgagccatagcttggaccacaacttgagtgggagtaggacacccccaggttcccggaagtctggtaggtagccggctgggggtggcgatggtggtggtggtggtggtggtggggcgaaccgatctgcacccccctgcccactaggaagcggtcgtcgccgccgcaactgttggcgctgaccgcgcacgactggaaagttgtaatcctatggtccgaggggtaggctcgggctgagcaggtccccgagtcgccactgctaagtatggggtattccaggaaggagttcattcttgcattgtccatctgtcactgagtgacctggtcctgcgaagcccggcgtgactgtgccaactttctcacttcctccatggggccggagaagaaaaatgatatgaatgtacagtgcgcaagagggggggcgggagggcggaggacgctggaggaggggcacgtgacggtgtcagccaatggctgagcctcctgcaaaagtttgccggcttccgcagtgatggatcaccgttttagtggcatttaaatccccggcgctccgccgtctaggtgacgcgcagtcgcccccccaggcagcctaggcggcggcagctgctgcggcgactgcaaaggccgatttggagtgctggagcgaagaagagcaaaagctgcgttctgcgcgcgcccgactccgctgcccgccccgccaggcctccgggaggtggg

SEQ ID NO: 37866 - DNA, 2300 bp, Homo sapien
ccgcctccaggaggactgccttgcctttccccttctccagtcggaggattcccaggagccgaaactggggcaggggtggctgcccaaccccagaaagtgggcctttcctgcccgtgctccctcttaaccatgcttgggatggatcaaagtcacaaatactattctgaaaggaaatgtttggggagaatgtttcattgttactgagggagtccagagtcagcatgggttttttctcttgagaggacaggtttgggggaacttcggtacgtggagaacagaatacagaagactgaaagggtgactaacatatttgaaatgtaccttccttgaaaaaaaaaaaaccttccttgttctaacgggaggaaaggctgaagaggagtggaaaccccaaacccacatacattcattcactataaatttcatctgattccaacattgtacacatggttggagtaaaatttatacagcattgcttataatttatacagcaaagcttcctggacaagctctcgatttctcctacccaagactgcatcaattcttggtctccgtttggctttttctctctacaagcccagggttgacgtgaaacctaatagtaaacaacaatttaacgacctcagcagcctcagggaagtagggtgatgaggaacaggacccctggcctgggatgaggctcagatttgcatgtgtctctctagggaaggacttgaaggttctcataagcaactacacagccagttggaaaggggaggaggtgtcgttggggtaaagtgtcccgtccaccatcagccatttgtccaccgcccctcccacctgccagcccccacacccactctagacgtgcagcagaatgaggaaggttataaaaggaagctctctctctcttctaacattcccctccagaaaaagaggaacgcaacgaagggagttcagctactatgttggagctgtggaccggccctgtgaggcccacgcgggagcgcggaggctcctgggtctcagggcgccggcagatggcctgcagcgcaccgcccggcccccgcgctggccacgtccgccagcgtcatctctctcccccgcctcctacccctaaaaatccggcggtcgagtagctccgcatcccggagggctcccggtgcaaaactgagtgggaaagagaaaggggcggagagcgacgagagagggaaggtggggaagaagagcccggccgcccccggccttttccggcgagctctgagtttccagggctcatccgcccctccaagtcgaattacagaaactcctcattgccatgctaatgacgagaggggctgtggggagagggtttcgaagaccctcctggaagaagggaagtttcttttcttgccctcgtctccttcacgcccacccgagttcctcccagccagccctctgcgctcttccccctccattccgagcttgaagagccggtggcccagcctcgccctccaccacggttctatgcgctcctcacagccccacggtctcccagcccagcctcagaacagaggaggtggcctgggaacccggggcgcggtgtcagccggattccccgccttccggctgggcgcgctgcgggctgggccggcgtacttgcggccacccggcgagctctggcccactgattcccgccccgagagagccgggagccctcttcccttctcacctctcgccagttcatctttcattgaacggtggggagggggcgggagcgggggacgcctcccagcccccacctcccggaggcctggcggggcgggcagcggagtcgggcgcgcgcagaacgcagcttttgctcttcttcgctccagcactccaaatcggcctttgcagtcgccgcagcagctgccgccgcctaggctgcctgggggggcgactgcgcgtcacctagacggcggagcgccggggatttaaatgccactaaaacggtgatccatcactgcggaagccggcaaacttttgcaggaggctcagccattggctgacaccgtcacgtgcccctcctccagcgtcctccgccctcccgccccccctcttgcgcactgtacattcatatcatttttcttctccggccccatggaggaagtgagaaagttggcacagtcacgccgggcttcgcaggaccaggtcactcagtgacagatggacaatgcaagaatgaactccttcctggaataccccatacttagcagtggcgactcggggacctgctcagcccgagcctacccctcggaccataggattacaactttccagtcgtgcgcggtcagcgccaacag

SEQ ID NO: 37867 - DNA, 2300 bp, Homo sapien
cccttcctaaaaggagccctataacccttttcactgccaaaatatattttttaaaagactagttttccttatttacttgcatttcctgctctcctctttgctcggccacattttatcttggaaggagctggaagctgaaatgtgttcttaagggctagaagctgtcaaggcttttggtgagcaagattgatcgcgcccagacttcctttggagctttgtttggaataaaagcaagaaaactaaaaaacctcacattttccaaaatagcatctctatctgcaaggcaatgctctgggctggtcaatgatataggccacttatgtctaatttccaccccaaaccctctttgacgctggcctcagagatggggtcctgcctttgctccttggttggcctttcttgttttctacgtagatttttctccccctccaacctctctctccctgaccatcagaatgatttattttcctgccattgatgcctgccggcctgggggagtctgatcagttagtctatttcaaaggaagcaaaagcgaatcaccatcctcagggtttgggggggaaagaggtacctccagatctacctctcagcctcctcacctctttctggcttggtggattttttaaaaattattttttggtacctaaaggtgttatcttttgaaccctctagcactgtccaagatgcgctcagtctcaagtctccgaattggaaaaaagataatgaaggagaacgaaaacctttataattcctccttgggtcgcctcctctcccccgcagtgctgtttcccacaacagaacccggaagcaaacatccccggtgcccaaggatcaggaaggtgtgggaggcagttcaggctgccagggagcactcgctgtatctaaaccaaccagcccccaaccagagcgacaaggacaagaagaagggtagaaaaaaaagagagagggagggaaagagaggagcaagcatcttctctttccctgctggtaacttccaacagacttcctggaaatcggaaatactcaccgcacccgagccctacgggtatgaaacccagaatgccaggagccgcacgcgcctgctcggggcggcatttctttggctggccgccgccctggctacggggatttggacacatggacctggggttgttgtctcgcttggcacatgcatctttctccagccactcctgagaagttgatggcgcaggaaggtcgggaagcttcgagagccgcctcccgttttccgcttcccgccggagccagatgcaaagctgccgtggaatagcctgctaacaatgggcccggggcgcagactctgggctggacactgggaggggggcgagaggctgaggggagaaggggaggcggacagaagagagagggagggagaaagggggagaagaggaaaaagagggaaagggacagacaggaaggaaaacagaccgagagagatcagttttgagatccaggaactgcttttaggaaaagtgaaggaggaaaagggaaagaaaaggaagaccccttcccaaccaaaatctttcctttcttctctcttttctgtcttctctttctccatctctcaaactctctcttcttccctctctctttattctccctctctcatctcctctcttcctctgctcctttctcctgctttaacagaacttatgtggctgggacgcagggccctcgggtgtcaaaactttgaagattaatggattactttgttaatgactgcaggcgtcagactgaggtgcttaaatgatttgtgaggtgcgaggcgtcttcccgacagtcccaaacaatgcgcggagtgtgcgggggaggcagagggcagccaccggcgggaccgacagcagggcttacactcgcgcacattcacacacacacacacacactcccaggcacacacactagatagatccttgcagatcaggaggcacgcaggcaccctcgcccccacgtactccgggacatccccacccacaccaacatatatgtatttttgctctgaaaaaagtgtaaataaagcctcgctggcccccaatgaggcgttccttcccgacttttttggatcaatcaaacagacagtggcttcttttgattaaagcccaaattgtcattgggcagaagcaatcatgtgacagccaattcggtccaatttcaaccttgtctccatgaattcaatagtttaatagtagcgcggtccccatacggctgtaatcagtgaattagaaaaaaaacaccctagcagcgatattctatgatagattttttttcctctgcgctcgccttt

SEQ ID NO: 37868 - DNA, 2300 bp, Homo sapien
tctctctggaagatgtgcccaaattcaacctccgtccttcagacatcgctccctcttcccattccctcctctttcttagccttccctcaccccaaatctgagcgggttcgtcggataggagccccgagtcccctgcccacctctccttccctctgcaacccagaaaagttaaggctgggctaggggagaggcaagaggtgggggcggggatgggaaagcggcctgaactcgaagtgtaagggtatcagtcactgccgggaaggaagctccggcttgtgaactcttcttgaaccgagatttaagtctgcagccataaatcaccgagacgtaaactccgccattcagcgccgggagcggccggttgcggccctgcttaccttaacttctgacgagcgcaggctcgggctcaggctccgacacgggctctggcccccggcctggcttggcggcccggccgggtcccctcggcgcgggatgggcacggaccctcagcatcagccgagatggcaggcgggctggagaccccgaggcccggtcaccgccgcgcagagcgtggccgcctcgctgctccagcacggctcgcccagggccgactggggcggcttggacccccctcccacccaccccacccacccacccctcccccacacccccgccccctgcccttcccgagggcagcagccgcggcccggagataagcgctagtgcggcgccgggctctgcctgggctagtggcaccgacttgggtatgtttcttatgaatattacacgcggagcagcgtctggtccgggggtgcggtggggggtgttggggcgggcgggaggggagaccaaggcggctggggaagcgcgggctggtgtgggggatggggctgaggcgaggggagggaccggagggagaaggggagctcggcggtggcgggaggagggcagcctccccccaccccccaacgccctccctctcctgctcccaggcgtcacgaaagtccaggaaaattatgctaatgaggacaaacggctctcacaaaggggctctcttgctgggctctatttcttaggaattcgtttgagaaacttcgtattcctctgccctggacacttccaattgtggggtgaggggaaagagaaccaagaaaagtgagtttcccagactttgcccagtttacttcacctgcaactcccaaacagatctttgggtgggggtgtggggagctgggataaggcttttctctagagaccctcaagagccaactgggctctctttggttaaattttcaggcagaaactgctgacatcctagcagccaggagaaaaatgtcctgggagagacaggtacttgttccagcagtgaaatgggatgctctgggctcaggtacaaacaagggtgtttagaaacgcggatctccagggctcatgtgcccatttcagagtgcagacacgcagctcacccacagggaagacagagaaagctctgaccccaagagaaaccgacatcatacacacacacacacacacacacacgcagggcagaggaatatgtggtttctcaaacggattcctaaaacatacatatatatataatatatattatatatataatatatattatatatataatatatattatatatatgtatatacatattttcctcattagtgggatggagtaacgctgagctgggcaaaagaaaggtccgaatttgcctggtaatattgccacaacttgaaagtggatgattttcctcctaaagcctcctttgctcccagcttcagaagcaaactctgcaagggtacgagtgtggcaaaaagagaaatggagatttctctcttttgctgcaatcccaaggcgtcaacggcgggtccttctcaaaggaaggtgttaaaaatataagtagtatgtttaaactgtcaaggagccaaagtgtcaccttagagcaaaaacaaagccaggggaaaagggagaaatcaaaaagcactccgggccagggtggcctcatgcataccaatggtttttgtcatttatggctgggcaagatttatgactcggcgccccaaagctgtaaacagagcacaaaacagcaaacacttgctccttatggcatattgcagagcaacttgaaagggggagctggccgcgtaggaggtgagagccagccgcaaaaatccgttcggcggcattttctcttcaaacccgcccggtcggatgtggcatttgaagaaagaaggcgtgggtcaataatcaacccgcactttctcctccaaactgctgacgcgactctcaccgccttctcagctaagcc

SEQ ID NO: 37869 - DNA, 2300 bp, Homo sapien
gggtgaactgctgtgggatttgtctagaaagggcgcagcggcggcggctggtaatttctggaggtggaaatcaacaatcggcattttcgcttaaaaaacaaaacaccaatagcaaaccaacaaataaaaaccttccgccagcataaattattattttaaaataatctcgcctacgcttgctccaaagccagtcctttggatttaagcagagcggcttgaggctggggcaccgaccatctgcatgccaggacgctggaccttcatcttgaggtcggagccccacttctgcccgctgaggcccgcggcccaggagccacgtatcggggcggatagaggccctggccggaacgaagctcccgccccagatctccctgggctcccacggctcctcaggtctggtccccgcgttttgcccggcagggtcttggcgccagtggaaaggtatgctttcagggcgccccagcccttgctcgggagccctcggtccccttggcccagagaatcccttcccctggcaggttcttacggagagctggccttcccggcagctggcttagctgagaaggcggtgagagtcgcgtcagcagtttggaggagaaagtgcgggttgattattgacccacgccttctttcttcaaatgccacatccgaccgggcgggtttgaagagaaaatgccgccgaacggatttttgcggctggctctcacctcctacgcggccagctccccctttcaagttgctctgcaatatgccataaggagcaagtgtttgctgttttgtgctctgtttacagctttggggcgccgagtcataaatcttgcccagccataaatgacaaaaaccattggtatgcatgaggccaccctggcccggagtgctttttgatttctcccttttcccctggctttgtttttgctctaaggtgacactttggctccttgacagtttaaacatactacttatatttttaacaccttcctttgagaaggacccgccgttgacgccttgggattgcagcaaaagagagaaatctccatttctctttttgccacactcgtacccttgcagagtttgcttctgaagctgggagcaaaggaggctttaggaggaaaatcatccactttcaagttgtggcaatattaccaggcaaattcggacctttcttttgcccagctcagcgttactccatcccactaatgaggaaaatatgtatatacatatatataatatatattatatatataatatatattatatatataatatatattatatatatatgtatgttttaggaatccgtttgagaaaccacatattcctctgccctgcgtgtgtgtgtgtgtgtgtgtgtgtatgatgtcggtttctcttggggtcagagctttctctgtcttccctgtgggtgagctgcgtgtctgcactctgaaatgggcacatgagccctggagatccgcgtttctaaacacccttgtttgtacctgagcccagagcatcccatttcactgctggaacaagtacctgtctctcccaggacatttttctcctggctgctaggatgtcagcagtttctgcctgaaaatttaaccaaagagagcccagttggctcttgagggtctctagagaaaagccttatcccagctccccacacccccacccaaagatctgtttgggagttgcaggtgaagtaaactgggcaaagtctgggaaactcacttttcttggttctctttcccctcaccccacaattggaagtgtccagggcagaggaatacgaagtttctcaaacgaattcctaagaaatagagcccagcaagagagcccctttgtgagagccgtttgtcctcattagcataattttcctggactttcgtgacgcctgggagcaggagagggagggcgttggggggtggggggaggctgccctcctcccgccaccgccgagctccccttctccctccggtccctcccctcgcctcagccccatcccccacaccagcccgcgcttccccagccgccttggtctcccctcccgcccgccccaacaccccccaccgcacccccggaccagacgctgctccgcgtgtaatattcataagaaacatacccaagtcggtgccactagcccaggcagagcccggcgccgcactagcgcttatctccgggccgcggctgctgccctcgggaagggcagggggcgggggtgtgggggaggggtgggtgggtggggtgggtgggaggggggtccaagccgccccagtcggccctgggcgagccgtgctggagcagcgaggcggccacgc

SEQ ID NO: 37870 - DNA, 2300 bp, Homo sapien
agttttgagattttgtattctatttcctaggcctccagtcttcccttaaatttgctcccaaatagatatcaggttgttaattaattgcaacatgatattcagtcgtgctataaggctgatatggtgttctggatacaattattttttccaatagaaggtaaacagagcaatagtcaagctgtgttactttctcagctactgtatgtctgtttatatcaaatatagatggaacatttcaggaatttgtaactctgtgtatatgatttccatctcagcaaacaacagaacaattgcatgtataaatagttgcaggaatttggggccttgtgtataacacaatatacacatccacacgtgtccagagaacttggcccatttctctactgcacttgcacccacaggaaatatctcatgttaaataagaatctatcatacacacacacacacacacacacacacacacacacacacacacgcacacagtgggctaagagagccttacctgatgctgagtagaaaatccactagatttaagtaatgggacaaaaatgttaagtgtacttttgacagagaaatcagattgcagtgtttgagtacagatatatctaatctgccaacagccttgcaaatattggctaacggtgtgtacccttggttgcctgctttttccaagccagctttccccctattttggctctggtgaccaggaccacagtatcagtcccagcgcaggccaagttggaggccggtgaagtgagtgaagagggactggcagctgggtttttaaaaggcccgtagctttgctccaggaaactggattgcagagtggcaaaggaggactgtcagctgctggttccccagataggctgcccaggccaagatctctcatagagaagctgttttttaacctcaaaagttaaatgtcttttgacttttcagatttttcccttctcatcccaccaaatcacccatcccaccccaagtcattaatgttaattgttaaacagcagttggagcattaactggatgttagcagccgtttggaggccccaggctggagctgagatgcctctgagctttgctggcgttaaggcatttctctgaagcagtaccaatgacttatttcattgatttatggcttttttttttttttttttttgacagagtcgcgctctgtcccaggctggagtgcagtggtacgatctcagctcactgcaacctctgccttctggtttcaagtgattttcccacctcagcctcccgactagctgggattacaggcatgcaccaccatgcctggctaatttttgtatttttagtacagacggggttgcaccatgttgttcaggctggtctcgaactgctgacctcatgatccacccacctcggcctcccaaagtgctgggattacaggcatgagccaccgcacccggacaatttatggctttaagagttttcatttgctcgactgttccaagagctttgaagggggccccttctcatctttgagttgatgcctcttcagaaacttgggggtagggaggaatttgccagcaatacctccaggtccctttctagggtatctggagagctcagtgtgaatgattggtgaggggtatgaggcaggcagcagtaagaatgagaggagtgagttcttgggggtcaggagaacgctttttggaaaccagcttctactcctgtcctctatcccccaaacctgagagaggcaggttttcacttggagttcttactttccagcttgtaacttagataggagctggaaaagttcacatggaggttctcttccagctacaccacagattgaaccttactgaaatattgtcaccagcttaggccaggacttgcttccaggggattaggtctcttcttttattgcctttctgatttggacaacccatgaacaagttctcttatgaaaggccttacattttcatcagaccccttctgttcctctgcaggggaggagtgaaggggaggaatcatgcacagcctcctgcagctgctataagtgagtcctcacactcaggcatagccagctgaagacccattctccaggaaaaaaagaatatggcctgaggatctcactagcctcagagcactctcagaagttcagaaactaagaccagaaaagagaagatttttagacagctcatgaaacggtacaatgttgaaattagtgggcaatgtcatcaggcagaaggcaggagtaggggtggaaccaagggtgggagcagcttatttgtttcagttaggttcttcctgagcacagttggttctct

SEQ ID NO: 37871 - DNA, 2300 bp, Homo sapien
aatcccctggaagcaagtcctggcctaagctggtgacaatatttcagtaaggttcaatctgtggtgtagctggaagagaacctccatgtgaacttttccagctcctatctaagttacaagctggaaagtaagaactccaagtgaaaacctgcctctctcaggtttgggggatagaggacaggagtagaagctggtttccaaaaagcgttctcctgacccccaagaactcactcctctcattcttactgctgcctgcctcatacccctcaccaatcattcacactgagctctccagataccctagaaagggacctggaggtattgctggcaaattcctccctacccccaagtttctgaagaggcatcaactcaaagatgagaaggggcccccttcaaagctcttggaacagtcgagcaaatgaaaactcttaaagccataaattgtccgggtgcggtggctcatgcctgtaatcccagcactttgggaggccgaggtgggtggatcatgaggtcagcagttcgagaccagcctgaacaacatggtgcaaccccgtctgtactaaaaatacaaaaattagccaggcatggtggtgcatgcctgtaatcccagctagtcgggaggctgaggtgggaaaatcacttgaaaccagaaggcagaggttgcagtgagctgagatcgtaccactgcactccagcctgggacagagcgcgactctgtcaaaaaaaaaaaaaaaaaaaagccataaatcaatgaaataagtcattggtactgcttcagagaaatgccttaacgccagcaaagctcagaggcatctcagctccagcctggggcctccaaacggctgctaacatccagttaatgctccaactgctgtttaacaattaacattaatgacttggggtgggatgggtgatttggtgggatgagaagggaaaaatctgaaaagtcaaaagacatttaacttttgaggttaaaaaacagcttctctatgagagatcttggcctgggcagcctatctggggaaccagcagctgacagtcctcctttgccactctgcaatccagtttcctggagcaaagctacgggccttttaaaaacccagctgccagtccctcttcactcacttcaccggcctccaacttggcctgcgctgggactgatactgtggtcctggtcaccagagccaaaatagggggaaagctggcttggaaaaagcaggcaaccaagggtacacaccgttagccaatatttgcaaggctgttggcagattagatatatctgtactcaaacactgcaatctgatttctctgtcaaaagtacacttaacatttttgtcccattacttaaatctagtggattttctactcagcatcaggtaaggctctcttagcccactgtgtgcgtgtgtgtgtgtgtgtgtgtgtgtgtgtgtgtgtgtgtgtgtatgatagattcttatttaacatgagatatttcctgtgggtgcaagtgcagtagagaaatgggccaagttctctggacacgtgtggatgtgtatattgtgttatacacaaggccccaaattcctgcaactatttatacatgcaattgttctgttgtttgctgagatggaaatcatatacacagagttacaaattcctgaaatgttccatctatatttgatataaacagacatacagtagctgagaaagtaacacagcttgactattgctctgtttaccttctattggaaaaaataattgtatccagaacaccatatcagccttatagcacgactgaatatcatgttgcaattaattaacaacctgatatctatttgggagcaaatttaagggaagactggaggcctaggaaatagaatacaaaatctcaaaactttttaaaaagaagtaattcctgaaagaacaaagcaaactcattccttcataccatgcttctgaaagctattccagcagcccctcccccaaacaggcatgtaatttatggatcttttacaaggtaataaaccacagtaattacctccctgcatcccaaactaagaggacaaattaagtcagaacttgaaaataatttaaaagagttttcccttgtttcaaataggaaaaggaaacgccaagacatagaaaaccacgcttttcccgtaggaagaaccgatgatgagccctgatgaaagaaggaagaagacccgctgtctgcgaaggcctaaaggttagaaatacagcaatttttctcatgccgaaggaaaggcaaaatggtctaagaaactgcaagagtgtgatacaagttttcctcaacagcg

SEQ ID NO: 37872 - DNA, 2300 bp, Homo sapien
caaaacaaacccaaattggtgaaaagaataatcaaaaagaagacattatccggttaagagtctgtgctggttgccacccaagagagaacagttgtccaggatgctggctggtggaacaacctgctggcccgaaacaaggctgccaggtgtggatacctgagaaggactacttggtatcaaatacttttgagatggctacagtcagctagctggacagcccatgctgagtggggacatacacttgcatctttgttgaaagcagaagaagacagaccctttccccaccttccttacctcctcttcccccattaaggcagctcatccaagcttgtatttaactgaataaatgagtagacattgtggacctcacaagattatttaattcttaagatgtgtagaccttgatggtaggtgtgacatgttagtttttcttacttgcatttatttaagacactgttacagagatactgttgtccccttctggggcacggtctttggggagaggggagtgcatttagacttatgtggaactgtacaaattgtgatgtggctacatagaaagccatgtgctaagaataaactccatttaaaaaacattaaaaatctaagattcatgtgttttctaagcttttcattaagaaaacaaaagtcctctggattgagatacttgaccttgcatgtaaaaaccttgtagatagcttgagctggattcacttggattctgacggctcacataatttgtgtgtgagagtgtgtgtatgtatgttcaacttgagctgaactcttgtcaagcttggcctactgtggaaaagttccaaagagtaggaaggctcttgagctctgagagggctcctcttcttcccaaacttggccaggctttcaggcttcaagtctctgtaaggcatagaaacgtgtccttccctgcaatgaaagttgaaaccatgcagtgctgtgggcccaggagtttctgcagctgttctacacactgaactctgagcacacttggaaagaagtggtctctttggtatttggtatttgttgcaccttcacacttaatctgcctgtttcccaggagataaaaaatagtttgtgcaaagggttgagattagtttttgtttcctggctgttcttaaggtcctcttcactaactacagactgggaatttttgtttgtttgcttgtttgtttctcttttttgaagaaagagctttcaaataaactgaattttacaagtacactctccaatgtctcttctgaggaaaaagcataatatacccctaaagttcaccccatgcaaagtagacctgggagagtttactgctggaaaatagccaaactgggtcactttcctcaaatgctttgtgaattttctgctcgattccagagatctagatccaaaaggctgaaaatcaaaacccacttctcgatctctataaccctagtatttgtttactgatttagatttgatgcttactgcagggagttccctacaataagaccacaaaaacctgtgcacactagccccagaatattagaactgtcacctggccttgaaaaagtgcaacttttaagtaatgtagtaattttagcatagatgggagtaagtgctcacctgcctctgcaatatcagagaatttttaaacacatttctctcattagtggcaaaaccctttagccagtgtcagagctggtacccctttcacccctgctgccctgtgtgtgatacaaacaagggtgatccgttctatacctacaaatcagatttgagaggaaagtgatagataccagtctctgaagagccaagaaaattcgggagcaatcaaatacacacttaccttcccaaatcaggataaacctggcataaagtgcattttataaggtgtgaacgggtgccagggatttctggaggcaatgcaactgctgctgaaacttattaaccctccccctactacacacacttgtaaaacaaaattaaatcacgctgaaaatagcaattttcccaggaatcattaatcacctcaaacaataaatacttctttgtaattcaacagcaattctgaaaggcattctctgggaaaagtctgtggaggagagagggatcttcttgcaaataatgtggtctcaggcaaggacacagcatcttggctgtctgctaaaaaaaaaaaatgcctagactctcagtggaaattgagtgtcaagctgcaaaatctcaaatggcagactatcatcatttaaggtaaattcttatatttctcctttgtgggaaaagaggggtatgggaatattcattagcttcatgct

SEQ ID NO: 37873 - DNA, 2300 bp, Homo sapien
ctcaaggctgatgacatgagaaggagggaagatttccttgtcatgctttttgtccccctgaaacttatagggttcagatttgtaatacgtatgtctatatattatttatattacattttatataacctatgtgtatattattttttcttgctagggagagatattggttcaggtagatgtatcacattctaaatttttcctccagtctagagaggatggctaaagattacactcagtgttgatttctgtctgtggctcaaatttctttaaaaacaaattttcagggtgcctcatgtgaatggacagcactcttcacactcatatacacctaacgtggaaaatctctttgtacctcttcagggtgattccagttagaaagctaatatgatcccctttttaacctcttttcctaaattagtttaaagattagtcccatataataggctttatgtggctaagcattaagtgactatccatcaaatggatatattccagcatttagtaactcatatgagtaaccagtatgaatgaagatagaattgacattccttttcaagtgtctccaggcttaggaaataattttccttgtctgcgttccagactcagttgtgagaaggctgtttatactgctctttgaaaaatcaactaaggtgcaccagctgaaaaatccttgcttttgcatgccaatatgaaaatatttttagaatggtgactatgctagtttacactgctttaatttaggctgaaaagtagaggatctagatatgtctactactcagaaaagaaagggagaaagcacacagcacaaataaggcatcagtatttacttcaaagatcaacattaggtggaattaataagtaatttatttgttaataatggcgtaattagtgtacccatcaaatttcaattaccaaatagcaggcaacagtctcctctccctcctttccggagcttctgatatcgttaatacgctaattttcagcaattcagaaattatagactgtcctgcaaatataactctagcctcagatactgcctgagaaagcaggatctaaaagagaaaacatgaaattcttagctggaaaagacccatcagcgatcagacccggcaaggtgtttattctacccttagcttgtttttgtttggggatagttctgaaataggaagttattgttttcaaagctcggttctgtggaggtgttgcttctatccattcccatccttgggccaccttctctctcacaatcgcacctagtaaatgcgggcatatttagctctcacatcgacaacccccgtcaaattagatgctattacgaaggttccaatttttcttaggaaaacacgaaacagattgtctctgaaagaaggaaaaaatgaaaagtgtccatccagttataatggaatggcctcgatttacatccttgggtcgatttctcttagctgcccgcccaccctttgcagcttctgccaagcttctcaaagcaagggctctcaggctgacacgcaaggagcagggtgtggggaagggggatctgcggttgagaaaatgtgtctggtggcctctcagtggcgtacataaaaaccaggatgcccctcggtcccaacgcccttcctttcgcctgttagcctagaacccctgaaggacacgaagcctgactgggttgcgcccgaggtcagcgctgagtcgcggccgccagacagcccgaggcctaggccagcagtagggcaggcagagggctcccgagaggacctacagcctgacagggcctgaattcccagcgggaaccaaagctggggggctggggtccaaagctcctgctccctcccccagcccaggggccggacagcagcatccatcacgcacccgcgcgtttcctgatccgggtccgcgcgcgcggtgcgcccattggtgggggcgctgcacgtggggcacggggcggggcgcgcgctgggctggggaggagcggctcgaactttggtggcggcgtctgcgggagggggaggagtgggcacttgacagcggggggaggggaagggcgcagaggaaagggggatgggaagcgaggcaggagggggaggggcctcggcaagcccagaaaaaacgacaacgcgagaaaaattagtatttttgcacttcacaaattaatgaccatgagctcgtttttgataaactccaactacatcgagcccaagttccctcccttcgaggagtacgcgcagcacagcggctcgggcggcgcagacggcggcccgggcgggggccccggctaccagcagcccccagcgcccccgacccag

SEQ ID NO: 37874 - DNA, 2300 bp, Homo sapien
cagatcaagatctggttccagaaccgccgcatgaagtggaaaaaggaaaacaagctcatcaattccacgcagcccagcggggaggactcagaggcaaaggcgggcgagtagatgcctgggcagggaccaggccagcgctgcaacctccttcggctttgcccccttgccctcgcctgttccccaacttttctccccgcctgctcccatctgggggcttccgcagcttcaggggagcccggagctttgcaagcgtctgtgcatttatttcttacaaaacaaaacaaaacaaaacaaaacaaaacaaaacaaaacaaaacaaaacctcacacacagccaataccagcggtggagcggggcgcactgcacacacccagtcccgctccacaaggatgcccaaaccggctccggagttctggggtgcgccctgaatgcgtctggggctcctgtgctagtgtctctgagctccccgacctcgggacgcggggctgctggggaggaaagagccctgggccgagccccgtttcgtgtctgggcgtctctgcctaagtccctcgccagtaagtcccgaagggcatcatcaaatcatctctggccagtggaaagagggggtctaagagctggagcccggccttgtcgcggcctcccaagccgcctcccagaacaggaaggaagctcgaggaacaaagggggccccaacagagcccagtctctcggtcccgcgtgtgcaaccgtcagtggaagagaagcagcctcagccgaggcgagttaacctgggcgcgggtggaacattacagcccggggtaggctcccggctccggattcccgctcccagcctccgatagcgcccgcgtcgccgccacagcagcgttcaggacccaacgaggggcccagggccatgggagccgccagagtcctggcttccagacgtgccaggggcgcctgcaacgccgggcctccagcggggagactccacttgcctctcagctatatttgtgatttacttgagtctttcggagccgtggaaaataactacagagatactaggcactgccaaggaatgcttccattatcgccctcattttactcctggaggtctaagcaagaccccagtaacccgccccacggatccccagaccccaggcagcctctgtggctgcagggagcctgggcccactcgctgggttcaaggagaaccctccgacttggggcccggctggctcgaggaaccggaccctgtgatgaagattttccaggctggatacgtaagcaaatcaaatcgcaaactaatgacacgaaaaccatattcacacgaaagaaaaatcgactacggttataaaagtgtatggaatttgacctcgccttggagaaacactacacaaaagctatctttaatagacgcctgtcatttaagagcggcagggacactgtccctcatgcgctcgcaaaaacagagccgtaattgtagctgctgctgctgcgggcaggatttatttctccaattggctaaatggctttcccccttccccgaaggtgatatctgtattttcaaaattcagagctgctggcaggacggtcagtaccgaccccaacctcgacacaaaaataagaggggctgcaaaacgggggaaataaagttgttgtaaataaaatgcaagtcaccacctccccccaatcctctgcatcctcgccgggcgcgcgatcggcagctgacggcctaacaattggtacatcctaatggaactgcgagggaaatgcaataattttgccataatgggctgtaacctcaattcgaccccggcccttgcagcccccggtcggaagctgggcgatgagccctgcctccagcgggtggcgctcgagtccggctgaacggcggcaactggcggcgggcacgcgcccggggcgcgcgcgccacccccctcgcctccacccaactcccctattagtgcacgagtttacctctagaggtcatcaggcaggatttacgactggacaacaaaagcacgtgattcgaagtcgtaccccatatttgggtgcctacgtaggagggaaccaagtacatgtcccagtcatttccataattcatcataaattgtgcaagggtgctatagacgcacaaacgaccgcgagccacaaatcaagcacacatatcaaaaaacaaatgagctcttattttgtaaactcattttgcggtcgctatccaaatggcccggactaccagttgcataattatggagatcatagttccgtgagcgagcaattcagggactcggcgagcatgcactccggcaggtacggct

SEQ ID NO: 37875 - DNA, 2300 bp, Homo sapien
ctgggctctgttggggccccctttgttcctcgagcttccttcctgttctgggaggcggcttgggaggccgcgacaaggccgggctccagctcttagaccccctctttccactggccagagatgatttgatgatgcccttcgggacttactggcgagggacttaggcagagacgcccagacacgaaacggggctcggcccagggctctttcctccccagcagccccgcgtcccgaggtcggggagctcagagacactagcacaggagccccagacgcattcagggcgcaccccagaactccggagccggtttgggcatccttgtggagcgggactgggtgtgtgcagtgcgccccgctccaccgctggtattggctgtgtgtgaggttttgttttgttttgttttgttttgttttgttttgttttgttttgttttgtaagaaataaatgcacagacgcttgcaaagctccgggctcccctgaagctgcggaagcccccagatgggagcaggcggggagaaaagttggggaacaggcgagggcaagggggcaaagccgaaggaggttgcagcgctggcctggtccctgcccaggcatctactcgcccgcctttgcctctgagtcctccccgctgggctgcgtggaattgatgagcttgttttcctttttccacttcatgcggcggttctggaaccagatcttgatctggcgctcggtgaggcagagcgcgttggcgatctcgatgcggcggcgccgtgtcaggtagcggttgaagtggaactccttctccagctccagtgtctggtagcgcgtgtaggtctggcggcctcggcgcccatggctcccatacacagcacctacgagcagaaacggccgggcgccggtaagccagggcctggagggttgacccagtcagcccagtgcctcccacaagaggcacccagactagaaaccaccccgcctccactccagcctctcccactatgtctggggcccaaagcatactgaatgggagattatttcataccaagcgagatgttttccacctataacgacttggggtggacattatcgtttttgaaaaatctgcctcataggaaaaccattacaagcaaaataacagaatgagcattcttaatttgggatgcccaggtcgtgtttttgtggggatgcagggtgtgtgtgtgtgtttgtgtgtgtgtgtgtgtgtgtgtctggggtgggtggtgtggaaccatgtaagtagtgtacacactctgaattcatagtggtctctctgaggatgctactgtgaccagccatgtcggaactcaacacattttttgaagagttaaaaatggtcagccctcttgaatctttacacattctcccaaattatatgacccttctgagaaatgcagaactcccccaaggataaagtggatgttaatggaaaacattataattttaacaatccgcattaggctctgtcctagggaattcctaggagtctttgggattccctgtggagtccttggaaaccagaggctaagagatggagctataggtagtctaggatttctggcaatgtaggattgtgttgggctgtctgatctggtgccaaagttccccaagggtggtggggggtccctccaagacaggtgtatgaagctcaggcatgggctcagaagagggcagaagttggctaagagtgggcagttgagtagaagccgggggagatgagggaggagagagaaaaaaatcctgagtctggggctgtggccctccaaggctttggggagacactggaagaggccaaatggccacctctctgtacgggtttctgaagggcagaaaggagagggggttgggaagcaaagggtatttatcagtgacgcagtgcaaaaggccctctggcttgggaagctgagcagggtactcagggtgcatggacaggctgtccctccccaccagcctctctctctcttcaggctgtccctgtcacaggtctcatatacgtgccagtgcccccatcctcccctaaggtgtcagcttacatggacactggggccttgcccttcctctgccatggcctgatagccccattgggaactgattttttcttctcttttaagaagccaaagaaactttgctggttctttcatcctttctttctctctattcctctttctactctgtttcctccttctttctttcttttcctgcctcctttcccctctccctccactgtcttgggatatgtcttacccgcgcaggagttcatccgctgcatccaagggtaaaccgggctcgtgtacttccg

SEQ ID NO: 37876 - DNA, 2300 bp, Homo sapien
taataacttgcttaaaatcactgttgtctgataattttgtttaagaaaaaaataacacaaacatgtttttcttcaaacagctatttttaaaagtcccttttaattttttgactcgagttttcattttcacctattgaattctttccctgaagtaatgtgtgggaaatgcccaattctatcctctcattcgaggccctgctttatatgcaaagtaaaccctttccaggacggatcgactggggaacaggcatccggcttccaggggtagcccccgttgccgggctagcagccgccttccaggagtgcctcttgggctcttcggaggtcgaccttaggccagtcctttcccaattttttccctttgtgggaggagagttcaggaaaaaaattgaaaagcaaggaagagactaagtcattactagattcctactggaacactgccaattgccacctccccactaagtcctgaaccgggtgagcctgcattggccagggttttacagatcttgtaaacagtctccagaaatccatccaaatcacgtaaatagtctttcttcaacctccacagaattgaggattttaaagctaattcaaggggttttacaagcccaacaaacacagttgtaaaaatgccattgggctgctatcacattttacaaaacgagattgatccatgtgttgtaaaagtcaactatctcgaaggcacacctctcaggcaagagtgagcagctcaggacaggcttttaatgtcctgtctggggaccgccaggcctgggacagcagtgaaagcaattcaggatttctggagccggtgagactattcccggttccggagcgactgaggggcggcagccctccctgcggtcccaggaagggcagtaaagagggcggccccaggacagtgccggttgtcgggcgccccggaaaccgagcccatcaattatcccgcggccttgggccctgcagagctgccctctgtgcccagcttggccagggcctctgcgtcttctgtgcctctggaatgtggacagagagattccacatctggatttttatctgcctcagctctgagcggttctcgcagtggatgctgagtccccaggcgctaggcaggggagcaggtccctcggctgtcttaggagcccagtctcacggccactgctctgtcggtcctttcttgttgaaaccagtggtttctggcctttcaattccctgggttcaaaggtgggatggggacgcccagctggaaggagtgctttgacaccaggcaggcgcgggccattgagccccttgggactcaaacaggatgtgtatgtgggaggagggaatgggtgggaagaacctacgtttggctgagtcctggtcagctcgaggtgatccttcagctctgggctgcaaggcccaggcccctggtgctagcggagaaggagagaatgagggagttcaccgattcctaaggcgcacgagtgaagagcatagagtgaaggcctggtttctcatggcccttgctccagctcaagaactcgcacccacgaataggggagcgctaggggaggggcaactctgggccgtgcctggagtgcaggccggcagggagcaaagccacctttgtcactgcccctcctggagcaggaccttcaggtttcctgtttggaggaggaggggcggggaacccgcaaaattcaataaagcaaaaaggggaggaggaaggaggggacctggcggggcctttgaggcggcccaagcattagtgtccctactctggcctgatctgctcgccactgaaagggccgtgcccgccgctggcgttcgggaagagagccgggccggctagctgtgcgcgcccattaatctgccgggcgggcggcgggcgggcgggctgggggctgtttgtaactttgctgcctcggtcgccgcggtccccggggagcgggctccggcgttcgctcccattggccgccgccgcgtcagctggtgcgatttgctgctgtcgcttttggcgttcggccatccagaaacaaaccagttcgatgactactaatagttatagccagatgtactaatacacaacaaatcacagtcctgcagaggggcgcgcaaatgagttcctattttgtgaatcccactttccccgggagccttcccagcggccaggactccttcttgggccagctgcccctctaccaggctggctatgacgcgctgaggcccttcccggcctcgtacggggcgtcgagtctcccggacaagacgtacacctcaccttgtttctaccaacagtccaactcggtcctggcctg

SEQ ID NO: 37877 - DNA, 2300 bp, Homo sapien
agttacaaacagcccccagcccgcccgcccgccgcccgcccggcagattaatgggcgcgcacagctagccggcccggctctcttcccgaacgccagcggcgggcacggccctttcagtggcgagcagatcaggccagagtagggacactaatgcttgggccgcctcaaaggccccgccaggtcccctccttcctcctcccctttttgctttattgaattttgcgggttccccgcccctcctcctccaaacaggaaacctgaaggtcctgctccaggaggggcagtgacaaaggtggctttgctccctgccggcctgcactccaggcacggcccagagttgcccctcccctagcgctcccctattcgtgggtgcgagttcttgagctggagcaagggccatgagaaaccaggccttcactctatgctcttcactcgtgcgccttaggaatcggtgaactccctcattctctccttctccgctagcaccaggggcctgggccttgcagcccagagctgaaggatcacctcgagctgaccaggactcagccaaacgtaggttcttcccacccattccctcctcccacatacacatcctgtttgagtcccaaggggctcaatggcccgcgcctgcctggtgtcaaagcactccttccagctgggcgtccccatcccacctttgaacccagggaattgaaaggccagaaaccactggtttcaacaagaaaggaccgacagagcagtggccgtgagactgggctcctaagacagccgagggacctgctcccctgcctagcgcctggggactcagcatccactgcgagaaccgctcagagctgaggcagataaaaatccagatgtggaatctctctgtccacattccagaggcacagaagacgcagaggccctggccaagctgggcacagagggcagctctgcagggcccaaggccgcgggataattgatgggctcggtttccggggcgcccgacaaccggcactgtcctggggccgccctctttactgcccttcctgggaccgcagggagggctgccgcccctcagtcgctccggaaccgggaatagtctcaccggctccagaaatcctgaattgctttcactgctgtcccaggcctggcggtccccagacaggacattaaaagcctgtcctgagctgctcactcttgcctgagaggtgtgccttcgagatagttgacttttacaacacatggatcaatctcgttttgtaaaatgtgatagcagcccaatggcatttttacaactgtgtttgttgggcttgtaaaaccccttgaattagctttaaaatcctcaattctgtggaggttgaagaaagactatttacgtgatttggatggatttctggagactgtttacaagatctgtaaaaccctggccaatgcaggctcacccggttcaggacttagtggggaggtggcaattggcagtgttccagtaggaatctagtaatgacttagtctcttccttgcttttcaatttttttcctgaactctcctcccacaaagggaaaaaattgggaaaggactggcctaaggtcgacctccgaagagcccaagaggcactcctggaaggcggctgctagcccggcaacgggggctacccctggaagccggatgcctgttccccagtcgatccgtcctggaaagggtttactttgcatataaagcagggcctcgaatgagaggatagaattgggcatttcccacacattacttcagggaaagaattcaataggtgaaaatgaaaactcgagtcaaaaaattaaaagggacttttaaaaatagctgtttgaagaaaaacatgtttgtgttatttttttcttaaacaaaattatcagacaacagtgattttaagcaagttattatttaaaatgaaaacaaccgtttggagatgacaatcaatgtttacatttatgatttccttttcattccgccatgtcccacatagtggtgggtcagtgtcaatttactattattattatttgtcatgccttgaccaggattctcgatctaattattgttccagctaacaagagaatttgatttctcagctaagaaccagaaaacattatatttctagcttctataggcactaagatggaaaaacatatattacattggaatctttacatgttagccaaggctagtgcatatcatttctccaaccagatattctctctctctctctctctctagagagagagggctattccggcaagaataggcaccccagaccctccaaagggcctctcctgcgatggtgagaa

SEQ ID NO: 37878 - DNA, 2300 bp, Homo sapien
gtcctgccagaacctcctggacgcgcatcgggcaaaaccggagcaggaatgagccggtggcgagggcacccggccctcccttggcgaagtgcgttccttcccgcgatccccgaaatcgctccctgctcgggctgttggactgggcaggttctactttaaacaccagctctgttggccccttcagtcgcttgagtctagacagacggcggcggcgggggccttggtcttttctctttgcgtcttgctgtgtgtcaccccaggaaaaatttattggtctaaaacggtctaattctgcctctttgatctcctagccttcttgtttgcttcatcttcctttaactttcttgggtttttatttccttccagaaggcgatgcgactgggattatttaggtcttttctttttgtcttactccctctattctccatcggagacaaggtatcatctgatccgccataaaggcgtccccggatgttgtccctcactccacacccctacccccaggcttccgtggcccgggaggagacagcccagcgcccacctgccccaccagcccccgccttcctacccaagccccggtggttcactgcgcaggaactggggctccgtggcgtcccgatctgaaccctccctccaccttttgtattcctggggccccctgagagggtgcggtaaacggggacggcctggaccctctgaaagtgatgggaagtgctcagtacacaaggaactaaactctacaatttacaggagaatttccggggcaattccattgtgaggtcgggtttatggtgtgtaatcgagctgagcagtaaaaggtggccgggcttccagcgcagccgggcagtttatgaggcgtttaggggaagggttctccccaccatcctccaccgagcggtgggcggcaggggcttcagctggtgcaacatggtgcaggggtcggaggcctggaaggtaggaattggaggcctggatgggaggaagtgagaccactgtgcgctcagctccatgtgagctggtacttggataggtgaagcctccacagctgggtggcctttagggggtggtttcccctatttgttttcggtgtcttcaaaagaaaaggaagtccacagtgggttgcagtccctagacgccagagccccctctccaaatccgctctaaagcatgtattgttcccaggcaccccggcctaccccagaaaccttccagtattgggagtgcctggaagggtgcaggcccgagatttttccaagctgggggaaacagccctggctccccatgcgccagaggggaaccagaagttgtggaaaggacaaaggaatctttagcaatttatcggactgctggagccagccaggtgcccaggagcgaaggcacagagcctgcagcactacagcgtccgggaggagggaggggaaccccacgttaataaatctgttggcaaatgagtctcattaatagataaatatttcactgcttcctttagggcggataaacagtgtgcctccgattaaggaaaggaagctgggagacgttgactttattcgaaccacatggctccagtttgcggtggcaatctctctgcagctgcaagagatgctgcgccttccccgtctggatccgagtctaagtccggcctgtcgcccactggacctgggtgagagaagacttgggcagagtcgatctgctcatagctgagtcctgcccacaaggccaccgcggggcaggctgttgcgggggacagagacccttccagggtctgggcaggcggacaggagagggatggggaggatcccaagcttggtccagggctcactagcaggagtcggcgggggggcggggtggggggtgctgcgtggggccgggccgcctggcgtccgcagaccccagtgcggaggttggccgccagctgggcgctcccgcggagcctccaggtctttttccgcgggacgcgccaggcccgccgggcgcgggcggattctttggccgcatatttgagcctcttgcccttccattctaggcggctgcgggccctgcggagcgagaccacctgtgaggactgctgagattggcggaggcggtcatgtgggcggtcacgtgctgcggcgagctccgtccaaaagaaaatggggtttggtgtaaatctgggggtgtaatgttatcatatatcactctacctcgtaaaaccgacactgaaagctgccggacaacaaatcacaggtcaaaattatgagttcttcgtattatgtgaacgcgctttttagcaaatatacggcgggggcttctctgttccaaaa

SEQ ID NO: 37879 - DNA, 2300 bp, Homo sapien
aaaaaatactgaaataatcagtgtcttctcaggcataaaacgtggaaaaggcatccagacatgcccagcccatttgcagacacttaaaattgggagccagggtttcctccagggttaattttttaaatgaaaatctcagaggcctggcggactgcggggtatttaggacacggtggactgtggtgggggtgggcatgacctagaggaatttatggggcaaggaaaatattagggggagggagatgaggcggacaggacggggccatttcggagttcattgtgtcggccacttccctcttccaggcgcgggtgcaggaaggggcacccagtcggtatccgcgcggcttggcagcctcgctggtatttgggagtcccagccggaagtgtgtcagggtgtttgagggggggattactggaactgctggtgaggatgaaggcaaaagagagagagagagatggaagcgcccgaggccgccagcctcgccgccagggaagtgggctaatgaaaaacacactgttgcaggcacagtatccacacgtgaatttgattacccctgttctaggagtcgctgctttctgttaggaattgggggcagggggagtttccttccaattaacggagtggcggcgaccttttaatttacccccaacgggtgagaaataaacttccccaacgtggccaggcccaggaatgggactggagtcgatgcccttttacccctccccgttctaatttccagccctggccttgagctgtggctgcctctctttgggccttgtacctctccgccgagtctccgggccccgtaggtaaccaaggcgaggcccggagtagcagctggaaagggaggaaggagccctgaaaggctcacgcggccccgggacaggccacatcggtgcgggcctcccaggttccggagctgcggggtctcttaggcgaggctgccttttcccaaaccgaacttgccttccattcatgccacttgtagttttttccccagctgggattcacggagcgcaaccaggcttgcagcgctcatggttagagcctctgaggctggagcacagggctgggtcgccagccgcctgcgcctgggaatcctgattgccagctgatgagaaaggcgggctgggcgcgcgtgtgcgtggggtcgagggccggggaccgagcgcgccgcacaaccaaccaggccctcaaaaccttcgccctggtggcggctggccgctccctcctggccagctcctccgtggggtcctcgtagcaaaggcgaatttaagggttgcccgggcgcccctcgctccaggcgggtagctgtggggacctacacccgcggtactccctgagcggccggtccctgcctggagtgccctggtagggccggcggcggctccgtttgggacggatcctgcgttgaatttgacttttcgagggcggccgcgggtaaactcgcctctcccggggaccgcagggattatttacagggagctcgccaaccaaacacaacagtctaacctttccaagtcctcgtaaatttttacagctgggagccacggcgaggcaaacgaatctgttggtcgtttccgacttcccgccagcctgtgtggcttctgaaacaataactccttatgaaatatcataaatatagatttaaatacagtagagcgacaatgcgatttggctgcttttttatggcttcaattattgtctaattttatgtgaggggctccgctggccgcactcgcacgcgggacccgcgccttcttgatggcgtgattaattgtgatataaaatagtccgcttaagaagtgtgtgtatggggggggagacgggagagtacagagacaaggctagatttgatcttttaatcgtcgttggccacaattaaaacaaaccccatcgtagagcggcacgatccctttacataaaaacatatggcttttgctataaaaattatgactgcaaaacatcggaccattaatagcgtgcggagtgatttacgcgttattgttctgctggacgggcacgtgacgcgcacggccaatgggggcgcgggcgccggcaacttattaggtgactgtacttcccccccggtgccaccaagttgttacatgaaatctgcagtttcataatttccgtgggtcgggccgggcgggccaggcgctgggcacggtgatggccaccactggggccctgggcaactactacgtggactcgttcctgctgggcgccgacgccgcggatgagctgagcgttggccgctatgcgccggggaccctgggccagcctccccggcaggcgg

SEQ ID NO: 37880 - DNA, 2300 bp, Homo sapien
cagcctggggcaaacctagccggaaggccgaggtcccattgttggcgctgaggtgtctggcctgaggtcaatggtgcaaaggagccgccaccgggcatgtctgcctggagtgctgtgctgtgtttaatcaggggatacaggcccctgggtttcttttttctttcttcctttcttccttggccaagagaagggcttacaggcatggacatgcaggttggcaaacgggcttgactttggctgatttaaaaagtgagaaagaaagtaaaaaaggttaatttttccttcctctgtaagatatcccagctttaaaaagaaaaaaaaagaattaccaagagaaggggacttctcttccagtttctgtaaggtcttacattgcctgactaaaatgtttcatttacctctaaatttccatatccttctggctgtagataaataatgtagttttgtttatgcatttggaattagtggatttttttgtcattaaaattgttaccactggtaacatgtgacaagcacaccacaattctccctatcttgtgaagttgtttttttaaatcgccttgaacaaaaagttttttttttgtttgtttttgctttctgaaattcacagaagcctaggaggactggggtaagcggaataaactagagaagggagacattgtttggatttcctttatactgtgaagttacatgcataaaagggtcaaacctgtagatgcagaaaaagaaaaaaactataaatacaaatctgtataaatgtctattattatgaagaattgccaatcttgttttaagcaaatgcattctatcgttattataaatgttagttctagctctatttacttctaatcttaaatcagaataaattaatattgtattgctgctgtgcgtggaaaaagacgatgtttatgttcttatagaataaaagctgtggaatgaagctttttaattttacctcttttttgacttcttatcttcaccttccactttatcccgttcaccacttttacaacaggaggactaacccgagcccctgcaattactttaggcatctatttaaatattacctagacggtcgtaatttgtctgggccctatagccctggtgccgtaaggtttgtcggcttttgttcagttttatggcttgctagtatatctggattgtggctgtcttggaccagtgatttcagttgagaggggagctacatagacagaggaagccaaacaggatttctttcgggagccccagggaggcttgcagaggccggttattttgcgggtgtctgggtcacagatgaccctcaatctgaatcggggagcaggcctggcccacagcgcatctctagccgctggaggcagcggttaggtggacccgggctggactgcatgggggcctccccctcccccagtacggcctcccccacctggcggcactccttagggccacgcgtttcctgcttgccagagtggggggggcgggggctaaggggagggggcgcaggagcgcgcgccccggcgggcgggcagctaggagggagagggggagagcgagaggcgggaggccggggccagacagggagccgggatctgtaccgtccctggcgctttcgagccttccacggctaccgcctcttggcgccggctcgctgggctgcaagatttgggaaagcggcgcgcacactgcttctcggagctgctctcgtctcgcctgctccccgcctttattcctctctccctgcctttcctccctctcttttcctccctctccctcccaggaataccttactggggcctgtggcttccccttccttgacgcatttgcggccgcctggggcactctgttgcactggcgggcgcaggttgcctaggggctgggctgggccgggccaggcgcgatggcagggttctctccttggcggcggcggcagcggcggaggcggcggcggcggcgggcgaggcagcccttcgcgggcagcaccagaactggtcggtgatttaggtagtttcctgttgttgggatccacctttctctcgacagcacgacactgccttcattacttcagttgaaatcgtctccaggtacctctgcgcgcgggggtcgggccgggcggggcatcacggccctggtcgtgccaggcctgcggtggcaacctcggctttccctgctcaggagcctcgtgtctttctccgcagcgctttgccagccggccggctttccccttccaccacacacctccacctggtcacagcaggtagggttaggttggctgctccttcgcggacgccgggggcgtggtagga

SEQ ID NO: 37881 - DNA, 2300 bp, Homo sapien
tctgaagcttttctgcactcaggttcgtccgtctcatgggcctagagggtagagaatttgccttggccttgggcgcaggagcatgcgaagagcgaaggagagttaatgatctcttggcacagaccctgtcttgatccctctaaagccgctgctgcagcttcaagaccctgtcaggctggagagaactggctttcttattctctctcccctcctgtttctctctcttttctctccctctgtccgtctctccttctatctctctctttttctctccatcctcctcctccgcaccctgatgctcagtccttacggccgggtcaccgtggggcgccgaggttgaagtggctggagcgccgcgctagcggtggagcggccttctgggcccggagctcggagcagccactgcccgcagcgaccgcagctgcttgaatctcagaagccagagctggagctctacctagccagctctctctgcgctttcagggtcctctcaggctcctcttccaccttgggctggattcacactgggaggaaggaggcaaagtgccgcgtatgacccggatgcaagagtctttcccagctgaaggcagcggcctgagcggtctatttcctgggatgccggcgttcagtaatgccagctccgactggggccggaggggcgggcaggcctagagtatcctggagacctgtagcccacgggccaggggcaaggcagcgacctcccgggctccactggatctggccggaaaaggttgcatttcctgagactagcatgaggctcacacttgggggctagcaccccaggccggccatttccagttggctaaaacagagcccctgagcctgctgagcaaagggcctgacctccacatgctcttataacaggaccatgagcccagcccggccttgcagggaaaggatttcctcaccgaggcctcgttaaaatgcacacactgcaggagcaaggactgccctagctgagggtatgggagggaggggaagaggggaggggacagagaggtaggagtgtagtgacactggttcttgttgtagcctccaggagcatatgagtgccaaagctaacaggagagcaggaacataaagcagcggaggtgtacaccgggcacacccctccaagtctctcactttgggccagccaaggaccccaaggccagcattttacttccccgaaatgactgtgggcttagagtcttccctaggtgatgaggggatgcttggatctggctctggccttgggagtgggagtggggccgtctttccatcaaggctggcagccgcttcccacccccagtcccgccagcccaccaaagtccactgacaggagttgtagagaaggcaagccgggtgagcacaacaccagaggagaagatcctaactggatcaacggactaggggagaaaagtgttgggggttaggggctagggaacaaccactgcattttggggaaaaatctgtggatactggaagtagaggcaagtcagcttctagttcactctgggctcctgacactctgaggatcctgacggccatagggccaggttcgccacttttgaggaggcagaattcagacaaggggccagttccagatccagagctgaatgggaagcgcgtgagtccccgacacggccgcttcagtggttagagtacaccggggactagtggcagcttctgcgacagggatggtgagcacccaaggcagactgggcgcgcaccataaacaccccacttgttaactgcgcggggcccaagggcccttctaagggaccccggtatggggctcacgtccgggtaggggcggggcgagcccaatggccaggccccccaccagccacgttggggcagcccccacagctcccggccttcgggccaaggtgtcggggtgcgtctcctggcccatcaatacagattacatatttatatcaatcgcgggctctgagggcgccctcggagagcggccccgcgcctacgaaaccaaactgggagtggtcgcgcggaaactctggctcgggattggctgcgggcgcccgccgcggtgcggggggattgctaatcgtattcagcatgttttgcacaagaaatgtcagccagaaagggctatctgctcccttcgccaaattatcccacaacaatgtcatgctcggagagccccgccgcgaactcttttttggtcgactcgctcatcagctcgggcagaggcgaggcaggcggcggtggtggtggcgcggggggcggcggcggtggcggttactacgcccacggcggggtctacctgccgcccg

SEQ ID NO: 37882 - DNA, 2300 bp, Homo sapien
gaggctgctttccaaagccaatgtgaacagcggctggacttggaggtagctttgaggtggaagagggctgcaaatccttgtgggaaaagaaatctatgattccaggtggcatcagtgtctttccactcctcctagccacccaccacactgatccagccctgagttcctagccaccgcctcctacagcccacctggcttttctttctaccaaatgagggtcttggttccagcctgccactcaggcccaaagcctcgacacagagtggactgttccctgaggtgggagatgtggaaaagccaagaggctgcagccaggccactggcccctgagatctctgcaggaaatggctgtggagtgtggcagtttggcaaactctccaccacacgtaatgaaacttggatttgctcagtgtctggctgcagagcagtgggcctggccagcaggtccccagctttggctatgagggccttgagtcccccaaaacaccgggttccagcaccacactcagccctcattggctcttgaactgagcttggaagcttctggtgaccttccaagagcctgagagtgaggtggaattattttaaaagataaatattatattatatatatatatatttccctgaaggaaccaaagcgaattttaaaagatgcaatgtagaggggaaaagagatgatgaaaatatttaaaggccctatctgtttacagtgttccgtggttaaactcgctcactgctaagaatatttgaatgtatgcttcatacagggatggtgttcaaaaaacttgtaaataaaggaaccataatcaattttcttttctttctttctctttttcttttttcttttgccattagttgatttcctttagggtgttggagggggtggaaaaggtattgagaatggtctttttaatctcttgcaacatttggaaagagttagggaaatgctcagaggcagtcggcctggccggcctggggatctcatctgggaaagccaggcaccctcccattgaatctcctttgcctccctgtgttaagaaatgtctgttggctccatttgtactgggagtgttggcctgtcctcaattctggttcttacccaccgtgtgtgttgcagcacttatacaggcaactgggcacaaggaaaataaagacggtggaaatttgagtatcctggtgtgacattcctctccctgatcgccttttactaccaaatgtctgcccccctccccccacccccccaaaaaatgccttacctagttgaggagcaagttatcaggcccctgagggggtgagaaggtgactgagtcaggaattggctacaacagaagccaggcttaggaaaccaaggtggttggctacgtccttgtgggaagtggggacctgggtggtatctcagggcctggaatataggactttatcccctcagactgatctcagccctggagagggccttggggcctgaggtggccaacaggtcagaccccaggctgccctcgctcacctcaggacaggtaggcctgcagtgggaccgtccgggggcccgtggaggcttcaacaagagggagcctggtctgggttccaaggcagagcagactcccaggagcctctaagggtgctttctccccagctcccagctgaggctgctttttccctttgggggaaaaaaaaaggatgccgatttcctctttgtttgctgcctttgaacttctgccttaaaattggacatcacccataaccttgaggagaagggctgaaaggacagagccctttgttgcccaccccaccctctcttcagccacccaggcagggccagagcagcagatagggtcgcatttggagagaggccccagaccccactctgtttatttgtttgtgtgtttgtctaactggcgcgactggggaaatcgagctgaaagggtagtgggacagatctagagatgaatgtctaggttgataggcagacacgcagacatgaacaagggccctcctggggggcagggagggggcgggctgggaagcctgggtttagggaaagacttcctttgggatggttaaagattaaccaaagtctctcaagttgctagagagagtctagccaggaggactgctcgcgggcgggcggcgggcgggcgcgggtttgatttctgagccctataaaagcccatcctccgatggctgtgacaatgtggtcgtaaacccgtccggggccggccaatttgcatatttggaatgcgccgctataaacccggctggggttttgcagcgatttcttagatgtaaaaatgagatctcaatag

SEQ ID NO: 37883 - DNA, 2300 bp, Homo sapien
cgagtttgcgctgcctaagcctctttgaaagcagccaagtgggggttgccggctgcctctcgcaggccagactaaacaaacagccgcctgcggacatttcaccttccagcacctgggctgccccttcccaaggcagtaaaggcggctccagtcccagtctttcccggctgcggccaagactgggcagtccttaacatctggggcggctgccgggtctttgtcagcctgagtcctggccaccagcttctgcctccccggccagccttccggctccgccgaggtggggaggtggcggcggaagccccctaccctaggccttcgctgagcaccacggccacacggccatcctgcacacggcagagcagcggctctatcttaggtagggtgaagggaaagggggcttcccgaagctgcgggcaggctctacttgctccccctttaaaaaaaaaaaaaaaaaaaaaaaaaagacccacaagacaaaaaaaaaatcgcttttgacagattgaataacaattgtgaataacatgcagttgggcagaaggaggcacgtaattgccaccacgccagaggaaaatggcttcctttggacaaaaaggccaactttgggttaatttgttcttttaatatattgctagagctaagcgggctactttatctgttaaacgcgctcctagcgccgtcgttaaacagcgacgcctttgaatcccggccgggactggagtcccggcgcaacacatggcttttataaaaatctccggattacctcgctatcaaaagctcccgaagcccttgcagggggaatttacaggcgcccacctccggctccccagcctggagctggccccgagcggggtcgagctgctgggcttgggagctgagaagggaaaaaagggaaaaggggagttgtttttttttgcaggcatgccttggccggtgggtatttcacggccaatttcagcactcgccacgtgatcccgccttttataacaaagttttgttgggggaaacctaaaggcccttcataaaccttatatgcttataaaacagcatataaaaatttaacagcggtgctgcgctagatttccaactcccctttcataaagcgcagggcgctgcctttatacgtactggagccgccggccttgtcctcagtgtggccggaagacgactcggggctgctgctgctctcggggcgccgccgccgctctttctcctctgctgccgccgccgtctcccggcagccgccgccgccgccgctgtccgaacttgaagttgccggcgcgcccgttgcagccgccgccgccgccgcggaggtcgccgtggccgccgggggccccttctcggcgctcttgtccccggggtagtcggaggaggcgaggttttccggggtgccgtaggctgtctcgaaaaactggtcgaaagcctgtggcaggacgccgttcctgcccacggtgctatagaaattggacgagactgcgggggtggggtggtggtagacgttggccgagctcttggccagcacgtcgccaggcacgccggccgcgctgggcgcctgcaggcagtctctgtgcacgagctcctccgcggagtagcagtgggccagattgccgcgggggtgccatttagtggcgggctcaatggcgtactctctgaaggtcacttcgcgcacgggttggacctggggcaggttggaggagtaggagtatgtcattgggcgcgaagacggggtctggggcagaaaagaagggaggctggagaaatctggacccgagacgtagtaagtacaacttggcaaatacatgttagaggagcagggaccacgctcatcaaaatccattattgggctaccttgggctctccgcagtagccgagcttaacatgattctccactgcagctgcctctttgaagcggatccgtgaagtagaaatttggagacgtaagctgacgtggaaatctatccccatccttagcagggaggtgctggtcatgtgacccgatgttgaaattgacaagctgctagctagtccgggccttttccccccccctttccttttttttttttcctcctctcccctccctcccggcttcctttctttgtagccacctcaggggaagcaacagatcgtcactcggtgttctcaccgaaagcacgtaatcgccggtgtaactcatgttggctggggggcctcccggcgcgcgcggagaggctggggtgcgcccccatgcagcatgcttgtgctcaattgcagggtcctcgttctcgagtgtgcagagggcggtgagagctcaactctcgtcc

SEQ ID NO: 37884 - DNA, 2300 bp, Homo sapien
cacaaataatttcaagttcagttctcagggattcaaaggacatgaaaattcttgtagcaaatcttgaataaagagttcattaaaccaatgtgtccaagtagcttgatttgtgataagcaatccttgtaaaggtggtggtggggggaggtggagagccacataaacattaatgctaataaattagtttactcgactacagagtaattacttcatattattgatatttacagcaggtattcaaatgcaatggtaggccattatttggagaaaatacataataagaatatttcttttccagtgcaatacacgattagatttgttattgagtcagttacagtcagctcagcaataaataaataaatcgatgttgacacttaaataccaaagatcttagagtttatactctaaatctccccaagatatgtaaataactttggctatttcctggagagggaaaaacaaaaggttatctttttacatatttttttattttccttcagcaacatcccagatccttccaagaagagagttgttgggaggcctcaggtctgggcccttctcagctcctggctctgcctggctgctctgtgctctgtgtcctctcctttctttcgcttcctccaaacattgctccttcaatcctgcaggatggggagcatattttgccttcttaatttattttttttcctcttctcaagaaagctagactcagagtattgctatggcctctctctatccttagcacaaacctagctttttaaagacatccctgtttccccaggtgcagggagttcgggaagcacctctcctttctctggtattgtattcctcctgtggaatgagcagtaggaaaggcacagagctctctgagtttttgccctgcacatcccttgctttcactctcacacattgcaaggaaggagagtaggagagtaggtgggttacccctttctcagccacctctccttggccctcagcccgtcctttccacctccattctccccacacccctggagctctgtaagcagcctgatgggccccccacgaagatgcagcatacccaggagaagtctcctcggatgtcagcgcctctaaagcagcccaaggcttgcctcaattgcatggtttcccgagtcctcagctccagaagaccaggcagatgggtggaccggtgagcagcagggcagcccctgtgcctctgtctctgccgagtcactccgaagcccggcaggcagcgaggaggagggagtttctccaaggacagaaggtgggatgaagaggtaggcagggaagatgaggggagaggtggatcccgggtaagacgaaggcccttccgggccctgcggatcagtgacaaaccgcggggagaagccgttctggctgttggcggtttagggacggaaggcactaaagcgcttcggaagtgaccatgaatgagagagtgtaatcaagtcaccgtgcaaatcggacaagccaccaggcaggcacatccacggcttcaaactctggccccgaaggggttccggctagggtcggaggcagaggcgcttcccagagcaagtctatgggagggggactgcgaagaagggggtgcaaatgcgagactccaggagaacagactccgagaccacaggccacacagcgacggactcccacctggctatccccagtccagggcatccctcacccacccggggagctgcgggtgggaggtggggacgagagttgagctctcaccgccctctgcacactcgagaacgaggaccctgcaattgagcacaagcatgctgcatgggggcgcaccccagcctctccgcgcgcgccgggaggccccccagccaacatgagttacaccggcgattacgtgctttcggtgagaacaccgagtgacgatctgttgcttcccctgaggtggctacaaagaaaggaagccgggagggaggggagaggaggaaaaaaaaaaaaggaaagggggggggaaaaggcccggactagctagcagcttgtcaatttcaacatcgggtcacatgaccagcacctccctgctaaggatggggatagatttccacgtcagcttacgtctccaaatttctacttcacggatccgcttcaaagaggcagctgcagtggagaatcatgttaagctcggctactgcggagagcccaaggtagcccaataatggattttgatgagcgtggtccctgctcctctaacatgtatttgccaagttgtacttactacgtctcgggtccagatttctccagcctcccttcttttctgccccagaccccgtcttcgc

SEQ ID NO: 37885 - DNA, 2300 bp, Homo sapien
gcaatgggccttttgctgctgcctgtgtctctacgctcgcatggcagttctcatgctggctggactgcaactttcaacttgaccttggcctccagccgtgtctgaccagtatgtaaaaccgccttcaagtccccaggaacaggggcctagaaccctactctgtctctttgtcactgtgagttttacaatgccacttggagggaggaaggggggtggtgaaacggccagaaagtaacagaaaaatcaagtccctacagaggctagttcctgagtctgcaaatggccagtcagggagaaggtaaactgggggcaaatcaatatttacccagaactgctaaaaagtcaagaaggaaagggcacacttggtgggggggtggctggtgtgggggtcatagaaggttttattgggcgacacttacattggtcaggacaaatccaggatcaggacagataaaagcccaagcccagccacattggtctggatcctgcaggaagcccaggggccttagacagcagatggtggggtgtgtgtgaggggtggtatgcgtgctgctctgagtttagggctgagtgtgcaagctaggagcagaggacaggtccaagcctggcttctcaccagtccgcctggggtggaaaagaatccagcactctccccagcactattccggtaatgtgcccactttcactttgaacgcttgttcctcttctaggcatctgaccagctcacagtagtgaatcaggaagtggaagtatgtggctctaaagcagcaggacccccagaacccctcgacaaaacatggcagctacaagacgggtcgctgcttggttcttcagcaccaacaccctaccatgctcccaagaaaaggttgcatttcccaggcacagaggaaaggcttcttggactggttcttgggcaaagaaggactaggcaccctctgcaggctggagatcctacttgaggggaaggcaggaagtggccccaaagagcccctttttcttgtcccaaaatagagtgaaatagcgggttcccagattcctggagagtcaggtccggtccacaaagaagcgtggctttagggcccagaaggggggtttaagtcccagccagaagcacagctggggcttgttcctcttaagccccttccagaactaagccagccatactggcgaggtgggagcatggatgaatggtgcacagggatcgctcgctctatctcaaagtctctggaggaggaagcgttgttaccaggtcagagcaaggatcaggctgtatacctaagtgtgcgaatgtgagtgtgtcagtgtacactgtgtgtgtgtgtgatgagtcgttctgagtctatgggtctaaatgcaaacatatgaaattgctcactaacagtgtggacagggaagggataggggctcctaaatgcagtccaagcctccagtggaatgtcctgggacccaggcatatccgcaggaaccgataagcagcaaacaccctgccactgtttccctggaaagagcaaaatcgcaactccatcgaagccgaaggcgccgatgtccgtcctgtggtctcactgcagaaatacgcgccggttcctggaaagaaaacagtcccagaggctccaagaaacacccattctgagctaggctggtcccgtcctccccactctcccatccctgaccgccggcagaattacctgacctgtccccactgctccagatcgcaacccaatcgcgcgcccacctcccctccccgcctggttgcgcgggtctgggccccactgggataaaggaagggaaggggggcggagatggggccgccttccttccctgccccacccgcacgttcctccgcctctcccccgggtgaatggtgcgcggccgcgcggctggcgctggggacggcgcgggccgcggcggggacgacgggtgcaccgtgcagagctggagtcggagccgcccgctttgcatacgccgtgggcggagcgggggggccgggccaatgggcggccgcctggcgcgaccccgcggggcgcgatccgcccccctcgctcgggccccggccccgcgccgcgcgctcttcacttcttgggggctttttaaaacagcgccactggggtcttctccatgcggctcgggctatgacagcctccgtgctcctccacccccgctggatcgagcccaccgtcatgtttctctacgacaacggcggcggcctggtggccgacgagctcaacaagaacatggaaggggcggcggcggctgcagcagcggctgcagcggcggcggctgccggggccgggggcgggggc

SEQ ID NO: 37886 - DNA, 2300 bp, Homo sapien
ggggcttgccattgacaggaaagagagcaagccaggtgctccctcaggctgtggctgctggtagggaggacagagaaagatagaatacctggacagctctccaaggcaggaaaaggttctaggatttgactcccctcactcccaattgatcctctcacctctaaaacatttccctggattttggggctagcagtgctcagcatatagtggcttcaggagtcccaaggagtagaaatatctatgtggacactaccttccggatcccgctgcctccgcccccaggcaagattaatgaacatcgtcttagactgaaagagaagtggaaagccggagtgaagaggaaactttgtctttctttggaccccttacttcctctaccttccttaaccctatggataggaagatggaggagagaagcaaagaaggagaagaatacagaaagagaaaaaggaggagagaaaagtaggagataacagataaaaaggtcacggaagaggacttacctgtaaaagctggggctttgctagggacacagaaaggagggaggtgctgggctgccctttgcagctggctgcctagggctagaagctcttcgggaggaggcggagaaaggggggttgagcatagaaggtgcccacctcctgctctcagcaatgtggggatagactcagcccacccacctggccccagcacacttgcttggagctcaaaaagggtcagtttgaaggagttttataccagcttcttccctgggagaggagccaagagaggcctatggcagcttccagatattaagttccacaacccctgcccccacctccagcccttcatcagagtccctacttacttgctgttttagggcattttcagcgacttcactctcttctacctcaaacgccatccacttttggagacaggtaccactgcccctaggcagggacttgggagaggaccttatgagtcaaacctctatgaaccccaacctttttgtactcggggaggctgaacccctgcccaaaatagcgcggtgaaagctactgccttctcccaagtaggggcctccagtactgccacagcaggggccgcattcctggcgcctcttcattcgaaaaacctctttccaggagacttcgctgattctgaacgaatactttaaaatatgggcaagggaaaaaaaaagacaactcttagaaactctccccacccaacatacctggagtgcaggcgaggtccaggcaaacgggaaagcgacttcttgtacgaatagccatctcaagatgaagccaggctgtggaaaacttaaggccatctagatgggaaggaggtatttaaaagaaatcagcacacactcttacagaagccaaggcgggtctttaaattaaaaaataataataaggtatttatttcttgccccttagggaagaaaaatagcaaagtttggttcgcaggagtaaggagacagaggtgggtagggagagggaggagaaaagaggaaaagatggcccagcctcaagctctccagtcaacttggggcgggggaatacatttttccgtagcttgtaaaaagacttttcagccagtttgaggttagctgccaggggcagacagttgtaataatgccgacagaattgaggcttgtaagccgggcttcacacttctaaaatgcagttatggattctttcatcggtgttagatcaaggcaccaagttaagaaaacaaaagtcaaaacaacaataaaagaaaaaatcaaaagcttatttaattaccgagtcccgctgcccctgcggaactcgccgcgcgcgttaagctctcttttctttctgcggaattccatttgcatcccctctgcctgggtgtctccctctctcagtgtgtgtgtctctctgtctgttttcacactctcctccccaatcgagcgaggcccacacctggcgcatcactgccgagccattagctgcgggtttcctttcatcttcgctgtggcagacgtttctatttatccacttgcgctcgccgagtggcgtcaccagcggtactgtaatgacgattgcagcaggaggatgacagcttagaaagaagagggcaatggggcttcctcccagaggcggtgcggcacagaggagcgctcgcttcacaaggtgaccctagctcccaccgccaccgccgcggtcgcggtccagaccgcgctccagcagctccgcgccctcccaggcacccggcctttctttctccctcttgcaaccaagatccgtccggccgctggagacccagggagccggggttaggaactcacttggggc

SEQ ID NO: 37887 - DNA, 2300 bp, Homo sapien
tacgtaattcctttcctgaatgacttatcttagtaccaagctttgtcctccttcccgagtagcccagtatgaagagaacataagggagacccatttagtagtgggaaaagtaactaccgggtgaaaatgacgttgatgttttcccaacgtcagcaacactgcttagactactactccaatagttaatcaagctggacttctaatgttagggactgagttttatgtcccctagtatgtactttctcttctataataacaatgaaaatacagaccacccaatttgaaagtgggcaaagagcttgaatagagaatttcttcaaagcagatatacaaatgaccaataagcaaatgaaaagatgctcaacatctccaacattagggaaatgcagctcaacaccacagtgggatgccactgcacacccatagatggctatgcctttttttctttttttaaaggaaaatagcaagtgttaggtaggttgtggagaaactggaatccttatacactgatggtgggaatgtaaacaactcagttgctgtggaaaacaggttggtagttcctcaaaaagttaaatacagaattaccatgtggcccagcaattccactcccaggtatatactccagaaaactgaaaacaagtacttaaatgcatgtacacacatgttcatagcagcattattcacaatagcaaggtggagacatttcaaatgcccacaattggatgaatggatgaacactggtggtacatacatacagtagaatattactcaggaataaaatggaatgaaccactgacacaggctacaatgtgatgaacctcaaaaacattaagctaagtgaaagaagtcagatacgaaaaggtcacatactacatgattccatttataggagctatccagaataaataaatccagagagacagaaagtagatcagtggttgcctggggcctgggtggggagaggggaatgaggagtgactgcttaatgggtatgcagtttccttttgggttgattaaatgttttgaaactagatagaggtgatggttgcacaccactgtgaatgcactaaatgccactgaatggtccacttaaaattaaactggttttaagtcatgtgaatttcacctcagctgaagaaaaaaacacaaaaagccatggaaccccaaagctacagtagggttgtttgtttccagaaagacgcccagcagtgcaggggtctgtttgaaacaagaacctgagccagctgagcaactaggccactaatgagctcccctcctccccggaagcaaatgtttctcctcctcctcctcccagccattcattaggctccaacctgctacttgtcaggtagcattagttgtaccggtatcctggggaccggggtgcccttgctcttcctggttccttatttattatgttaatgagaacataaccaagcttctgaggcagaaagtctgagatggatatttgtgctctagtcagtgggcaggtggtctccacagggtgctgtggaaggactcccaccaagatgtctggtttcaaacccaactatgtcacacacttgctctatattcttgagcaagtcagttctgaggctgagttttcttaccttaaaatgagactaaacaaaatttttcttaattaatttcaatgtccagaaacagatcgccttggtaacccctcacttgcaatctccctgggtctgagccaccatcatcttttccttgacaaatgcaatggcctcctaactgatccccctgcgtctgcctgtgccctcttcccagcataagaccggctctttcagacataagtcagaccaccacattcctcctcaaagccctccagagagtccaggcacggtggctcaacacctgtaatcccagcactttaggaggcagaggcaggcagatcacttgaggtcaggagtttgagaccagcctagccaacgtggtgaaaccctgtctctactaaaaatacaaaaattagtcaggcatggtggtgggcacctgtaatcccagaacttgaggggctgaggcaggagaattgcttgaatgaggcggaggttgcagtgagcagagactgtgccactgcactccagcctgggcgacagagccagactccatcacaaaaaaaaacaaaaacaaacaaacaaaaaccaaccctcccagagctctcagctcactcggtaaaagccaggtcctgacacgggcattcgtggtcccacacgagagcctgcctgctgcttcttcaatcacacctcttaccacccatggccccttgctcactccactcgaaaccc

SEQ ID NO: 37888 - DNA, 2300 bp, Homo sapien
tttggctaaatggattggtcttgaatagtttctaagactctaacaagaaactgctagatttcactagaaggcagtatgatggaatctggtaatcattctaaactcagcagtaggtctcctgatgtgcaatttccaaacatgctgctttccattgctgctgaagtctgttgaagtttttgatgcatattttgcttttaaaatgagagggttgactcttgaccaaatgactgagtgcaaatggtaacatcattttcctcgcacatattttcctgttctaacttcaggctagatcaatgtttgccctcttcaaacactggaaaggctccactgggatagaggtaacagtgagatgggaaataaagggaaaacaaagagaacattactgcaaataccagtcaaacttggatctggttcaaaaaaaccaaaaggtataatataaaaatgtaagcttgaaaaatatccagtagactaaacattcactcatcctgattaaaaaaaaaaaaaaaaaaaaaaaaaaaaggctttgccttggtgtcttctgggctaaactcttgggcaatggcttttagtacagtataatttgttagcatttactgccggtgataaattaggaggccccaccatgagattttactgcttcaggtagggtgatcacagctttccaaattgtaaattactttagcaactacttgggacagaaggaagtgaaacagaacacttaagcttagaagaccacttcttattcttcctctaccctggtgcttatctgcatggaatgcttgggtaaaagcaggctttaaaacatcccgccatcccttgcctgaccagcctttttaattgtcttttgagtaaacttcaaagccatctgttagttatgcaaaagatatcagtacaactcacctgatgttaaacatagtgcttactggaagcaccacattttaggtaatcatattttttaaatgctactcttggacttaataatccatactttgttatttaaccaacttcttaagagagtctttaatcaaaaaggtcactacaaggctaaattccttaaaaccccactaagatagtggaaactacatatacgataataaatcagactgttcatctgggacataacagagttttagagatgtcacattgatcatgctttttgaatctgaaatcacacattatgtaataaaggtttcttaaggagacaacaggacaaagtatttgaaaacgaaactcatttttattgagtaccttccctgggtcagatgctttgtatatgctctttcatttaattctcccaatagctctacaaattgcttttcctattttgttttaattatttttttttttagagacaggatcttgctctgttgcccaggctggagtacagtggtgtgatcatagctcactatagcctcaaactcctgggctcaagtgatcctcctgtctcagcctctcagtagctgggactataggcgtgtgccaccacacccagctaatttttatttttatttagtagagatagggtctcactatgttgtccaggctgatctctaactcctgggctcaagtgatcctcctgcttcagattcccaaagtgctgggattgttaacatgaaccacagcaccagcctgcttctccattttatagataaggaaaccaagcttcagaagtgttaagtagtttgctatttatcggtaattcaggtactcaaatataagtctgctatattccaaagcccctgttctattctctatgtcctaagatactatcctaaacaatggcagctcactctctaatcctctttccttccccctactatcttcctgtcttcctgtagctctattttactatgagctctatttacattctatggctctattatgctggaagcatgtttggctggctatatgcagttatttgtaatccctgcctagggcatttattaagcatctactacaggtcagtaactaggagagctgtggatggctgcaagtaaggagggatagataattttcaccagccatgtcatgccctattgacaatttaacagtggtagggaatactccagggttcctatggttcttttttttttttcccccgagatggagtcttgctctgtcacccaggctggagtgccacggcgtaatctcggctcactgcaacctctgcctcctgggtgcaagcagctctcctgcctcaacctcccgagtagctgggatcacaggtgcccaccaccacacccggctaatctttttatttttaatagagacggagtttcaccatgttggctgggttggtc

SEQ ID NO: 37889 - DNA, 2300 bp, Homo sapien
ttctattcctaacttattttgttgttgaatttcagcaaagagctagagcaaactggtagacactgtagtcacaagaagggctaaaagaaagggtgtaatttcaggaaactgtaatatgtgaaatttgaagtttctggtaattgaattgtgttggaaaactaaccaacttggaaggaagcaaaagacacttggatattaggcagaaaactgataagataaatgtttagatttcagggaaggttaaaagacactcattttggatggagctctcagggccacagtgtgtgtggtccagaggcatcctagctgtcctgttacctagcctgttacagttatggtcctgctttacctctgaaagaaaagttactaaaaacttctgaggagacatagccctacatttgttaatatcctttgctaaggaatatggtgactagctatcagaacagtttggtccagggagtgtttttaaaaagtttgactttacattgaactataatttgcttcttatgggtgattctttatttttttctgggtgaggatcatttccatacacccagtgcatgtataatttttgggatgattttccatttgttgaaaggtttaagatcttaaaatattaagatcacagattgataaacttaattcttattcttttaggctaaagagaaacctacatactcttggagtatgctatttctcttctgtgaaatatacccaacaattgcatttgaattgtaacaattcatatgtctaaaattgttgtttaaacaatttttaatatgtatatttttcttttctttttattttagacgaggtcttgctatgttgcctagtctggtctccaacctgtggcctcaagtgatccttctgccttggcctcctagagtgctggggttacagccttaagccaccatgcctggttatgtttaaaccattttgtgtgctatttttttaatagaaagatttttccttttaatagtttttatcaatgatttttctgttttcttcttcagtatttatatttattcagttttaattttcttatcatgattccatgccctctgggttagtatatctatagtaagaactttggaaagtttggccaggcacagtagctcacacctgtaatcccaccactttgggagactgaggcaggatgattggttgagcccaggagttcaagatcagcctggacaacatggtgagatcccatctctgtaaatataaaatttaaaacttagacgggtatggtggcatgcacctgtggtcgcagctacttgggaggctgaggtgggagactctgtcttaaagaactttggaaagtttgaattaaaggttagccataccctttaaataaattataatttaggttagagtttcctagctagtgaagatagacactgccttatagtgtatatatataagttaccctaaaaagccaaaaagactgtgagatttccagattctttcatatattttcctttctacctgcttgatattttattttgtcattaaagttacaattataaaataatatgccatcccaacacaaatggctagattttaattgcttatgtttattcttcattgtggaaataacacggatatatgaaatttgcagtatggcttgttaaagacaaataaattactttttaaagatccagctactttacagacaaaaatttaagtcctatctaatacccttttaaagttaataggtgttttaaattgcttacatcttagcttcatgtttattattatggttagtgtgtagttcatctgaaatcagaatttataccatgtagtatattaggttttattaggttttttttggatcttttgaaagagtttgggtttacttttgaagtacaattggtctcaaaaagaatgagatttttaaacgtgttctaattaataatgtttttaatactaaactaaaatcctccttgatatatggcagcttttcagcagattctaattctgtaggtagttgcatgaaatttttactcagagttgtaaactacaaatatttttatttatttacttagaaaagtgaagaagggctcattattaatagattccagcactattgatcctgcagtttcaaaagaattggccaaagaagttgagaaaatgggagcagttttcatggatgcccctgtttctggtggtaagtggtagctaaaatatatgcaaacctatttatgtttgtcaaaagtagcaattatggttttgttgtaccatatggttttgtagtagttatttttagacttgttacaggattctcattaaaaataaag

SEQ ID NO: 37890 - DNA, 2300 bp, Homo sapien
gagtgaattgcctgttaaattaactgtctttaaattataatcttcctagttgctgaagtttttagattgctaaattacaccttttcaaccttaacacagtaatgccacattttctttctggctattattgctagtttgtttatgagcattagttagagttctctgatgaagtgtactcattctgtttaatatcaaaataaaatttcagtttggtgtcacttttctgtcattgaattccttgcaggccagaaagacaaactataccagtgtactattataccagtgtactattataccagtgtattaaacttagcgcctgttaaatgatgttgcacagaaatgacacccacatttaatggaagtgttagagtcagtcattaagttaaaggaattaaatatgcttccaacccaagaagacctctagttcttaagcattagggcttcaaataatttgcttttaacaaatctcattccattcagattcagttcagggaagagcagattaagttcagttgaggggacctgaaacttaaaagagggactgtgattagttgttgcactacaaattttaaagctggagttcttgaaagaaaaaagaaaaagaatgctgggaaatggaagagcaaggagagttacttctctcttttccctcactagactgtgagcttttaaaggacagggaccatacgttgcttgtgtctgtctctgagctctgtcatagtacttcatgcagtgaatatttattgagtggagttctaaatctagaaagtgaaaaattgcatctaacgctatttccatagtactgtaaagcctccccactctgtaacgcattactttgattcatatgcccacggagtaatttcaaaaagtcttatatgaaaaataaaagaataaataaaacctgtgtagtttttaaggcttttttttttttttttttaatggcagcctggtcaacatggtgaaactctgtctctattaaaaggacaaaaattagccaggcatggtggtgcgtgtctgtgatcccagctacaccggaggctaaggcatgagaattgcttgaacccaataggcagaggcttcagtgagccgagattgcattactgccctccaatctgggtgacagagtgagactccgtctcaaaaaataaataaataaataaataaataaataaataaataaataaataaaaatataataaggaagtctctcttttctgaaagttcagagttgttagaccaaggtcctgatactgttacacttgccatttaaagcctatggaggtatctcccctttctaccccaggaccacctttataaactggtgattccattctcctgggtttaacatctttttgagtttttttttttttgtatcattggaggggatggtttctgtaactgtgggagtgggaaggtaaaaagtttttccattcttgaagctggtccaagacttacgtctttttgaatactttctgtcttttatacacattattaagggagataatatggaatacttcacattataagtaaattacatattaggtgttttataaatgataacattatttagtttattgttaaaaatggtaaaagaatgttatacaggtacaaaacaggaaaaatgcttaaaattttgtgaatgtgccccagaaaactaaataattagaagttagtctgcctgcacattgttgataactttaaatgtggttaggtccattagtttaaaatttgccttttaaaagttagtgggttttttttttaataaatattattatttatttttgagatgggatctcactgtgttgcctaggctgttctaaaactcctgggctcgagcagtcctcctacctcagcctcccaagtagctgggattataggtgtgcaccactgcacctggttcctgaaagtttcttttattaaaaaaaaaaaatctaacaattgacttgctaatattaaatgaatgtttacaataaaaaatgttatttgcccctattgaaaataatgtattgaaatcagtgtgttctaggtcagtggcttcaaagactccagttggattcattggactgggcaacatggggaatccaatggcaaaaaatctcatgaaacatggctatccacttattatttatgatgtgttccctgatgcctgcaaagagtttcaagatgcaggtgaacaggtaagaccttttctttagatttgttttagattttgagaatgaaaaatgaatatacattcaaataagtgacagcttcttagaagtatacccaatggagttgtaaacctaattcagtgttaattt

SEQ ID NO: 37891 - DNA, 2300 bp, Homo sapien
tggggtatataaggctacatgaaaacccaaggaacttcccaccgtgttgctctctggaccctagccagtgtgacttctctccacctttcaaagtctccctatgtttatcttatatataatgttgagtttttagttgtacttagaagaatagggagaaacctatctactccatcttcctggaagcggaagtcaggggccactataaggcattgaaacaattacaaacaaaaatgcgtggcaaagactcagggaggagttgcagtgcctttcaaacaagggcatcaggagggcaatcaaatgaagaaagctaaccagccataggcaggaactgcatttgccagtacaataatatctgcaagcaccttcaaacagtaagaattacttaaaaattcataacgcttctttaaaatcatggaaacctatgaaaattccttagtttatgaatcaatgtagggcttcttggaggagacattgttggagaagacaatgcagggcttcttggaggagacacagttgaaagaccaattgcagttcaggagttaattatagaaacctgtagtgctggaggaagaaaaagaaaaagaaacctgtaggcccacatttgttgcctgcaggagatctattccagctaaaacctgacgaaaccaggaagagaggcacaggtgggaaatgctccagaaactaatttacccctagtaggggtggggacccaaatctaggagaaggtctaattgttgaaatgagttttttctccctccctcccttcgtccctttccttccttcttttcatttagtgttgggtagagggttggggtggagtgatggtcaaagaagggcattaacttcctcccagttacagatagggaccttgcactctgtacaagtttttaagtttttggaaacgttgccagcatgcccagaaacatgaaaagagcccagatggaaatgatccaattcctttgctttcaactccatgggttactgagttgaaaaaaaggtcaaagtcaaattttgttgattgtgctacttagattggggttcgcatttccctagctactccatacacattctctttcctgctgtattgccattctccaaaggctatagtcttgctttggtgtggtcatggcttccaaccctttggtggagtcagtggagatgagaaggcctgcaattacccccaaggggtttacagactcaaatatgtacactaagcattgacagaagaatgactaaatgtctgtctctctgcaccgcgcagtggctcacgcctgtaataaccagcactttgggaggccgaggcgggcggatcacttgacgccaggagtttgagaccagcctaggcaaaatggcgacaccccgcctctactcaaagtgccaaaaaaattagccgggtgtggtggcgcacgcaggcctatagtcccacctcacctactccggaggctgaagcaggagaatcacttgaacccgggaggcggagattgcagtgagccgagatcgcgccactgcactccagcctgggtgacagagagactccgtctccaaaaaaaaaaaaggtctttctaatacacatacatatactactactttctggattttatatttagttttgcttacaaaatggatttagggtgtagaattttcaaagattagagaaatatgccttgaaatagaaagtgcaagtttctagtaactcttcccttcaaagataatgttaccaacttcttttcctactatttttagtattgagaaactgttgtgttaagtaaaatcaaatgaatttaaaagttattacacacatggtagctttctgagtgtttttcaagctgcgagtcagttttgtcctttttaacacgcagcggttgtggggacaaggtttccgaggaggcgggagcgagcgacggcccccgcctcccacacgccctctgctttggtaaacaaggagactcccgcccgcaggctgtaaatgaggcacgagcttgggggcagcgccagggcgcctggcgtcactgttcaaaaaggcctcttattggtccttcgcacagctgcggacctgggaattctgattggtctgcttccctgtccgtaaagggattgacaggccctgccgcgtcaggccgctcctctcggctccgcgctccttccctcgcgcgtgggcacccgcccccgagcggtgagagcgcgtgcgcgcgcgcccttctccgtgggcgagccagccagtcccgctgcacacgctcgcagtctgtgggccctccgggaggcggcggaggtcaccgcggggagaggggcgggcgcagcat

SEQ ID NO: 37892 - DNA, 2300 bp, Homo sapien
tttaagaaattcaattaaagccgggtgcggtctctcatgcttgtaatcccagcactttgggaggctgaggcaggcagatcacctgaggtcaggagttggagaccagcctggccaacatggagaaaccccgtctctactaaagatataaaaattagcccagtgtggtggtgtgcgcctgtaatcctagccactggggaggctgaggcaggagaattgcttgaatctgggaggtggaggttgcagtgacccgagatcatgccactgcactacaccctaggtgacagagcgagactctgtctcaaaaaacaaacaaacaaaaaacccaaaccctactcccccaaaacccagaaattcaattaaatactaagagggtatctatttatcttggtgggaaaaacttggtctaaaaattaaaggatcattattaaaatgaatgaagcaagctaaaattccagaacaaataccttcctggggaaaataaggtctaaaaattcaagaaataattaaaaataacaaagtaaaaatacctgtgaaaatgtcctttgagaccagcctgaccaacacggcgaaacctcctctctactaaaaatacaaaaattagccaggcgtggtggctggctcctgtaatcccagctacttgggaggctgaggcaggagaattgcttgaacccgggaggcggaggttgcagtgagccgagatcgcgccactgtactgcagcctgagcaacaagagcgaaactccgtccctctcagggcaaaaaaaaaagtctttcaattatggtttttattaagcatactgtttttctgatttcattaactgaaaattagtggtaattaaaaatgtattacatataaataggaatgtgatttaaacaaagagtgacatctctgacaaattgtgcttataaaattcactgctatgtttacatttcttaagggacacagttatttctactaccagaaggttgctaccagtaacgcaagtgataacttatgttgattattcacaccgttttcttcatccataaaataaggagactgggactaaatggcctattaaggttcttctgaaattctatgatcaagtataatacccagcacaagaccaagttcaaaaatgtcaatacacaggaaacaaatcagtctgtaaatattgagaacctatgttatcaaagctaatgtcttctgaaataactggaagtaaagatgaaagtatatgaaagataattttgaatgttctgtatttagaatgtgcttcaacatttaatgcgatctaatttacatatcctttctggtgctattgcaaggtttgtcagggttttacggcaacagaagactatgatgaattcgaatgggacacatttgcttctgtggagttacgattcaaactgaatgtccaatataggaaggcaacatatacaacaagcaaaagtgattttagaaataacagaacgcgggagaaaattcacacacggaaaatgatacggataacaaaagcaggtaactcacagaaatgcggctagaaaagaggcctctgctggagcgagagcaaatagaatcagagggcattagaactgaaaagctcctaggagctttcagtgaacaaaacttcatagccaaaaaagcacacgactgggccaggagttcagagacagtcttggtgctcaggggtttgcagccctagccgtgtggtcactcccttgcttctctggctatttccttatctataaaatgagtgggctagtttaggccgactgagacgcagacagggatacggtactgtccatggacctctgagctgccctttccacatcgctggtgagttacttaaacctcctgtgtgtttccccctttcgtatgtcaaaataataacataaaatcagaatgtaaatccagacgcattgttttgctgcgattaagttgaacgaaaatagcaaggacgaagtaaggagagagccagcctacccgcgggatgaggcgtcccgcggcggagtgggctgggggcgtgtcgtcgcggaggggagcggcgaaccaggcaggaggcggaagagaccgccccgtgggcggaagtgacgcaaggcctactgtcggctgggaggggaggtgtagccggtctttgggggtaggcggtagtggcggaagaggttcggcggctgatggcggatcaggatcggaagcctgcgtaactttctcccttgatccgggagtctttccactgggtaaggcgcctccccggtccaccccagcgccttgtgcggggcggcctccagctgcatctcttttagggctcgtgctacacc

SEQ ID NO: 37893 - DNA, 2300 bp, Homo sapien
actttctgaagtcccgctggaggagctttgcgaaatagcatttatagttttctaacaagcaagttaaaggacgccagcatgtggcatttgtttaagagtaaaatgtcttaaacaatgccctacttaaaaacagatttcaagatttgctccaggacagaccccaagcaacgtggccaagtggtaccactgtgtcacttggtacaagcgtttccaaaccggctctctttatttagggagctatggccaagtacagcagaatttattgaaacccacatttagctccaaagcttcatgtttgccagattgttttttctgcaccacccgagaatttctaacagacttcaaaacagactgcttcgaattccatctcagtattaaatggtgaagagccagcaactcaaaggagattaaaagggaacccctcagaagagcctggcactgggggctgggaagcaatgagggaaaaagcacaccgtcccttaatggtgagttcagaacacatgcgcgttttaacctcacgagggctcagttgctcgtgtgtataacggtgacagtaatccccacctcctagggttactggaggattaaatgagataatgcacagagtgtgcctgaaacatcataggcactgagtaaacttcaggtcccttccttccttcctggctcctttcaactttgagcctcagatgccggcgtccctgttcctggcgcaactggctcttcaaacaatcttattaatgcctattaaaatgaaacccaataaaagtgccaatatttggtgttgaaataattgatgtagcagagtaagcccctgaagcacccaggcaggcccctggtgcaatgtagcctcacacctgggggatgaatttcacaactgtaattgctaccatataattcttattaatgttgtgctataattcctatttattccacggggcttgtaaatgcattaggacttgtcaacatattattttacactgtttatgatcggtagaattatgtccttcagggttgtattgtgcaaaagctccaaataaatggctttgggcctcattaaaaaagagcaaaagaggctgcctgttgaagtggttctccatccctgccgtcttgcaaagaagtcagtagagtgtatttcaattcgattctcagcagagctcttagcccttaggaataaaagagaatccctgcttcctgtctgagctgcgtaactgtgatgggtcagccctagcaggaagtgtcgcatgagctgaagggcagatgcggtgcctagtactgcgtgtgtaggggatcgcttcgtcttccaggagctaccccacattctgccgctggcgatttatccttagacctcctggccttctatgcctcttgctccctagcgtgagggtaaccctcttttagttccaaatttcccagctcaaatctataaagaaaaagacctgaaattcattccactgaagtagaaatgccttaaaagtccaaaacgtaacccccgaccttggagacttctgcatttactaggccagtaaagcataaaactaaggggacagtgttctgctcatttgggagtgtcaggcactagcatggggagtgtgaggagcctgtcatcgttgcttatttttggttttggccccagagcaagtcttccctgtgcctttgcagccacaggctgggttgccatagaaccgagttaatgttcttgctccgccaactcctagctgtgaattgttgggaagcccttgccctggtctcttaggtgggaacgcagggctcctgcttccagggttgtaagggaatagccgtgtttgcagtcccctggtgccgggagtgccctctccctgggccgtcagcgctgctctgccacggccacatctcctgtcctggaagtggccgggtgaacctgtggggagatgagcgctcctgacagtccttgcacttctcttgtcctgcaggcagcgagtatgacgaggaggaggtggactatgaggagtcggacagcgatgagtcctggaccacagagagtgccatcagctccgaagccatcctcagctccatgtgcatgaatggaggggaagagaagccttttgcctgcccagttcctggatgtaaaaagagatacaaggtaacagaggtgctgcatgcttggcataaccacatggaaacagggcaagcttcatggaaggcagcagccctttcttgattttaaagcgagcgtatgggctggggggagacactcccctctcctgcattagagtgcgtgggcctcacccctgtgtgcacacaggtgccctcaaggaagtgct

SEQ ID NO: 37894 - DNA, 2300 bp, Homo sapien
gagaaaataattttgtcttaaaaaccaatatcttgatttactttggaagttattttagctcacttcattttttaaaaaatctatttttttcaatttggtctagcaaggttttattttaggaatagtgaaactgacaggaggtagtagaaagccatgcattagtgaaacccaggccccttacttccttcatctttcacctgcacatttctggcacttcccatctcggaactctcttgcctgaaccacctctccacactcttgggagttaataactccacgtagacaatttttcctctggaggacagaactgctacttcttcaaagcttttggggctcccagatgctgcatagtgggggtgcctaacattcatctctaagggtggctgttttggcatcatttttggctgaagttttgtattgcatttccatgtcatttggtgtggtgtgtgcctgccagatattctgcctgctctcagctgaaggccttcccagattgggcagctgaatgtactgcacagctgccaaaattctaattcaagatctagaattctaactcctgctctttagacccttgtctggccttggcctcagtcccctgccaactcggtccctggctcattatcaggcccaccagggccctgcccccaccctcattgggcccatgaaaccattcttggcaccaaactgaacttcaagacacagctgccccagccccacccaagccgaatctcatctcagcaagtttgtcaccttgtgagctgcaagacagaagagatgagaagagaaaatgccaccggtgatggtcagatcataaaacttcctgtagcaacagacatattacatgtgcctttactctaagcacttacatgaaaagcaaacaatcccattattagaaataacactagacagagatgcatagagtttatggagggaggaatactatttctccatgcatctgcaccagagggtaagtgaaatttgccctaaggaaaaatgctaaattcagtatgcatatattaatattaataaaaaaaatgtactgttgggtcataaactgctgataatgtgtaatatttcttagacacctggaaaagtgctactggaaaatacacactttacagaagaaatatgactgcaactggaggagggggtggggacaagaaagtaattgattctcagcaaaatgctggttttcagggaagctactaaattcaccttaagtggttacctggtcaacattatgctttaaatgctcacaggatgaaatcgcttcctttttaaatgaagagtcactatgtcccttgccgttgtttccgctccttctagccttaaccaatgcactgtcctttctgcagtggctgaaacgaggatgggttaattaccagacctgagatggtggagtgggtgcagtagggtgctgtaatttcgggtgatgaaattattttagtttttgttttcctagaaggagcagggagtataaaaaacgtggcacatatgtaaaacacaggcaaatgcacttgacaaccaagcactctattttgaaatttaaataaagctaagatttttttctggcctagagggaaagcttcattaaaatcaattagttagtacaaacctccggagaatgtgtactttttctaaagaaggtttaaagaagaaggtgcacacaattacctttcctgggtcccctgtgaatgtgtcacacctagacaggtggctgagtacaaaaaaatgtccctgagagggaccagggtaactccctgagttctcctcgcagggaggtaggtgtaattaatcgatgtgggtgtattaagaacgtcatatacataaccaaggaggctccaaacagatggcacggatggcaagccgtaaagggcaggcctagcgagataaagttggtggcagggctcgcaggtgaggcctgggtccgcgcgctgaggttggggccgcacagctgtagccgcgcgccctggtccctcctcccagctgcggcggccttccccccccgcccccgcccccgccctccccccgccgctcccgacgccgccgccgcagccgccgcctcccctctgcctcccggtggctcctcgctctccttccatctctctcgccccctctccctccgtcccgtcctcgccgctcccctcaccccgcctctctccccctcccccagcccctcctctcctcaccccacccggcctccctccctccctcgcccgcccggcgctcgcagagccgacaccaggggggctctcgatgtagcaccatgacaggcatcgccgccgcctccttcttctcca

SEQ ID NO: 37895 - DNA, 2300 bp, Homo sapien
atcttttattcttttttgttatttccaatccttcagtaaagttgggcacttgaacagatttttcagttccacaaattgaagagcacctcccatattctaggatactgaagttagcatggcagacaagtgtcctatctttatgggctttctaactttagatcctgaggtctgaagggaattaaggaatgagctggcatccaaaattggactgggttgtatgaggtgagctacacaaagggtccgcactcctgctgtggacctggcggagtttgcctggagcgacacagatctgactactcaatccaccttgaggttaccactgatggtctgttatccttctcccctatagaaaatccttttaaatttggattaaagatttatagagctttactaatgtcttcaaagaacgggcatatgcagtttgaactctatcacagaagcaattcagttctttgcaactaaaaacattggcttctacttgaagtataagtaaaaactgcctgattgacttgatgaaaatgagaattgtttgtaattagcaatcacttgattggcatccaaatagcagcctgtttgctctcttgaagcatgctcaaatcactcaccatcttactttaagaaaaatttctttcaattacagatgtaatgtatgctcctattgaaaatttagaaaataaaaatgaagagaaggaaaaaaaagattatcaatagtttcacttacatatacattgtgatttattttcttcttctgacatacaaacagttgccactttatgaaggtttgacctacaatttttcactttttgtacattggtacaaaaatgaaatgcatttagtagaaaccatactccaagtatccacccaacaattctcagtacagtatttaatatattacatgagatattctacactttattataaaataggctttgtgttagatgattttgcccaactgtaggctaacgtaaatattctggacatgtttaagggagacaagtttaaactatgatgttctggaggttaggtgtattaaatgcatcttcaccttatgatattttcaacttaagaatgagtttattgggacgtagccccatcgtaaattgagaagcatctgtattgatttttaaacagttgcaatttcatggtatatgtgcaattgcataggctggtttcttaaaaatctgtttttaaaatatctgctaactatataaagcaggaaaaatatcacttagaagtctacctcccagaggctgggcacggtggctcacacctataatcccaacaatttgggaggccgaggtgggtggattacctgaggtcaggagttcaagaccagcctggccaacatggtgaaaccccacctctactaaaaataaaaaaattagctaggcatggtggcacacccctataatcccagctactcgggaggctgaggcaggagaattgcttgagccggggaggcagaggttgcagtgagtcaagatcgtgccactgcactccagcctggccaatagagagagactctgtctcaaataaataaataaataaataaataaataaataaataaataaataaataaataaataaaaagtctacctcccagagaaactatcccttccttcctttaacatctgggtgcattttcttataattccttttttttaaacacatagttgtgtttatgctggattaaagttttgttaatatgcacagatcttgtaagaaagagtttcaagaggctcagttgcagatcatatctgttattggtggtttagtagtctttcccaattaaacctcaatgactcaggactctcagtatgacttttaaaggtgcagaaagccatcacttatgttccatggcagaaaaaaaaggacgattatgttgcactatgtcattctacttttgtgcagggaaaataccttttgaaagtaattctcctggttcagtttcttaacagtgtgacccacatagccaatgttagcaagcactggaagagaacactattaattacagctttaagtggccactaaacatgcagaagatttcctctgaactgagagttgaaggatatggtgcaacaagcccatttcctggcactggaaagcggagagagagctgcaggagaggcggtggtgaaggaagcagtgcagggccatgcgtggcccccgacgtgggcattcggctggagctcttgattctaggtcccagcctgagtacacgaggattcctctggcctgttagctacaacttcctcttctggaggtcttacttgtcatctatgtcttggtcgtctgcata

SEQ ID NO: 37896 - DNA, 2300 bp, Homo sapien
aaatctccctcttctacttatccaagggttgtcccaagatccaaaatacttctggtgactgtttgtaccttctttggattcatagacttctctggagataagcctccagaaagtggcctgcccaaggacacacagacagtaagtggtagagtcaatgaaggactgatttactgtcaaaaaacaaatgtgctaggttcccattgtgtgctgagaacaggctctggggatgacaatggagaaactggagcggagcccttctgagaaggacttcaagatcctcaggaaatagccagacctgatggtgtgggcctctagtcccagctactctggaggctgaggcaggaggatcacttgaacccaggatttggaggctgggactataccacatcactgcagtccagtcttggtgacagaaacagaccctgtctcaaaaaaataaaataaaataaaaaaataaaaaaaaattcaagaagtaacaaaggtctttgcactacttacctagtgccaatctgggtaattgtgtttgttcagtctttgtctttctgctaggactgccaacaaaagtatcaacgcttgctaagtgggccaatgttgtgttcatgtcattttcttaggtttaagcttgctctctctgcatttgtgccagggaagatttgcagctcctatcactttaaaatgtcccctggagttacattttgttagatcttgagctccagcaagattctctgccaaacttagtacagtcttggggcctcttgagttgtggaagccggaggtgcgccatctgcttactttaaaatcacagtgaatgctgtatggaactggttattttcagttcctttttttttatttccgaattttatttaaatttcaggggtacatgtgcaggatgtgcaggtttgttacataggtaaacgagtgccatggtggtttgccacacagatcatcccatcacctaggtattaagcccagcatctattagcaattcttcctgatgctctccctcctccccacccaccttcctacaggccccagtgtgtgttgttcctctattttcagtttctatataactttctgttccttagacatttgtttcttggaacctacatctataagaagcttagctatatttcatattgagtatttttcccatgagtggaaattctaaattgaaaaaaaatcaactaatcctacacacaattctgtaacagtgtagtctaggtaaaatgcaatactagaatgccattcaaattctttacccgagaattagctgcaatagccagaaactaatgtggcttttcaaatatttaggtttagcgtaattataaatgtacataactaatgattcatgaactctcaaattatacatctgcgtttgattttatgttgaagtgtttttaaatcctcagaaaatgatgttaccaaatgtttctggctcactaaatgttctatttaaaaaaattcttaatcaaaggcaaagactcatccggcaccttcatataaaatttgatgagtgggagatacatttcttgtaatgtaaatgtaaatgcatccggctgaaggaattcagagacaatcttctggaatcttaaacacaattaataacccaccaagatgatgatcactggtgttttatattccttctgagaaaggctataagacaaagcatggattgactgaagatggaaatacatgtgacaaagtcacagtgtgaatggacaggttaggtcccccatcccatcatcgtcactgtcttacctgactgcttactgcttatcatcctgacggtgcaggattcttccttggccagagaggattttgctggagtcagaaattcaaccaaccgtattgccactgggtggcacaattggaagtctctaaagaggtctgggctttaaaagggcctctccctctgtccgaaggactgggatttataaatactaaagctgccggccattgtgattgcttttactttgggactgtttataaaagtgagggagtctgtggcctttcaaagagtgtggatttcacattggaagcctctgtgttgttattctataggaaattaactggagtattttttaagtttgtcttatttttgatctgatgaatccaaggagtggagcaagaggcagattttggacacggttatgagaatgacagaaactgcctaaagcatttatgctctggcattcgtccctgtttctggaggtccagtaaggtaggcaacagccatgtgtagctatttaaattaaaattaattaagattgaataaattaaaaattcagaccctcagtcat

SEQ ID NO: 37897 - DNA, 2300 bp, Homo sapien
cctgacctcaggtgatccacctgcctcggcctcccaaagtgctgggattacaggtgtgaaccaccgtgcccggccccaagcacaattcttaactcaagtaataaaattcttaactcgagtcgctgtagttatcatcaccatcctcattcatagttgaggcaactgagaaccaggcgtcaagtagcagagctaaaatttgaattcaggcaggctgacactagaatctacactaataaatacctcttcttttcttcagtttacatttagaaatgatttgtgtgtgtgtgtgagatctggaatatgtaaaaatctcagtctgtaatatgacagctagaaaccttttgcatgaaattgcaatgattttatttctacaataagtagaaaactcagtgatgaactctgaataaggctgtgaggatcaaacagtcatcagtccctgtggtttcaaggaacactaaagggcaaggggccacttaaacacttaaaaacagaaacaacatgctaagctcttccatttagtatgtcaaaaccagctcagaagtatgtgacaatccaggcaatgtattacagtttctagccagtccagtcatgattctctggcaaactgcaccgtcatggttgtgatgcattgggatgagaggtactatataaatgtcagatgttacataaatgtcagaaatgattattgtttattaacgagggctaaactgtttctaagcaaagctccatctcccagccaatgtgttcttagcagaggttccaaccaccaataacccacaagaagggaatgcttacccctggctctatgaaggagcccagttgggatctgggcttgaaaacagggattgagttgggcccagtgccaccccttgctcatcaagtgatctcaggccagcccccaaccttctggtgtctgccttagctcacctgtagaatgggaataattataatacctgtcctacttctggtacccgggttggtgtgagaaacaagggaaatcacgtggtcgcaagcgctttgtaaggtgtgaggggctgcgaggttggcattggtcgtctagaatcgggctggatttagcctatgccttctctttgaatcctactcaaagggagaacttctgaaaggaaattcagcagggggatggtgacagtgatggtgacggccggatactggagacgccaggctcctctcgctgcagaccaggcgcccggatcctgcagtctggccctggctctgccgctccccagcccgtgagcttgggccagttaccgaagaggctctggaagtgacagccaagggccctttcggctctgacgccgtgtctaaatcaggctcatcacttggctctagctgtgattcacctttcgccttaggagcaactctccctacagcttctcagacgcatgaagcaggggtcccgcgaagggtggggctgtgtatttcatgagagtgtgcaccataaggaagttattctcctggaggaggtgagatgagggggcggtgaagaaggggtgacaagtgagtgctctgaaaagccaggatgcagggagcactgaaatgaggtcatgactgtcgcaagcaaaaaggagctggacatcctccggtgggggagggaggagcgtcctgcatttctgtttgcaaagtcttttcccacatccttcagcatccccctccccacctctcccctacccccatccctacacctttcaaaccccatcaggccctccccgcagaagagcccacgcccgcgcctcctccgtggtcttgtctgaaaccataaggattgtttccaagctgactcacaccactaatgtcagggagccgtgtcacacggcgctgggctctgcaagctgttgcttgcgcagtcgcccccgccgctgccgctcccgggcgggtgcaccagggtccgcgcgggcggggcggggtcggggcgggaccggggcggggcctgccccctcgacgcgccggccccgcccctcgctccgtccctccccagcggaccgcaatgatttagaagttcaggaatcccacgtgacgtcaccgggggggtgatgtaatgcactctaaatagaatgtattgtaatctttgctcagtccaacgtggtcccttcacccgggctccgctcttgccttctccacacttgtttggtaagttcctaaaaatacggctcggccacttctggggcttttgcatttagccacttttgttgcacttgccgcaggagccatctcgggagtgtacttgtttgcaggggttggttctcggcagcagccgcgaggttacttggtccagtgggcag

SEQ ID NO: 37898 - DNA, 2300 bp, Homo sapien
cttttcacgaagttcttagaggggcaagatgcgaaggaaggaaccaaggagatgttttctctcagcagctgcatcccgcttcttctttgccatagatttatttttaaggggcgtctggtagataaagccctagaccttgtccacactctcacccccatccccaactttccctggaccggtgccgcccccacttgatgcttgctcaaggccggggactggagcgggctacttgtatatttcgttgtcagtctgcagaatgtgtttgatttttatttttccctccttctctgacatgtgtcaaggaataaagactggatacaggtccattacgtcattctgcaggccagtaagtgtttgattaacggcttgagctcctcaagggttcaggagcttagaatgctgacaaagcaactctgctttgcatccccctaccctccccacaacacactcgtgcaatcgccggctccctgggcatctttattgccctctcttcccagcccctccctctccaccactcccccgtctacaccgttatcactctagccccgcccccgcctttttacagctttccctggggcgagcacggtccctggagtgtgggtaaaagcttctggggtctgaggggaccactgtacctgatcagcgcgcaatccgcccttttgtattatttaagaaaggcaccagtaagccttctcctctagggcgaaaatgcttagtcctgatagaaaaggcaaatcaggaaatgtttgcaagcgttatgataatactctgtcctcgtggtggtgacttaggaaagcaatacacccactgcaaacaaagtatttcactttacgtagtgcctgccctttagcagaagagggatgctgacaaaatcaggtttagctgaaaggatcaagactaaacgtttcatttccaaagtgagggaatgtgagtcgttgaacctaaacttccatacaataaattgctgcgtgcgttagtttctagctcttaaccttaagtttctatgttgaaagaggaagtcgaatacgtaagtcattgaactgagtcagaacctccgtatctggcagttgaaataaagaccctgtgtatgacttgttgcaagggatcaaagtaaaaagaaccctcggtgtggggggtgggggggtgggggcgtgagggaggtgtgcagcagaaattaaatttaaaaaagtattaacagagttttggatagagggagagaggggattggagtggtccctgatttggagttggtgaaaactaaataaagaaaagtttatattgcaaatatgtgggaatttcttgaagaacacatgttttcttataattagatctactttcttcaaagcgaaagccatgctgtagggtaggcatttgtgaaactcctgtctggggtctaattgacatccttccccaagtctgtggcaggatttagtatttattcacatctagagatgaaatagtgtaacctccacacaatatatgtgcatcgaaaatgttgaacttcttgtttgtgatgcatagacttaaaggaaaaaaaatggcccagtcatgggcactggaaagtgtgattaatgatcagtgatttagtgatcagtgattagtggttttattcaaactgttacctctgaccagaagcacacatcagaggattaacaggctctttagataaatgctcattagtggaaggggaaaagcaaagataataggcatgcacccagggacaactttcgaagaaaatcattcccgtcttcagaataataagctctattaacagaaagcccttttaatttaaaacttgcttttatcttgtaaatcaaagttagatgtaaaagtttgtagtgccattataacctaaattttcccatatccactagatgtggattatctcagtagcgatatttttttttatttaaacaaacaattggacctttagagcagctgaaccctgacaagttcttaactcccagggtttgaaagtgtccccccttctagcatggagattgcagcttgctaactagatggcgcactgttatttggtgttctctgctgcgtagcgcaggagtataaactgagcatgtagctgcttgcgaggtgttcttcaacatttacaacaaagttgattctgtgtagggttggaggctagacagttccacaaatttttagtcacattttccatgtcagttaaatctagggagttcaagactactggaaaaattagtctcattactaaaagaaacttagagaacgagggaggtaccagagtctaggaggtacctctgggttgcagaagtaattgtaaa

SEQ ID NO: 37899 - DNA, 2300 bp, Homo sapien
ctttttaagatagggtctgtctatgttgctcagtctagatttaaactcctgggctcaagggatcctcccacgtcagcctcttgagtagctgggattacaggcatgtgccgccacacccgcccaaaatttacatctttttattctggaaaggaaatgcaccctttatctttaaaatctagaagcacaagtatagccatatattttcagtgtaaaaagggtttaaaaatttcttttggttcttcattacttgtggttgatttatgagtctgtgaatatgtgaacacagtttacgtttagaatcatgccacttctgcttgctgtagcttcagttataatcttcctcatattttttctgttttcctctttcgtctactgtaataaaatttttaaaagatccagacttctacttatctcactttactcaactccacttttagatggcagcctgccaaggaaaccacagtctgaagagaatctcctatgagacctctagagggtcagtagcatcagttgagaggaagagttcaggagaggaaaggacggcttctggtttatgccatttaactaatgaccttcctgattccggctcagagtgagcagaattagttaacaagggcttgggggctcaggaattccaggtatctgacattccacttgctgcttctgcctgtggccagaggcaactcctcatctcagctccatctccaccacctcattttacaatggagataataatacctcaaaggtatgcactaattaattattcttggaaaattctctgaaaatgtaattactaattatcataatgattcgattattaatttcattccttttatagaattttaatcgaatgccaaaattcaacacccagatccagttatttgtaaactttttttctgcctattatcttagcagcttctttataatgattattttaccccatgctaggtgaatttcttacaatatagaaacaacagtattttaaaactatttagaaattttggagctccaagaagagacaatacagaaaaaaacaagacaaaatgttgtatctccatagattattgtaactcaataattaaatagctaaatatttgaggctgttgatttttaaaccacattaactactttttccttcaatgtgagtcatatagtctgaggtggttagtttactggtaaataattatatctaagactattacagtttacctagatattcagcaggaaagtcatatgaatacaaataatttacaaacgacctgtgctgaaccatggccctggcttttattgtgcaattctaagtttggaactgggtgttaatttattaagaatcttttcatcaattccacagattcatagaattaatgtgactgagttgacaatagttaaaacaatgtgtatttggcattgatgatttttcttgaatggtgttgtttaatgttatttaatttagcacgtgaatgtcttatttttctaattagatcatacgcaccttaagagtagggactatgtgttgtaattcctctaaaagcagagggattcaatgaacactggaattatcacctaggccacctggctttttttttttttttttcctccctcactcaacctataactagctgtgagttttggacacttaagtaactgcatgccacctcagtttcccaatctataaacaacgaaatgataccttctgtaatttacaaggctgttctgaagctcaaatgaagggaactccctaggaggggggtggatcgttaaaagccttgtgtgggcttgtgaaaattcagtgtcatttggcaaggttgttttatatccagatgtgtgattgtcagtggggatgtgcattttgaccttttcccttccatttttttttttttttttttttggtctgggagattttgcatactgataagagctgagagttgatttagcaaagttatgatcagacgtttccagctctagtggcctctagcttctgctgggccggccttaatatgaatgagggccatataaccagcctcttaaatttaagtgtcagctgcatcatcttcatcaggagaaacatttcaaacatttattttctttgcaaaaggcaagttttagtggtggagtcaatttatttctgaaacgatctcatttacctgaatgaggagctcatatttattttcagggtaagtggtggggttgtataatactcgtgtgacagatgaaccaaacactcagatgtaaattacatttggctggaagaagatgctctggtatgaaaccacatttctgccattgctcacttgttcttc

SEQ ID NO: 37900 - DNA, 2300 bp, Homo sapien
attacatgccatacttttaaaaatgaaatttgatgggtttctaagcctctgcagaatttgggcatcattttaataaaatagacttgatgaagtgaagcttctcaaaataataatttttaaaacggtacaattttaactggggatatatttaatctgtatagataagggaaacaatttttgcagtcgtctcatagattcttctagaaaaactcagaacaaaccaaactttttagaatttatttcactttgttcttgttttattattattatttttaaagaggcagggtctcactatgttacccaggctggtcctttaatttcttccatatggaagtccttttatttcttctataactaaatccatttggaagaggggggtgccactcatacctagtgtctcagtgaacagtgctaaaagggaattctgtgattaaagaatcatagagcttcttttccctgtgaaagcacaccctctaaggctgtgtctcagcatctccagatcttcacgctctggtgcctaataaaagatcatcgttatctctggagggaattctctcaggtagtgaaggtaggcagaaggtaagtttctagatacaaattatatttggcctcgtggagatactaggaactgtatatccaggaaatgcctattccctcctcttttccataactggcctcaggctcgccccattttaaccctctcattgacatccagagccgctacggtcaaagaggaggcggccacgaattgacctgaattcagtaataagcctatctagtcaaccacttcagagtcaggagttgtctatacagatagccaagtcttcctagaaatactgttaccaaagagagaatcaaatggaaaaaagacacagtctgtgatccagtcggtattaaagaataaaggaatacttgctggaattaacatttcgcaaacccaataagaagtccctaaaattaattttacctaaatcccagccccaaatttggaattgaatgctaatccaaaaagttatgttaaatctctacttccaaaataattttagaatgatgtggccatttccacaggcctaatatggcagcatctcccaagggccatcagaaccaagtggccttggaattgtgcagtgagacgaggacagccccttgagacatccagattagaatcagtcataaggtccaatctagtcttggctggccttggggattcggggttggggggtgggggtcacagggcatccacatctctggtagcataattcttgccaggtcaggtggtgtgtaaaaaattataggcatgcagggtcactggaaaatgttgagagccagaaagtttgggttatgatagttatgaacaagggaaagtatttacaataccccttttgccccaaaatagattttaaacactatacaagcacaatggaatgtgttcattcatttctaaccggattgtcttctactctcatgtttaggtcatagctatttctaggctttcatgtgacaagaccttcacagactaaattcagtggtgtcaccttctgaacaaagtggccacatgcgctgtggttttcccttgtttattttgtcttgttttgttttacacagccagtatcactagcctcctgatcaaggttagtagatagaattcaaccccgttcatttaaaagagtgataaatttatgccagcccatgatctcactcccctgagtagcagaatgtgtctgtggtgcgctgtgaagtcaaccttccggacacaagtgttctgtgtgaccctgaaactacacctgaaagacaggatgatgtcgtcataccaagcaagcattctgactgcaacttaaagtattaaggacaacatatatccagaggtgaaaagaaaatgaaaatggctgatttattgttttaattgaggaagagcctgtaatccaaataaactatgttgatggaaaagactcacccaaacgccaaggtgaaatttcctaatacttctgccaatttgttagcgaatagatgatgaggaagtctcaggtggattctacttgtacaaggccaaaaaagatcttattaccagggtggaggtcaatgattaacactgtgatatgaagtcatatttcttgtaaagcagctctttgcagtgtgccaggtttgagatagtgtgcacacaatgtgactactcaacaattaacgtgttttcctgtgagcgaaacttggtgaggagggtggcacatttctctttccgcaatgtgaattcttacacatatacacacattctctctctctctctctcacacacacacacacac

SEQ ID NO: 37901 - DNA, 2300 bp, Homo sapien
ttttcccattgagcttacaaaaagatgtaaatttggaaaactctaccacatatccattttgcaccaaaaatagtaacataaataaaacatttaaataagaaaactaaagtggggaggggagatttggggggtagggaagggaaagtgaaagtccatagcttgatattaaccaagatggtcaatggctcatttaaaaaggaaaaagtagcttatgcaaaatcttgccaacctgccttgaagtgtaaaggcttgtagaagttattgaaaattttgttttatttattccccttagcagaagaaaaatcaatgtctgcttggcaagtcagacgtaaatgagttatacaggccactgacatggtggaccaaactttataacaaccacatttgccgctgtcaggccacaggcttcagtggcgccagctgtaattatggctgatcacctctaattcagagctgcctgccttgataaaggtgtcactcggagctactgtggcatcagcatcaattgaggatgtcaagccaaagggcagcttgctggagaaagcacttccccaccccaacccccagggtcctggagacccttgggcaaatattgctttttaactcttcaccctgagtacggcaacactccctgaagctgtgatttaaattccaggggattcagatgaatatccctgacctccatcagtggacgtctttaataagctgagagatttctccaaaaacacagtttagaagtcaagatcctctgtgctttgcaacgtgcagagacaatgtttgtcttatctacctgattcattggccacaaaaggcattaggggcaatagactgtagcacaagccatggtcatttttggaaaaggaaaaaaaaattgcagcttcatgcctttcttctgcttttgtggtatttaaaaaaaattctagcgaacttcccattttcatgttacttttttctttttgaaggaaacatgaagtgtggggagaaatagcaaaacggagagatgatggggttaaaaagccctgctaatagagtagtgtctggactgttgtcattgtcgtggtggagccctgagtggggaggtgtgaagtgaggggtagaattcagccattaaaaaggcttcactgtcatttgtgaaggatcatgcttgactgcccccacctccccaggctgtttttcctcactctgtaattaaaaaagagacacacatactgtctgttctcctctttaaagtcacagacggccccacccacaccagcaccccctccagcgagttgagttgtgggggcacagcctgtctttcattttaagggagaacttgtcttccttccctctcctttggaaggttcacctgagggtggagtgctaatctcagaaaggcaagttttgtgttttgtggctggggtctttttcctttagcacctgacagggtgacccataggggccaagggagaagtgactgtgatttcacagcccttggtggctccagacacgggcacgtgtttggaccagaagtggttttgccctcgctgacagggaggtcagatgcgagaagtctccggagggctggtggttggcattcagcaacagaaaatcccatccagctccaggaaaaaagggccctgggcgatggaaaccctgtcacctggttctgaaccaaagcccaagctgctaactgaggttagtttttcacactcagaccttccaacctgccatctttcactccctgcttccccatctctacacgtgtcttgatgttatttccctttctccaaacacagggcactcttttttttttttttttttaaccagtattttttttttgtttccagcagaaccagctgacccctgcctgcagaactccgggtccctcttggagctctctgatggcagctgtagggccatccccagcggcactgtttccccctttgtttacccgtttctaagggcaagtgcaccacgaaggctctccgagcctggaactcagcctggggctgttttggttacattgaagtttttgcttcagttctgccagatttaagtggtgacttcactagcactgagctaaaaaggagaagggggaggagggcgagaccaggagaaagagagcaagtgagcgagagcccagccggagggagagccagagctaggcgcaaaagaagggccagcacattacatcatcgcttggcctggaatcaaatgggaaggatatgactcactcaagctagttaagctttggctcaaattctacacacactcattccagagctctcatgttctgcacctcaggagggaattcagcc

SEQ ID NO: 37902 - DNA, 2300 bp, Homo sapien
gatcatctcctgcttgcagaatattagggcccaaggtcattttaagtctcaaatagtctctttcaaaccaagagcagttttctcatctatctgcttccagtcaattctatgcatcagcaaaatgaccctccactgttcttttagagaaatgacctaatctttatttccttgctttcttacctccaagactctcaatgtctcaagttaacagtgctgtctgcttggtgggaaaactatccctttcggaggattttaacatgagtctttcaacccaacagaaaggttttcttggacaccacaccatccgtctgatttttgtcctgggtttatttgtgtctttattgctcaaatgttttctcagtactattaggaatcaagaagtggtccattgaccaattttgatcaggtcttgaatttctggaatgtattttctttgttttctacttgcaaaacagccatttctgtctcgagcttatctgcttctcctaacatcttgccacacatagtccatggcaacttcttttccctgaagcagtaggctcactactcctgcgacctcctacaccatggtttgctatattatggcaggccacagactgcatagtatggattacgatttttgcaaaatttgacattaatctcctccctgtccattacctaaccactgagacagtgccgcatatttcaagtttgagttttttttgacatggcagcatccctggattaggtgatctccaagatctcttcaaaccatagtgttctgtgattctaaaatgatgcatttggcttctcccacagtagaatcctgttgctcaaacaatattgttgaaagtgtgtgaattatacccatacagaaatcagtactcagagtaaatatcgatgtgtattttcctcctttgcttgctttaaaagagcagaaggagataaaagaggcagcagtgtaaaacacatgaaagcctaaaatgagataaatcacacatgctgttaccacctctggataaccactgctaaatttgatgtatgtgcttccagtgtttgttctaagcatggctatataaaggtatatacatatattttttaattaacatggaattaaattattcaccctataaaaagcagtagtataactttggttgttaagtcttccatatttttggtgtaatggtactgtgttgatccagtaaaagaagaaagacattcagggaaaaagctatctggtgtgagaaggcagggaggaacagaagctaaggaggattggggaggagtaatttctatggccaaagagggtgtggtgggcacaggcaagagtgattccacctttctgagtctctggcagccgtacaggaaggagttaatggcaagtgtcagcaaatgaccccaaacagaagcagggttgacagctaaagcctcaggtcttagcactaggaaggtcaggcttcagccactttcttcaagagtatttgaaattctcatcatcctgggctttgtaagagagacagtctagttagggcacgggatcatggtcacggtgggaaccggtggggctttaggaaaagcagggcccaggggctatttgtcttcacagccaaagttctcagaatgctgggtgaggaaggcagttgtgcctctccaggggcagtcaaggtagattaaggagactgactcagcagaaaaaaaattagaaaagatctttttgaatccttcctctaccaataatgagctatttgacaacttcgggcaagttacctgattgctatgattgttactttcttcatctgtaaaatagaaataataaaaatactgaggttgtggtgtgaaatcaagatggcgaacataactagcgtgcctgtgatggttaatactgagtgtcaacttgactggattgaaggatacaaagtattgatcctgggtgtgtctgtgaagctgttgccaaagaagattgacatttgagtcagtgggctgggaaaggcagacccacccttaatctgggtgggcacaatctaatcagctgccagcacagctagaatataagcaggcagaaaaatgtgaaaagagagattggcctattctcccagcctacgtctttctcctgtggtggatgcttcctgcccttgaacatcggacttcaagttcttcagcgttgggactcagactggctctccttgctcttcagcctgcagacagcctattgtgggaccttgtgatcgtgtgagttaatactcaataaactcatatattgcattctaatgtggtgaagaatggttcttaggaacagtgaatgactgtgaatttattcactc

SEQ ID NO: 37903 - DNA, 2300 bp, Homo sapien
gtgtccccaggcttctcctccttgagcgtctgctcaccttcctctaggtaataccactcacccctcaaactcagcacaggtttcccctcttctagacgccttcctcacactctcaggccaggtgctgctcctcaggactatcacagctccacccctcagcgctcatctcctggaattatcattgactcacctccctgcaaagccaaggtccctgctcacccacgaagtcaccactgactaccctgccaacgatctcatctttctctaaattcagaacttccctctatcacttgactatattaattgctaaatggggcaattactgtgaaacatagaattattaaaaatcatttgtcaccctgtgtggtgtggctcatacctgtaatcctagcactttgggaggccaaggtgggaggatcgcttgagaccaggagttcgatgccagcctggcaacatggcaaaactccccctttataaaaaatacaaaaattagctggtcattgtgacaagggcctgttagtcccagctattagggaagctgaggtgggcagatcacttgagccctggaggtcatggctgcattgaacggagattatgccactgcactccagcctgggcaacagagtgagatcccacctcaaaaaaaataatttttgtttttgtggtgttctctattactgccttatattattatctaacctttcaatgcattcattgcccttcccactagattgtcattgtcttcaggtgaggatctgtatctttcctttaattttccacattgttgcagagtacgtcctcaaaacttacgttttctcaacaccttggataggggaagggcccttattttttagcaagatggtttatataaagaaacaataattaataattaacaactcctccttgtgtattctcattctcagcaggggctgatcccaaaggagccgttgattaaatgctccattccctagagataataaataataatgcttccccaactgagccaggcctgaacatttttgggcctaaagactttgaagatcactgcaagtccaggcgtaaagcaggagggccctgcaaggaacgtttaccttaggatctgtgaaggttattatgtatgtgcacacgagcagagcctaccccaggggctctattactgtaggagagttaatgcgactgaatcaccaaaatgtggcagagacactttcatgttggcagaaccagttctgtgatttcttcatgttctagcccacagcaggatggagtaaatactcccttcagacacctaaaagggggtggtgcctctcctcagctactagtccaacgacgtcaaaacccaagcagcaactgtcagactgggttcacctacccccttctgatggccttctgcaggcaaccttgtgctcccccaaacttcctgtagaatgctggcggactccgtgctgcccaaacttcccgcagggtggcacctggaagagcaagtgacttaacaacgaggaaggccaggcgcgctcccactgctcagaagcggctggtgtactcgtctaaaataaaaaggtctctgtctgcaaatcccgtttgctagcccggtaatcctcccccgcccccggcctagcgtgtccggcccgtacagctgtttttaatccctacttttctcacttggcatcccgggcccgggctgaccagacgcggagccacttagtgtttcctcctccccctgccggggtctgtcctccctctgccgtctcctctttctccgcctgcgtccccgcgggcagagtgtgggaagaacgaatttccgccccgtttgctctccgctcgcagacttgggtcccttccggacgcagcccgcgtgctccccgagctattgcactggagccgccctccccgtccgggaccgcgagcgagaaggtgccgtctgcgggggccgagcagccggggctctgctgccaagccgcgccccgcgaagctcttggaacggctcccgcctgcagctggggaatccactcggctgggagaatccgcgccagggaatccagctctccggactcagctgcaaacaaaaagcgccgggtcttgctccctcctcccgcccgccgacgcgcacccggagaaacagttttatacagaaatgcaacaagtagtacccggggtctgcagagcgccccgcgccgcctgacttggccgggcgaagcccgcctgcagagacccgggccggcctccggacaaaggacggaggaggggctggacggcgctgcgaagtccgaaagaggccatttagcgactctggccaggctaag

SEQ ID NO: 37904 - DNA, 2300 bp, Homo sapien
tatctgatttatataatcagaaaatctctaggtctagtgaatagaaacctgagctgttcaatggagagtcattgcctctcatctacattccagacctgagtcagttctaaaacacagaaatccttagattgccgattttcaaaccgtggccaagaagttgcagcaacagcatcacctgggactttgttagaaatgcacattatcagaccctgccccaaacccactgacacaagaactcaggaggtgggtcctagcaatcttcacttcagctgattctgatgcatgctaaggcttgagaactctaaagtttagatgaaggagaggattgggaagtttgaggaaggcccctataacattgctataagtatctagcataaatcttcctttcagtcttccccaaaagacatgcagccattcactagggtaactgtgtactgaggaagggggcatatccaggcttttggtagatttctggacattggttctgagtctatgctaatctctagagacccaaaatgcctctgacccattggaggggggtatcacttattggtaatcaggtagtaaatgaaatttggacctgtggctgcttcattggattccagtgggtctcttcacctgcgatgtggttatcttcccattcctgaatggagctgtcatctcagaaacaaaaagagcccatctccatatggattttctgtcttgtgtggtgagtattagtatggtaggcagggccaagtgaaagcttcttgggatttccccttcctatgtaagagtaaactgaaagcaataccttatccctggggaaatgacagcgattagtacttctatctaacatttgaacagtacaagagttgttctactgtgtcctcatttagctcctctgtctggcatgtacagaaggaagatggttattggagaatgactgtgaattcttacaacattaacaagttactagaccagatgtagtctcttttattggataacacagcagagctcttggcacttggtatgcagctacgaatctggtggatgctttttccccccgataccaaattagcaaatatcaccagaagaagcttgctctcaagcagctggaggaatggcaaaacacctccctatcttacctcaggcctgcgttacctctcctgctctctgacgagaactagtctgcaggagcctggaccatcttggtatcctgcagaacatcctgctgatgtgtaattgacatgatgagcagcaaggagcaaatatcgtacatgccttaataagacaaatgtatgccagggggtgggagatgatccccaagaaaaatcaaacgcctattgctttggtgaagattctaggggtccagtgtggtctggagaatattggcatttcctctccaaagtgaaagacaaattactgtactttgtaccacctatcacgaagaagagctataatattctgtgggtctttttatttttgaggtaacataaacacttttagagtctattgttcagagcaatgttgtgagttacctactacgctgcaagttttgtctagggaccagtgcaaaaaagggctcaagagagagcagggtttctcagtcttggcactattgacatttacgggacaggcaattctttgctgtggggcgggcctgtgcattgcaggatgtttaatagcatgcctggcctccacctaccagatgttagtagcatcactccccatagttttgagaactgaaaatgtctgcagacattgccaaatattttctggggtgcaaaatcacccccatttgagaaccattgggctacagcatgtctagttaagctttaaggtgagaatcattgggctacagcaggtctagttaagctttaaggtgactacagtactggctgacaactggactgcagcctcgtgagagaccctcagccagattctcccaactgtgctgttcccagattcctgaccctcagaaacaatgtaagatgataaatgcatgttgtgaagttttggggtaatttattactcaggaaactcagacaactaatacaccagtcctctgagccataaggttaggcatgcatggcagaaatccatcatcaggtgtaagtagtaaaatagtatataccaggttcggtttgagcaggtccttcaggcacaagtaagtttcaagagcaagtggctgtgacttccatagcatctattcttgctgcaattttaattcaccatcagtccacatctgtgacctcttaggattgactgttgacagactaagaaaacatttgggcctggttcgcagatggtcccttgca

SEQ ID NO: 37905 - DNA, 2300 bp, Homo sapien
ggacctttccctatgggcactatcacatatgaattctcattagagggcatccactgatgaggccctcagcagtccactgacaggatagcctgttctgtggatgtcagtcagtccatttccagcaaccccgaggcttgcttaataggctcatgaagagcatggccattgtggcagggagagaagccagacatgagttcaacaatgtggacttcccctcatcaaactggtctggctcctgtcactgataaatgactaacttgctgacaggggctctaccatctctgagtctctgatgtggagtcattccccagggggaccagtcagccatcagattattgcatggaacttctattatgaaggacatgattttgtcctctagaatagacactatttattttttctttctttctttttaaatagagacagggtctcactctgtcacccaggctggagtgcagtggtgcaatcatagctcactataaccttgaactcctgggctcaagtgatcctcctgccacagcctcccaagtagctaggactacaggcactcaccaccatgcccagctcttttttaaaaaaaatttttttgttcagacagggtctcgctatgttgcccaggctgggacactatttctaaatatgctgtgcattcactgcctgcagtgggtttatcagtaccaccatctgtgaacttaacacagagccttatttaatagcatgatgattatgaccaaagaagttctttgcttgtgaccaaagaactaattttacagcaaaagtagtacagcattggtatcatgcccatgggacttattggattaccatgtactccagcacccaaaggtagttatcattacaaaatttagaaatagataactgaagtttcaaaaatggtaccatctggaagataactgcctgcagtctaggtggctttcttactgcacgtagattatgctttgaatcagcaaatgagtgatgctatgtctctcatagtcaggatacacagacctgggagtcaaggggtaaaaatgagagtggctactctcactatcacatcctgaatatcactcacagaatatttgccctccttctacaaaacatagatcagctggtttaaaggtcttgattcctaggagagaacgcttcctctaggggaaacaataacgttccactgaactggaattcgatacttctgtctgcccatttcaagtttcttctgccactaaatggacaggcaaagaagagggttacttttctggctggggtgactgaacagaattattaccagggagtaattgggttgccgtgacacacaatggtggcagagaggactatgtctgaagccctggaaattctcctgggtgcctcttagcacttccatgtccaagagtaaaagtttctggaataatattgcaacctgcaggacagctaaagacttagacccttcaaaaatgaaggtttcaataatcttgccaagaaaagaaccccagacaactaacttcagttgctggctgaaggtaaaaggaagatggaatggacgttggaagaagttcattctcaattattatttaactattatcatcatcagtcaactagttttgttaccagtcaccaaaacaaaacccgtagcagctatgcacattttcttctttgtttactctgcataacactgagtgttggtggttaattttacaacttagcctttaggttgtagaacatccattataaaaggtgcaatggtgtctgaaaggaaaaaatttaacatcaccctgggatgaatacagtggctgaggccactatcttacagggttttactctgaattatctgttttagggagagagtgaacttgtgttcatctgtgtgaggaataaaattgcattctgtgaggaagaagtgtgatgttgctgtagggtgcgtacaatggaatgtgtggatgctgagtagcaaaagggtggatgtgctggattgtgtctcttgactcttaagtccaagtccacccttctggataatcctccatcctctttcccagactcactcatccagctggtttcatgggaggcgctggtgctaggttccagtgtgggaggaggagattagccattttccccagctggcctggactgcctgtgctctgggctccagcaatccggggatagtttcagcaagatcaacactgagtatccctgacaggattcagccaagggccagtggcagcttcccagcctctttgggtaagagccccttctttttttgctcctcagtccttccagtagtttttaaccaatttcctgtgttccat

SEQ ID NO: 37906 - DNA, 2300 bp, Homo sapien
aataacttcttaagtcgaaatgctacaaacttacaaaactcatttgaacgtttacttcttttgactctgttttaattattttaataaatgtaattttctcttctggttaatgtatgccatatttcactcaggggaactgaaacaaaaattaaagttaaaacgtgttattcaacattcacagagataaatagtgttaaattaactttcaaatggtgttcttataagttgcagcatttatagccttgaggttactaaaactgcaggaagacttttgggacaccctgtttttgaataaatatgcttacagcatggctcctcctgtgtttactgtaaaattcagtttagtttttaagtggttccacgtgggcacaggtattctttggccagtagttgtccttatacttagacccaaggagcccttgtccagggcccacactttagaaggcaaattccaaattccctccccaaatggcactgagcctgcttcaagggtctgcacgccagcagcagtgttatctgctaatgtctgtactcccatgggcgaacattgctgactctggtgttcatactcttgtgcccaagaggtggctgggggacagctgcttctgggaagcttgaccgagcttccaccaatggactagagccctgtgggaagagaggaggtggctgcaaaccaggaactggaaatcgcctctccctgcaccatcatatttaagtgcagatcatccaaagtttcaatctggcctttcatgtcaattcccaaggtatatttgtctaggtaggaaggtagaacttattgtacttaatcatttgttaactttgtttataacttttaaatatttaggtatctggcctacagatctctgtttgtacttttgccctgggtcctgcatatattaaaggtgggctgattttggccttaaaagaattattttcccacaaacagatttttctccttaaagagctaggtgggtaggaagtacttccatatggaaggtatgatagcaaagaatgactgcagtcactgagcacatactttgtgctgggtgatttacacatagtttttcagtgagtcctcacaacaacccaataaagtaggtacttaggagaaaacagatattcagtgacattagtttgttccagctcgtaaaactagtgctttagttagccttagttgcataacaaactacgcgaaactgaaagtggcttaaaacaatttttccccctgactgtcgggttggctgggctgctctactgcgggtttccctgggctcactcctgcagctagctgtgaggagatggaggttggcccgggacagtgcagaagattccccgtggcctctcccacctgtctggcagttgacgctgctgttgctgataatgatgaccctcctttattttgtgttatctacttgccattgcaacctccttgccttttttagttcttgctcccgtactgtctggctcgatgcccagcacctggtggtggctaataatatacactcaggtcacttacaagcaatgtgaccctggatgggttacttaacctcacttagtttgtgtcccccaattgcaaaatgggtataatggtacagaacacatcaggtggctctgagactccagcgcagtgattcaggagagtgcttggcaggacagtggcacttggtgcgagcttactgctagtgcagctggaatgtagaccatcagcgaacgtgtgttgcctttttaaacagtgggaatcaaacaccactcgctttccaaatgtaaatcctgggcttgcaagtaagtcctagagtgcagaaataatttcaaaatacagggttgaaattttaagatagcagcttttaaaaactgggagacaaaatcaaaataaaacaaagggacaaaccaacctgaatggcaccccgccgatgctcttcattaatttttaagattccaccctggggctgcttgcttcttccagcatgggaagcgctgacttgatgcggccaggtttctgggaccaggaggttgggacacgacgacgcactttttgccctgtgggtctgggtcatgtgagcctagaggagcgcttaaaggctcgagttctgcagggtcctcgtgactgggtggggctgcctcacttctgcctgatttgggaagcgctgcaaggacaaccggctggggtccttgcgcgccgcggctcagggaggagcaccgactgcgccgcgtaagtgccgcctgccctgcgtgggtcgtgccagctcagcgggacaggtcctcgcctcggtccctcggacttagggagcgcggggcaggta

SEQ ID NO: 37907 - DNA, 2300 bp, Homo sapien
agcaacttacaatcactttggaacacaaacttcatgccaggtacactgtagctttccacatagcatcttatttaatcttcacagcatcctgtgttatcagatttttgtggcaggtgtagaaactgaggctcagtaggtctaagtaatttgctcaagttcgcagctaagtgacagaaccagagtttgaacccagttgtcttcgaagcccagatggtaaaattctaccgggcgacatagccaagtcagatagtccaccatctaaagatctggggggctacatagattactagtcaaacaagtaagtgctgttttctatcagaagaactctggggaaacagtaagttccttctgatctgatcaacaagccaagtgtgtgatgggtcacgtgtccctgaaggctccagattaggaactgcatcatttcgtgcagtccacaaaatgaaggatagtggtaggggctgggaaaatgcgggcgcttgggtctccttagaccagccagggctgtttcaaggtccatacagttgaggggtaggaagacgcagtcccacgtgactgaagagtgctcacactcctttaacagtttagcaaggtgtatttttaaaaaatggaccttaatgagaagacacactgggatagtatcctggagggatttttttttttaagttctaatcaactagaaaatgtgacgtgggtgcgtactgtgattatttaacattcattattcactgtatgttaggtccttggttgatgtggatccccagggcctagctgctgttctgtgtcactcctgataatttttaaattgactatgttcttttaaccatgttttaaaaagttgaactaccccaatgtgaacactttccatttttgctatataatgagagtactttcattcctttaatgtttgctttttcctttgatctaacaatttctcttcaaatttcacagttttctgttgctttaggattgaaagaaccgattagcccgctgggagcgtgaaacagacttaaaaaaaatctgcatggtatttcctcccagtgaaattaatttaggtttaaatacagggggaagggacacaccttgtgctcgagtctctttctctcacacacctgagcagttcctatcctgaaagggcacagtcggacctgctgccaagtcttaagtcttttgtgagaatctttttttgcaaggcacggagaacctctttctctttgacaccagctttgtgtgggcctgatgacacgtttggacggctctatttctttgaaggccaacctcagaggcccacggacgcgtcgggcactgtccgtggctgggttacttaagtgtagctgggttggcttcccgggtgttttaggaaacgcaccttcttgcagggcagggaccgtcagctccagagcaacaaaggacaatttggagaggagtggaaggagcgctccatagtggctctgtcatcccaggttcccttctgcctagcaccgtggccctagtgatcccgccttcgccctctggatcccccacccccactgtctcgctgctcgagagcccggcggggcgcggtgagccccaccaccttcccccacaccctccctccccatccccttcaaatcctaggagcagcgctgcgcgcagcagccgcgctcgccccgcgcccggccccggcctccccagcaccccggggacccggtcccccgtcccgcctccccctgtccagcagtccgcagcctccccctccagccccagtggcgggagctgtcaagcccgcagcagccgaaccaccccccgagcgaccgcgtctcctcttcttcctttgtgtgtgcgcgagcggagttggggcggagggagaagggggaggtcgctctgtctgtccgtctcccgccgcctctgcccggtctactcgaagtgcggcgggagaggcgggagcccaggagagggtgcgggagctggcggggcggctcggagctgccaggacgccctggtcccagccgcgcacaggggagcgtggacggcagaggggctcggcgggagccgagatccgcccgtcccggctgcccctcggcctccctctgctcccacctaccccctgacacccatagaaaagcgtgcaaaggcgcggagcgggacggaaaccacaaataaatagcggcggcggcagcgcgtcatctggtggagcaggaagtgcaggcagagtccggaggctggtgctttctgcgcgtccccaggactttgccatgggctgggggccgcggaggctgcgagcggccgggcgagggcagcggcggcggcgtccgcaccggggc

SEQ ID NO: 37908 - DNA, 2300 bp, Homo sapien
actccaagatacccagctggtcggtgatgaagccagaattaaaagacaatactcccagaacttcagagctagagggaatcctacaattatctttcccccttagccttcttgaagctgaggtttataacttactgcctggcacatagtaggcccttgaaaatagtgattaatacattgacggagtgccctaatttctcagattctggccttcccctgagagagcccagctgccaccacaaatagactctattctttctgcccaacacctctcacaggtgtgaattgcttgtgtcatctgaattattcatgatccacacaatggtaagtgtgctttaaaagagaactacaatgctgtatttttcaagacaaagtgcctgattaattggggaattaggcagtataaactcatgggctaggctgattcatgccaaacaatacatccatgcccactttttgaatttcagttttcacataatttcccattttcccttaggattaaaaataggggtaaataaagcaggaaaaagaactatcatgggcatctctaacctatctgaaagcaattaccatcatctaaatctcatactgtgttgtttcaaaccaacgtattcttccgaaggctgacttaggattttcaatcaggtttcttaagctacatcaagatctggaaattcagatgccacagcagctgtaattcatgccaccagtaaatcatgtgacaccaccagctccttgtcctttctcctttcgtcttttcttttgccccaccagttcattttctagtgggcagttttctgagagggataaccatatgctaatagaaagccaacaccactgtattttaaattcaatgttagtcaaccaaaatgaattgaaaaacagcagcagtggtttgagggtactaaaaataaactgtagcatttgctgagttctcagaattaaaaccacggcggtcaacttgttgctgctcttaataagatatgacttctgccccattggctgccactactagaaacttgaactatatcacacacctaacaacaacgtgttttcaattagttggcagtgatcgagaaaggaagtgccatttcccaggaagtaaatctgccaagaaagataacagatggctttcaagtgatcaccttgtgccacatcacaattgcaccttagtcaaattcaccttgcatttatgatttagtgagttacacatctaaagctgtggttgcctttttgccctgcttgctatccaatgcctccaaaaaggtgtttcttcctttgagtttaattcgcgaataataataaaaacagcccaatgggacttaatacaatattaatatattgaagcacttccattaggacttcatgaccttcttgacccttaaatactgtatactaccctaaatgtcttatcagctatccctttgggtttgtcattaaagttttcaatgaccagagaggtacaggaattctacctaatgcatcattctgattagaaacctgtcatactcagaaaccagtgggtctgcctctattgattcctactccttcagattcattagcaatttttttctcttcaattagacccgatgatcaaccatagaaaagctgaaagaagccttccctttgctcaaccattcttaaaaggaaaaaaaatgcatgccttgctagtgaaattacagccactattatcagaaaatctctaaggagtctctctctctctctctctcacacacacacacacacacactctctctctctctctctctctctctctctctctcgtaaatgtgccaagagtcagaggatgggctcgacctctcttcccctaacccacttcaatcaggatcagaaagatacatcccttcattgctgctgtctaaaacccatgcccaagcgagtgtctccatagagctaatttctgaaacaaacaaagaaaatcaagtctgcgaggagcgagggtttgctcccctctgctccggatttgggtgtccagggtagcgggcgcggcacggcaaacaggtcggggcgctctgcttcaccccaaccttctccgccccgccagcccccgctccagctgcgccagaaagtgcgagcctgcccgctcctttcgcttttcgctcgctgcactccaagccccggaacacccgcgtccgcacactaagggcaccaccgctctcccacctctgcgctgtcagatgtcaggcgcggaggtgctctgggcaccgaggtgctggcgaaccaaacaagtatcaccccggacgcctgcccccattccgagagagcgggcgggatggccacag

SEQ ID NO: 37909 - DNA, 2300 bp, Homo sapien
accttcctaattgccacagctgcatttcagaaccttcctcgcagcaccctgggaatttgaccagcacctctggaatgcctgcctgggggcactggcctccgctcctctctaccccatgcccctactgtctaatctatgttgtagtatggctttttttcctcagtatgcttatttgttttttccttgaagatagcacaattaatttaaaaaaatagaagaaaatgaaaacctaccatatacacttttgcatgtgaattctaaaaggagctgtttattatgcattttctttttgcagaaaagttttgtcaaataactttttaattctcatcttcttacccccaattcatgtaaaacatatgagagtcttgagactaaagaagtgttttcttaactaccaaaaggaacatcttttattagatggtaattagcctaaaaccttcagattctgtgtttccctttatttttttaaaaaatgaagggtgtttttttcttccacttaaaaagtaatacatgcttcattcaggaaacgcacatacacatttattcctagaaggaatcacaagaaactattgacaatggatacctttagggagagaggaattttgcatttttagttcttttataccttcaacttttgaaattggaattttctgctgtgcacaggtattacttctgtttctaaaaataaattatggctgggcacagtggctcacgcctgtagtcccagcactttgggaggccagggaaggcagatcacttgtgctcaggagattaagaccagcctgagcaacatgggaagacctcatctctacaagaaatacaaatattacctaggcatggtggcacatgcctatggtcccagctactcaggaccacaggtgggaggtgggaggatcacttgagcccagaaggtcaactgaaccattgcactccagcctgggcaacagagtgagaccttgtacaaaaaaaaattaataaattaataccaattaacttggaaaattagaaaataaaggaaaatagaagagggaaaatacccatagttctaccatgaaagagaatcattgctaaccttttctcttcatctctttctggtctttgtgcatgcttgcttttttcttaccaagttgcagtcatacaaatatattagatattataggttggagatatttggacttttaaaaatgatgcataaaggggatgacaagccacagactggtcttcaggtgcacaaaattgtcattttcttcttttgaatgattgaatttaatttagttattgacactgtttgacgctgtcaatcacttaaacttgccaattcaagtgaattaaaacttaagttctaggtgactatagttaaaacaatttattatatattccaaaatagctaagagaggctttcgaatgttcctaacataaacaataaatgcttgaggtgacaggcatcctgattaccctgatttgatcattatacattgtacttatgtatcaaaatatcacatgttctccataaatatgtacaataattatatatcaattaaaaataaaaatagaaaaagtatgcatactcaaaatcaagaattaaaaaagaaacataagacttagctgcttttgactgggcacagtggctcacacctgtaatcccagcactttgggagaccgaggcgggttgatcgcctgagttcaggagttcgagaccactccgggcaacatggtgagacccgcccccactccccgcatctctactgaaatacaaaaaatttgccgggcatggtggggtgtgcctgtagtcccagctactcgagaggctgaggcaggagcattgcttgagcctgggaggcggaggttgcagtgagcgagctgagatcgcgccattgcactccagcttaggctacagagtgagactctctccaaaaaaaaaaaaaaaaaaaaaaaaaatctagctgcttttgggttaactgccttgtttagagactaccccttttcctgtcccttctcctggagtgacctggggcaggtccctctgcgtgccctgtcctgctattgttactctggcccacgggctgtgtcttcgacatcccagcttttgtcttttctacttatgtgttggaatattggcaatgctgtctgcccctcccactctcctgctgcatgtccctccccccacacccacccccacactcactgccaacccacccgccaacccatccgcaaggctgcccccagggctctttgcccaggccatctgtcccatcctctccaacctggctcaggctgcacaggaggctcctccgcaaagt

SEQ ID NO: 37910 - DNA, 2300 bp, Homo sapien
acctgtagactaaggatgggaagccctgcaaaggtatgccaagccttcacttaacgcctgccataacagttgtccttcagaatgggacagtgggaagaagggccaaggggcctggtgaagcccattaagagagtagacccctggagggaaccttgtctttggaagctgaggcagtggatgggtggtcacaggagggactggagaccccgcaccatgcagtcctctttgcacaccttcttccacaaccctggcttcctatatgtacatgtgctttctagcaacttatatttattcagtgtctactgtggcaaggactcttattagacacttttgtagggggaaacaaaagcaaattaagcatagagcatgtcacagtgagttctcagtgtggcagggataagagctgttatagtcactataatacaagacagaaagtgacaagtgcaatcagaaaaatgtggataaaacactatgggatttcagaggacacagttggccttcagtggggagtctggggaagtccttttggaaagggtagcattagaatcagaatgtaaatgttggtgaaaatgtagatatgttgaaaggatgctagaatattctaaagaacagagcaagctaccaaggttagcagttaagtatgtcacagaagagatgttgtaggatttgtggaggggagtgtagggaaataggatgagctgggtacattaggatcagctcatgaaaaaccagcaatgccaggacacagttaagctatggagaagcatgggtggattaggaagattgttgtagagcgatgtgtaaggtggactggagagataacaagggtctgagttatgtggggaaagaaaggtagggagaggccagactcaaccagtatctgagataaagcatttgtcaggactgatggcaggatgaggcagcacatgggtgtaccgaggcagcaggacacagtgttgaggagcatgggcgctggacacagatgctttgtgttctagccctggttctgccacttaaactaggctgcatgtccttgggcaaattgctttacctctcagtgccttgctctcttcatccaaaagaatcgggaataaaaatcttgctcctcacacccatatgctgcagattaaatgagttaagtgcctttgacacattctaacgtcctctgacacagcgtaaattattgtgctcaatagcttaacgtaaaaattgggtgttattattgaaggtcatgagaggatgaaatgggaggatgaacttttgaaccaagttaaaatcatggtgtttaccaggaataaagaattacacatgggaaggagtgatctttggttactcttcacaaggctgcttggagggactgcagcatggggcccttgtttgagtagaggacaggactgcccatctacataaaggcccagttatctagatcttgttttctagttcctaaagcattaattttactgtctggcattagctgcattaatcttcaccaatgagtcaggagtactcccaagacatcaggatttccctgcttcttttcatggggagacctaggatcaaagaattagggtcatgggagaccatcaaacagatgatgcttttaagaggaaggaggccattttcataggcttgggcactaacagaatgaacactgaagatgttttatttaaaagaaaagcaattatgatgttttgattttaggtaaggaatattgtcttgtctgtgtgggtttgagcagagtttgttcgtgcaggaaggacaggagagaccggggagtgtcctgaggcaagacatcctgcctcttattctgcaactttgcagaactcagagtggaaaagctttgctctcctctgatatcccatttggtgctcagactgttccaatgtaatgcatgcataagaataaaaattaagctttcaagtgctaaggcagatttttaataaagagacataggctttacccctataagattaaacagtcatcagggtttaaaggtttaatctgttggagctcagcccaggatggggttcagagccccagattaattggatgcagcctcagactttgaacgtcagagctggctggggggtgtgtgcgctggtgtgtttgagtgtgaaatgtgctaataaggaggagagacctctcctttgcaatgtgctgcggcaggagaaagcaggctgccggcccctgcctccctgaatcctcagtggctgactggataccgcttctgggggttgctgtgcacatgaatgtttgctattgttccaggcgcacgtcggccttaagaaatagcacaaaac

SEQ ID NO: 37911 - DNA, 2300 bp, Homo sapien
tttcagcagttagtagaggtttgcttattagtaaaatgttgaccattttgttaaaatcacacttgaggagccagttggcagaacttattttcttttcctgaattttttattttcacccatatgctcaaccaacaacgtaaaaacccacctccatagctccctagtggtgatgactcctcagataaaggcattcttccatgattcaatttcatctgtaaagtaatggcactatgatgaattatcccattctcccctcaaagttggtggcctgcctttgttcaatcctgcttctgtgattgaaagtttatgctctaaaagtaatcccgagaaatatataaaaatgcatgacttccaaataccctgtgctgtgcatatcatagaaattcaaagaatcccaaactaaaaagtaaatcatatattcatatttttatctttcacaaattgaaatactctctaaaaattttttctactaattctatattgcaaattatttgagttaggcagtatgtctttcactactttttttttttttttttttttttacagacagagtctcactctgtcacccaggctggagtgcagtggccggatctcagctcactgccacctccacctcccaggttcaaatgattcttgtgcctcagcctccccaatagctgggaatacaggcgtgcaccactacacccaccttgttttttattattatttttaagtagagacaaggttttgtcatgttggccaggctggtctcaaactcctggtctcatgtgatccacccgcctcggcctccaaagcgctagggttacaggcttgagccatcttgcccggctgtctttcactgcttttatactgcaaacagttttcacaacagagatgctcagttgctccacacccagtccttcaggggagttatgcttgcatatgagctcaaggaacatcaaaatcgttttttgaaacaagagcatcctggaagatgaagcaagctgcacctctgccttcattagtgaaaatgccctgtgccaatatctttatgtcaaatgaataaaaagtactcttggccgggcgctgtggctcacgcctgtaatcccagcactttgggagggaggccgagacgggcgtatcacgaggtcaggagatcgagactatcctggctaacacggggaaccccgtctctactgaaaatacaaaaaattagccgggcgcagtggcgggcgcctgtagtcccagctactcgggaggctgaggcaggagaatggcgtgaacccgggaggcggagcttgccgtgagccgagatcgcgccactgcagtccagcctcggcgactgagcgagactccgtctcaaaaaaaaaaaaaaaaaaaaagtactcttatgtgaccaggagtgcaatccccggttcacttcctgcagtggctcagggctggatttacactgccctcgttgggtggctgtccatggacttccaggcctgaaagaaggaaattcacatcctcactgagtcgtgttaagagtctcagactggcaggttgtggtggttaagaccgtagaagctagagtcaggccccctgggttccaaccctgctctgccacgtaccagacaggcaaacctgagcaaccattttcccgtgctagggtttcctcgcctgtcgagtgagaataataataataacaatacctacctcctagggttgctgtgagaaataaatgacaatccacagaaagcgcctgcaacggcgcctggctggcaaacagcggacttgttaattacagcctttcaactaagggcgcctgaaactcgcaaacattttgctcgggtgtggattcgctcccgttagttacaaacttgggatcccgggacccggaaagcaagggggaaaaataaatcgcgatggggccaagggacagctgctgcggcaacttttacccagcggagcccacctacagcctcagcctccgggtctcaggtctccgccgtttcttctcaaggagtcggtcgggggagcggcactgcacagcttttctccaatcagacacctcaaggctggcgcctgatccaatctcctcccctggagggtgggaacgcgaagttcctacctgcacctgtggcagcggtgaccgcctcctgggttattttcttttctcccccagctgccccagggttctggtttcccgaatcacttggcaaataaccagcaggtgggcagatgtcttttttgcgttcctacggacgcgtaggcaagttcgatgcgccggagtgaacagccagggtcccatctctcagccggctcccgggcggtgctag

SEQ ID NO: 37912 - DNA, 2300 bp, Homo sapien
gcacctgggaggagggcgctgggaaccaagtgcatcctctctacaggtgaacggtattaattagtccatggtcaaacagtcacgaaatttccctccaagatttgcccccatcgactttcgtcccaggagccttttcgatgagatacttaggagaatttatatcccagtaggagagaaggacaagcttatgatatttgttttggttcttttaaattctacttttgaccacttctgccttgtgactttcaaagaagcatgtctagacttaacttcccttgaaaaccgccatcctaattcttccttttactccccagagcccaatcttgcgtctgtttgaagtcacccccggctgacggttgagatgaagccaagtatcaaatggcctcttcccttagttttgtattaaaatatgcaccgagtctgtacgacgcaactcaactctggagaatttcagttacaaagtaaaggcttctcttcttttccttgtgcaattccctcctcccaaggagaaagaacgcaacaaggaactccgaaacaatgtgcttcttccccaagcttctaagaccccccctctgcagagcgaaaggccgcttctgagcacttaggtgcgggtacagcaagcgagactcccagcccactttctgtgcggggtctcttgggcgctgccaccagcaacggcaggattcgcctgcgccgcggctcacttccaggtttccgctcggctccttcccagcccacgcgccgggcgctcctgggattggcgatcgcgctggagagggaaacttcggcggtgtttgttgtaggaggttctcctcccggaaccgccagggagaggaagtctgatcgcctacgggaggcggcggggcggcctcggctgcgccccgaaaccgcaacaccggctcctccccaggatgccctgaggacacactcgggcagcgacttgaaaacaatacaagaaaaaacggccaaaagttctttcggtacaaaaggcacccacgccctcaggcacaattagcaactgcgtctgcaaacatcccattccctcctactttgcagatcggaaaagcaacccgtacccccaagtcatttactaacagtggtggtaaggtgtcctgatgctgcttcctctcctctaacctacattttcttcttcacaatcatcaactttgtgagcacggaagggctttgtacgaattgcgcaaggaaaagatggcaaattactcaaaagtacagaaaacggagtcctggagcgtccgtggttttcagcctctcttagggctccgggaggcgggtacctgggaggtaccaggcagcaccccagggtgacccccggggccaggctctgtctcggcggacgccgaaccacccccagtcgctcacctgctcgggcttaacaggacccggaggcctcgcgcggtgaacgcggccgagagcacgaagggggcgcgctcgggtcaacctggaagccggggctcgagtccctgggcgcggacttggagagatcaggcttctggaaagtgtacaggtcggaattcccgcagcccagctaaatcaagtgctgctgctggtctcctctggcacctccaattgctgcgcgctgcggcggaagcccggggctcgcagcgcagtctgttctggtcggagggggcggcggcgaggggccgccagactcgctgcccgggtggaaggtccagggcggctttccgggctagtagtgtttcattcgccggcgcgtccctcttccctgctagcaccgcccgggagccggctgagagatgggaccctggctgttcactccggcgcatcgaacttgcctacgcgtccgtaggaacgcaaaaaagacatctgcccacctgctggttatttgccaagtgattcgggaaaccagaaccctggggcagctgggggagaaaagaaaataacccaggaggcggtcaccgctgccacaggtgcaggtaggaacttcgcgttcccaccctccaggggaggagattggatcaggcgccagccttgaggtgtctgattggagaaaagctgtgcagtgccgctcccccgaccgactccttgagaagaaacggcggagacctgagacccggaggctgaggctgtaggtgggctccgctgggtaaaagttgccgcagcagctgtcccttggccccatcgcgatttatttttcccccttgctttccgggtcccgggatcccaagtttgtaactaacgggagcgaatccacacccgagcaaaatgtttgcgagtttcaggcgcccttagttgaaaggctgtaattaacaagtccgctg

SEQ ID NO: 37913 - DNA, 2300 bp, Homo sapien
taaagatggcattaactgaggcccctgctcttgccctcccaaatatctcaaaaccatttcacctttttgttcatgagagccagggatttgctaaaggggtacttactcagactttgggaccatggtgatgcccagtggcctatatatgtctgaaagactggaccctgtggcctctgggtggccaagttgtctatgagccctaggggcaacagcaagcctggtccaggaggctgataaacttactctgggcctgaatttaacacttacagctcctcatgccatagagaatttgctacgaagtgcttctggcaaatggatgttgcgtgctcgcatcctacaatatcagagtttactgttagatcagtcttgtttaactttctctcccacaaggtgtttaaatccagctaccttgctccctgatccagaccttaccacacctgtccatgactgccaagaactgttagagactacagaaactggctgacctgatctccaagatgtgcctctaaaggaggcagatgccactgtgtttacagacagtagcagtttccttgaacagggagtatgaaaggctggtgcagccgttactatggagacagatataccgcaggcccaggcactgccggcaggtaacttggcacagaaggctgaattggtcaccctcactcaggctctccgatggggtaaggacaaacgtattgacatctacactgacagcaggtattcttttgctactgtacatgtacacggagccatctatcaagagcgagggctactcacctcagcaggaaagactgttaaaaacaaagaagaaattttggctctgcttgaagctgtttgacttcttcagcaggtggctgtaattcattgcaagggacatcaaagagaagactcagccgttgtctgtggtaaccaaagaacagactctgcagcgggagagtcagctcggctcccggtcatgcctttgaccctgctgcctgctgtgtcctttcctcaacctcacttaccagaccacccagaatactccccagaggaagaaaaacgagctttgcatcttcaggccagtaaaaatcaggaaggttggcagattcttcctgattccagaatcttcatgccccaaaccctcaggaaaactttaatagtcgtctgcattctaccacccatttgggaggagtaaaactggcccaggttctaaggagccatttcaagatcccccaccttcaggacttaactaaccaagcagctagctctccagtgtatggcttgtggtcaggtaaatgccaaacaaggtcccaagcccagcccaggccaccgcctccaggaaggcttgccaggagaaaggtgggaagttgactttacagaaatgaaaccacagcaggcagagtataaatacctcctagtgctagtagacaccttttcaggatggactgaggcatttgccaccaaaaacgaaactgccaccacggcagttaggcttttactcaatgaaatcatccctcgacctgggctgcctgttgccatagggtctgataatggaccagccttcacctcgtccatagctcagttggttagcaagacattaaacattcaatggaaactccattgtgcctatcgaccccagagctctggacaggtagaacacatgagctgcaccctaaaaagtactcttactaagttaatcctagagaccggtgagaattaggtaaagctccttcctttagcccttcttagagtaagatgcaccccatattgggctgggttttcaccttttgaaatcatgtatggaagggctccgcctatcttgcctaagctaagggatacccatttagcagaaatctcacaagctaatttgttacagtacttgcagtctctccaacaggtacgagtcatcatccagccacttgtctggggagcacactctaatccagctcctgaccagagtgagccctgccactttttccagccgggtgacctggtgtatgttaaaaagttccagaaagaaggactcactcctgccttgaaaggacctcatactgtcatcctcaccatgccaatgactctaaaggtggatggcattcctgcttggattcatcactctcacatcaaaaaggccaacagagcccagcaggaaacttgggtccccaagcctaggccaggccctttaaaactgtgcctaagttgagtgaagccatcaaattaattctttttatttacctcttttgtttgtttctgcctattataccttctgctccatcctactcttttctcctcacttctttcacgacaggacatgtgtttgc

SEQ ID NO: 37914 - DNA, 2300 bp, Homo sapien
atcctatcagtctcacctctgaaggtgaccacagcctcatacttcactgcaacaaagaccattagacgccagcactcccgacttcttttatctccactttaacatttctccatatagtaatcctcacttttctactccctgccatctcagaaaaggaattccctctcctcttttccacagttagcttctcaaatttgtgcctttaattctacccctcccaaatattccaagacttgctccactaattatttcctctcttggaatcttaatatcatcctcttcccttgatccttcccctcaacctttaaaactcctagaccttaaaacactctctgcgatctgacaacccttcaaaccaatatactccccatgtctctctctcccctggttcaatgacaagatctttggccaacttctttctactaagttcccgtaagtttttttttttaaatgaccaacaaccttttagttatcacaattcttttgtgtctttctgtagcatttggttagattcttggctctcttcccctctcatctttcatcacaccaactttcccagttctatttctgtgactactctgattttatctggtttttccttttcctctcatctcttaaaaccaaaagttttccccaagtatctgtcctttgctgacttttctctcttggcagtttcactcattcttaaagtttcggtgctcacgtctacagagataactcccatatccttcattcctgaaccttcattcctgaactttctcccttcccaggctcctcttctaccaggccacccatccagtcctgtcaaatgtctccatcagctctcacctatcctctcctctccatgtcttctgtggctaccctcgtgaagactattattgcctggattctagtgctagttttccaattattctttctgcttcctttctcagtctctcttacacactgctgccaagttaatctctgaagctcacttctgatcatgtcactctatttaaaaattgtttggtgtcagtattgggaatgtactatatgccactaaactgttcactttaaaatgattaattttatgttatgtgatttcatctcattaaaaaaattttttttaaagaaaagaattaacgccttcctacagatggagttcaaatgccttacacctaaccttgaattagactctccaaggctggtctcaatcaaccttctcaacttatttcctgctacttctttctcatgcccttcatttcagcctacttggctttcatgttttctgcctcctatgactttgatcatgctgttctatcagcctctgacacttattgatctcagctccacatatccaaatataagccttttgtcacaattcgaatctcaccttttcctaaaagtcttccctgatctcatttcccatttcccatcctaaagcatttgttcacacttctgaactcccataacagtcacaatagtcacgcattattcaccaaactctagggttccttcaatgcacgagatgttggtgcactggagcttgtgttggggatggcagtacagcttggtttccaggaccacgctgattctggatgggggatgtgttcactggcataattagatatctgataaaatccaagtctgaacctccatcattcctcaagtactgttaacacttcaagtgtggggacacattctactttgacatcaacagtcaacttacagtgagaaaattacaataattgacattaagagacatttatctatgacagtttatatcagcagccagtctgacttagggccaggctcaaaactgattctataccaacagcaacaacatttaagctccctcttatggtacagaaaatgaagcgaatgagggaaagggaatggggggaagaaaaacccttcaagtgcataaataaggaaatctcctaattgtaggcactgaagctccacagcaagatggaagtcaatcgggcaatatatatctactttggccctatttccattataaatgttctcaactaatttttttttactccattttattctgctttcaggtgctgagaaacataatgtctgttccccaagagccagctaatcatttttactaagtacgataattggctgccctgattcagataacatatccttattgtgacataggggtgactattgtcagaaaaccctgaaaatgttttaaaacaagaactaatggggcttggcgattcttgccacgcttttccagagctcggaccttgctattatttgctactagacacccacaaacccttgcttgttaaactgatcgc

SEQ ID NO: 37915 - DNA, 2300 bp, Homo sapien
taggtaaaaatctcagtaaggcaatgccactaagatgggtttttaaataagtgtattccatctccctgcctcaacagagatttcaggatgtggcactttcatctgatcctgtcatataataagaacaggtaatttctctgatccctttccagcaattctcaactgaggttcctcatctgaatcaccaaacataggaaattatttcagtgacttttctcaattgttccaagaatgatacataactaaaaccgtcctaaatgcactggtgctgaaagttaaaattcattgcacactacggcacaattctctccagaaagccgggtgagaaaggctgctataagttcctcagaaagtgtcactgtactactaggccccagtcacccaaccccaacagcactaaaagaactatagtgagtgcacaaatctagaacttagataagaaaaaagataaatgctttatctccaactttaagcaactaggtatttttacttactaggaatagcatggggttgaactgtctcttgctctgaatagaatgcatttacttaacaaaataaacccacagaactataatgtttctcaaagggaattatcagctcttagaaaatgaatttttaaaaatcagcatattaaataaatattaacttgacaaggcttttcctattgacccttctttagcaaacaaatattcatcttttgataactgctaaatgcaaattttcactttaaaaagataaagataaatattaaaaaccagtttgcccttcattttcgcactaatcaccaattctcagaaactgccttttatattcttcagtgtggactacagcaacttcaactgctgggttagttgtgatcaaatcactttaaagacaccagtggagttcttttactcaaaagcaaatgacttttaaaaatggcccaattttaagagggatgaatatttttaagaagcaaaaattactttaaaacaaggttgctaattaaaagtcaagcgtcgttccatattgaatgtacaaagcgttactaaaaagatgggaaaaactaaacatgacattcctatttttaatttatgctggcgtgtgtgctgatagcacagaacatcacaacagataaattactacgtattccactttactaagtctccactcaaagttcctacgtttacaaatatgtaagtaaaagaggcacaaaaatgtaggggatggtgttttcgttgctcatctgtgctcagttgcgaattcttctaatatcagatacataatgcgatgaaatgggaatgcttatcttctatacttctatttattttcataaagcgggaaggggaggtggtcttgattcatttaatattagcgttttgcaataaagtagagcagcataaaatataactgaagaagaattcattttccccaggaaaatgcacccttcctcctgtttctacagtaaagcacatcattttgctattaaaaatgtccatttttcacaactgacttttccttaactctagtcaacactgctcttcaaaagaacctagccaattactgtaccttgtaggcagagttgcaaaatttttgcttccctaagaaacttttccattttttaaatgctttccaaattaagcaggactcacattaactgtgatcttaagtagcagtttagtgaggtttgaaaacaaacttttcattaacgcattcatccaattaaagtgacatagtaggtgggactactgacacagatttaaggattacagctttatattaaaagtcagtccaaagatggtaactcagagttcatttgagaccctttgacttttggcttttaaaaattgtgccccactcgagtaccagatagaactacatttagcaaccgtctcctcctgacttcctggtactaaaagccacaaccacaagggctatttcgtgggtttgctgtaaaacaacatttgctccagtcaactcactggaaaatagactatctctactgagtacccgctgaggtgtgggtgctcacgatgtttaaaaacaaaaccacgtgtctacgcggcagcgacaccgcaggtgttacgtgccgggtttcttcccaggatggagaccggcgcgggctgggccgggaagcagcccccggcgccccggccgaaggagaaaaggagaagggtaaaaatagccggcggccacggcccacgtgcagccgcgggaggaccgagcgcgggcgcgtggagaggggtccgtacctccaaacatgcgcggtgagaggtgagctggtaaggagccgatcaccaggagcggcccgccggggctcc

SEQ ID NO: 37916 - DNA, 2300 bp, Homo sapien
gaactgtctcttgctctgaatagaatgcatttacttaacaaaataaacccacagaactataatgtttctcaaagggaattatcagctcttagaaaatgaatttttaaaaatcagcatattaaataaatattaacttgacaaggcttttcctattgacccttctttagcaaacaaatattcatcttttgataactgctaaatgcaaattttcactttaaaaagataaagataaatattaaaaaccagtttgcccttcattttcgcactaatcaccaattctcagaaactgccttttatattcttcagtgtggactacagcaacttcaactgctgggttagttgtgatcaaatcactttaaagacaccagtggagttcttttactcaaaagcaaatgacttttaaaaatggcccaattttaagagggatgaatatttttaagaagcaaaaattactttaaaacaaggttgctaattaaaagtcaagcgtcgttccatattgaatgtacaaagcgttactaaaaagatgggaaaaactaaacatgacattcctatttttaatttatgctggcgtgtgtgctgatagcacagaacatcacaacagataaattactacgtattccactttactaagtctccactcaaagttcctacgtttacaaatatgtaagtaaaagaggcacaaaaatgtaggggatggtgttttcgttgctcatctgtgctcagttgcgaattcttctaatatcagatacataatgcgatgaaatgggaatgcttatcttctatacttctatttattttcataaagcgggaaggggaggtggtcttgattcatttaatattagcgttttgcaataaagtagagcagcataaaatataactgaagaagaattcattttccccaggaaaatgcacccttcctcctgtttctacagtaaagcacatcattttgctattaaaaatgtccatttttcacaactgacttttccttaactctagtcaacactgctcttcaaaagaacctagccaattactgtaccttgtaggcagagttgcaaaatttttgcttccctaagaaacttttccattttttaaatgctttccaaattaagcaggactcacattaactgtgatcttaagtagcagtttagtgaggtttgaaaacaaacttttcattaacgcattcatccaattaaagtgacatagtaggtgggactactgacacagatttaaggattacagctttatattaaaagtcagtccaaagatggtaactcagagttcatttgagaccctttgacttttggcttttaaaaattgtgccccactcgagtaccagatagaactacatttagcaaccgtctcctcctgacttcctggtactaaaagccacaaccacaagggctatttcgtgggtttgctgtaaaacaacatttgctccagtcaactcactggaaaatagactatctctactgagtacccgctgaggtgtgggtgctcacgatgtttaaaaacaaaaccacgtgtctacgcggcagcgacaccgcaggtgttacgtgccgggtttcttcccaggatggagaccggcgcgggctgggccgggaagcagcccccggcgccccggccgaaggagaaaaggagaagggtaaaaatagccggcggccacggcccacgtgcagccgcgggaggaccgagcgcgggcgcgtggagaggggtccgtacctccaaacatgcgcggtgagaggtgagctggtaaggagccgatcaccaggagcggcccgccggggctccagcccaccggccggtgccggccgccgccgccatcctcagggctgctgtgcaccgagtcctgcgagtcctacgggccgctgctgctgttcgggatgctgaaagaggactgcgccgcgaaggcccccgacgccacgcccccccgaggaaacagctgcggggccgccgcggcgccgccgggctggtgagcgctgggcacctgggccgggaacctccccgcggcggcggcctccggcccccggctctggtcccggtcccattggccactccgctgctactggaaggtagatccgagccgagtacgcgcgcgtgcgccgtgagcggcggccaggccgctctgcttggcgctcatgtccgccctgctccggaccgggccgcgcgctgtgccccgagagccaagaaggcaggagcgaacgcgggagctagagggcagggccgaggcgctgcggccggcccagagaggcccccgcacgtccagggccgccgcccggcgccccgaggggcagtcggcgccc

SEQ ID NO: 37917 - DNA, 2300 bp, Homo sapien
catgcccgccctcgcttctgctgcgcatgttaggataaaaatgagtttgcccacatttctcatttggttggtggcttcatcaacacaggatcccctacttttaactgactcactttaagggtttttgaatctctgagacatggtgtcctcagttacttaaaaggtttggataggctatttaagggtaggctttgctctgttttgtaaactttcattatccctttcaatttcattcagccactgggcatgtaggtaggctctgccttgtttaggcagctgcctaggttctcctcgtcatctttttgtattatatggaaaaaggtttgagaacttctaggcaggaatccctgagctgacacctgctaataccatcctcaccctaccttaagaacagccattccataatgtggttggaatattatggtctaggtgactgtcacattatagccagaggggctcatatttggaaagccagataccaaggtcttgcctacttagcttcacctgagtcacctctgctaggccgtgctttgattggcctggcttttgacatccagtactttaagtgtatggcttagcccctgattggggtaaacacacaggagactcaagtactgcaaatctcagaacccccaacagatgctgggatttctaatctgaaatgaaagctgcaggtcccatgctgcagcacccaggaagtagtgggtgtgagaaaacatcatttttcaagtgttgtccacatgttgtcatggtgattataaaatataggggaaaacaccccccagaattcttataaaaagagcactaaatctggaagaaatattttaatctgcctcctgagtagacagtgatactccaaggacatctctaagcagtaattgcagaacttcgaggcagtaaacaacgagaggaactttttcttattagagagaggcagagcgaaaaaagggtgagaactggcaaaaaggtgcaaggctgtgcggagtatagaggcccctcctggggacgtgctccacctgagtcttccatgaaaaccaaacgcaaatgcttatcaagagccaatggttgttgttgaatttaaaagaggaattgaatttcaagctggggcagatgcaatgaaggatctataggatgagaaagccaaaacccttgggaattagcataagtctttgggaaaggaggttttgaacttccagaggtcatagaactgtgaggttcaaggtcattggacctgggttgtcaagggcaaatgtctccctccagtcttaccttatgtattcagggaatcatgaattttctgctctcaacacagaaacaaagaaagtcaaatttcacaaaatgctgggagtgaagaaaacctccctagccaggagtgctggttggtacacctgagggtccaaattagagcataagggctgatggacctagcgggtgtcagtgaatgagttcgtgagtgtggccttgattaggaagggcaaaagacacccgggcagtcctggccctggctgggatactagaggcccaaggcagatgacagcacaggtggcatggataggagggctggaggcctgacctgggcttgtcattaatgctggcaaggactttggatctggtccagttggtccttctgggtgacagctgtggcacctgaggcctctcagtggacacgtgcagaaaaagcggtctacagtgcagctcactgcgggcaggcttgagtgtcctgagtgccgcctacctgcgggggctttctccttctttattgccgagctaacccagaatctctttcacttccaggtggcaagacagggcagggccctggctcccgcgcgccctctcccaggcttcccaacaaaaccatcagcggcccgcttatcccgcctgcctctcccaggctaggcaatacctccgaggcgcatggcgctgccaggacagccccgcctcgccccaacgtgcctgccccgccccctcccaccccaccccctccgcctccacccttacccccgccccttccctcttcctcccccatcaaaactccgcttgtgtccccacccggcccactgaccaaagggaacctcccggtggttgcaccccccgtcccctgtgcgccaccacctccacctccgccacctcccccaacgccacccccgctgcccccggcctcggttcttagtgacaaggcagtgaagcctcagctggctcccttgcacctcccgcccatcccgcccccgctccctctgctcccaccttgtgggtatccggggctcaaagcggagcccgccagccctgcgcaagatgcgcag

SEQ ID NO: 37918 - DNA, 2300 bp, Homo sapien
tgggcaacatagtgagactccatttctacaaaaatattttaaaaagtagctaggcatggtggcacatgcttgtagtcctatctactcaggaggctgaggtaggaggatcacttgagcctaggaggtagaggctgcagtgagccacttccctcgaggctgggtgacagagcgagatcccatctcaaaacaaacaaaaaataaaacagcgactctgagacttttaaaaaaagtttaatatttattttaagttctggggtatatatgcaggatgtgcagatttgttatataagtaaacgtgtaccacggtggtttgctgcacctatcaacccatcacttaggtattaagcccagcatgcattacctatttttcctaatgctctccctacccacacctcacggactttcagactttaacatgcaagagaaacaactaaagagcttgaaaaatgcgggttccctggctccagccccagagactctgaattccatagatctgggctggaacccaggaataagcccgctagaaatttctaatattgattatttagactcattggctacagttttcttggctagactaaaagaacagtaaagtacctttgtgctccaagagtctacgaaccaatgctctattctgcagtacctacaccaacttcctcagcccttccccactatccgtttactcatgtgtcagactgtaagcacaggctcaacattcaaagggcatggaaaaaagtctccttctctccccagcacccagtctcccagttctgctccctggtggcatctattacaggttcttacgtactcttccaaagatactctgtgcatttacaaaaataagtacagacatacatatatattttcttcccacaaataacacacacaacgttctgcacctagctttttatttttctttagttagtataggttggaaatagttttgtattagcaaataaagatcattctcctttttaaaggaagctggatagtagaggcaggcggattgcctaagctcaggagtttgagaccggcctgggcaacatggtgaaaccccatctctactaaaaatcaaaaaaaattagcgaggctggtggcgtgggtctgtagtctcagccacttgggaggctgaggcacgagaatcgcttgaacccgggaggcgggaggcgggaggcgggaggcaggaggcggagtttgcagtgagccgagatcctgccactgcattccagactgggcgacaaagcaagactcaaaatgttttgatttttgttaatctggctggtggaagatgctaccccacatatttgatttgcagttaagtgagcctgaatatcttttcgtgtgccaggatagaattgcatttattttcctctgaattacgtcttcatatcttttgagatagtcttttcttatttacttataaaagatggagttgacgctggcatcaacacacacacacacacacacacacagacacacaacacacaagtccctgtacataactttattaacccagatatggaatcttggcttagttacgtgctgtgtgaccttgggcaagttacttaacctctctaggccacaatgtccaagtacctgggacagggtctggcttaccaacatggtacaggacggcacttttaaaaccagggactcgacttggacgtgcgagtcaacaaggtacaggacacatttctctccggggaaatcttgtgtgggcgccgaggcccggacgtagcaaccaaacgtcgggaagaggcgccaaaaggatgctgggcctggctccttgaagcccgggttttcccttttgagagccacaaccaagaaataaaaatctagcaaagagggggccactttctgcggcgagatacgccctctcggccgctcctccagctcccaggccccctccctactcgacggtgagcagcgccgcggcccgtgcagccagacgcgcggggtgcggcggggccccgggggccggggtgggggaggcggagggtgggcccgcggtcacgtgagtcgggccagctgctgcggggggcggcgggccccagcgccgggagtctgggtagggggaagcgcccggcggccgcctccgccactgcagctgcagcccccgaggtcgccgcagtaatccggacccggcagcacccgcaccctcggcggccgcagcctcagcaccgcagagcggagagcggagcccggagcccgccgccccaggtgagccgcgtctgggagcgcagggcgtttgcagcgctgctttcccggcggtttcaccccacccgccatcgccacctcct

SEQ ID NO: 37919 - DNA, 2300 bp, Homo sapien
agtgagtggattcttaattactattttacctgcggggcataattacttacgtggagtgaaataaggagccgtccttttctaagtagccttcatagtggaccaacatcaaatcccctcctttggtcttgcgatggcagatgaatggcttctggagaacttcaattttcacttctggttcagggatcaaagccccaatcaaagaagtgacgaacagagtcaagaccgcgttccacaagaaaagcctcatgttgctgaagcaaggaaagaagtccctacaaaagcagcgaaaggtccctcgacttcatagatttaagaacgtagttcaaggcttacggacaagggcttcagacaagttcaggactcccccttcttagaagacgtggcacatttaccaccaactcttttctcaagggtcacgaacctacctttaaagagttaagcccaaatgccggcctgactggctcttataacgcggccgcctgggaatagcagcctcccattggctattggtgctgtccttcaggcagctctcaagccaatgacgctgcaacgatggaatttacagcccggtagagccgggcagctgccaagcggcggatcatcccttgtggtcctagagcccggtggatttcagcattcaaccagcgtggattttgggagaggggcggggcgcagagccaaccggaaactcctccggctgatttatctctgtgaagaaccctgctgagagacgtaggaagagtcccggggccctatgaaatcttcggggttccaggaaagactcgtttactctcgccgttggagagcggccccccaagatgccacaatcctaggattttgctattgcttataaactgtaaagactgacatactgcttgagggttcacaaagcgcgttcccgttgcatgaacctcactacacccagtaaggcaggttcttttttcccatttaaaagagaagtaaatttacaccaggagatattaactgtcctgcttaaggttgtttggccccgaagcaaatgagctctgccttcaaaccaggtctgattcattccacagcaccacgtcatgttatggctgctaataatttatcccttaagttaccttacagggtaaataatgagtttcgacttgcagacttccgctttaaagaagaaatggtaatcatggttacgaattacacagcctcatcgtagtttacattttctagttttacattttttgcctaagttcaaaagtaatgcatgttcattgaagtcattttggaagaaattggaaagcactaaagtaagatttccagataatattggggagtcgaatcaagttggaatttcagatacataacgaataatggttttgcatttttatttactaaatcaggcaactttaaagaaaaagaaagctcgccgataccaccaccagccgcaaacaatcctcttaatattttggtgcatgcttctgtgacatatacttaaagcgatttaaatcgtattgtagtcttttctcacctcctctttccacttaatctgtagttaacattttttctggtctaataaccttaacacagtgcatatccgcactctatgtgcataggaatccccctgaagatcttgtttaaaatgcagattttgatctggaggtctggggtgggtgcaagattctgcatttctaacaagctcttaggtgatgtcagtgctccgggtcagtagatcaacacttccatagtgagaccttagagtctggacaacatctgtttacactggcctcatagtattctaccctgaaattccaataatctctttacgccctgttattggttacctcaagtgtgtgagatcaattaggcagctttggaacaagaatagggactagaactcaggaggtatcgtgagaggtcacgtagaccctcaaacggcgggcaccatttacagtcagaactgcgctccacacttgtctcaggggcctccctcctcccgtcgcctagtccgcagtccgcgtctcgggactcaatttccctgcgggccgttcccgcaaactccgccccgccgccgctgccgcgaaatcccggagtggattttgggaaggggcgcgcgagcggcgccctgggcatgcgcgagcgcgtcccgggcccggcgagtcgagggttcaggtggtgcgccgtggcgccgcctgcgaccggcagctcgttcgccgcactttggaggcttcggctgcccctccgacccacgtagggcccggacccgggcctccttgtgaacagcgtgccggcttcgccccacgggttcaccggctggctgggct

SEQ ID NO: 37920 - DNA, 2300 bp, Homo sapien
acttgtacagcaccccctccatggcgcccgcggccactcggcccacgcccgccggccccctcactgccccaggccccaagaggcgaggagcaccagcagcagggccatcgcctggcgctgcccagacgcccactcccggcgcccgggcccggtgtggggacgcccggcccgcctcacatcctcggcccgggggcggggtcactgcggcggcctcggcgcttgaagcccagccagccggtgaacccgtggggcgaagccggcacgctgttcacaaggaggcccgggtccgggccctacgtgggtcggaggggcagccgaagcctccaaagtgcggcgaacgagctgccggtcgcaggcggcgccacggcgcaccacctgaaccctcgactcgccgggcccgggacgcgctcgcgcatgcccagggcgccgctcgcgcgccccttcccaaaatccactccgggatttcgcggcagcggcggcggggcggagtttgcgggaacggcccgcagggaaattgagtcccgagacgcggactgcggactaggcgacgggaggagggaggcccctgagacaagtgtggagcgcagttctgactgtaaatggtgcccgccgtttgagggtctacgtgacctctcacgatacctcctgagttctagtccctattcttgttccaaagctgcctaattgatctcacacacttgaggtaaccaataacagggcgtaaagagattattggaatttcagggtagaatactatgaggccagtgtaaacagatgttgtccagactctaaggtctcactatggaagtgttgatctactgacccggagcactgacatcacctaagagcttgttagaaatgcagaatcttgcacccaccccagacctccagatcaaaatctgcattttaaacaagatcttcagggggattcctatgcacatagagtgcggatatgcactgtgttaaggttattagaccagaaaaaatgttaactacagattaagtggaaagaggaggtgagaaaagactacaatacgatttaaatcgctttaagtatatgtcacagaagcatgcaccaaaatattaagaggattgtttgcggctggtggtggtatcggcgagctttctttttctttaaagttgcctgatttagtaaataaaaatgcaaaaccattattcgttatgtatctgaaattccaacttgattcgactccccaatattatctggaaatcttactttagtgctttccaatttcttccaaaatgacttcaatgaacatgcattacttttgaacttaggcaaaaaatgtaaaactagaaaatgtaaactacgatgaggctgtgtaattcgtaaccatgattaccatttcttctttaaagcggaagtctgcaagtcgaaactcattatttaccctgtaaggtaacttaagggataaattattagcagccataacatgacgtggtgctgtggaatgaatcagacctggtttgaaggcagagctcatttgcttcggggccaaacaaccttaagcaggacagttaatatctcctggtgtaaatttacttctcttttaaatgggaaaaaagaacctgccttactgggtgtagtgaggttcatgcaacgggaacgcgctttgtgaaccctcaagcagtatgtcagtctttacagtttataagcaatagcaaaatcctaggattgtggcatcttggggggccgctctccaacggcgagagtaaacgagtctttcctggaaccccgaagatttcatagggccccgggactcttcctacgtctctcagcagggttcttcacagagataaatcagccggaggagtttccggttggctctgcgccccgcccctctcccaaaatccacgctggttgaatgctgaaatccaccgggctctaggaccacaagggatgatccgccgcttggcagctgcccggctctaccgggctgtaaattccatcgttgcagcgtcattggcttgagagctgcctgaaggacagcaccaatagccaatgggaggctgctattcccaggcggccgcgttataagagccagtcaggccggcatttgggcttaactctttaaaggtaggttcgtgacccttgagaaaagagttggtggtaaatgtgccacgtcttctaagaagggggagtcctgaacttgtctgaagcccttgtccgtaagccttgaactacgttcttaaatctatgaagtcgagggacctttcgctgcttttgtagggacttctttccttgcttcagcaacatgaggcttttcttgtggaacgcg

SEQ ID NO: 37921 - DNA, 2300 bp, Homo sapien
catcttggtcactaactagccttcatttgacctttttggtttcctcttcaatcagactagacagttgaactctattactggttctccccttttttttctagagtgctgatggctgagtgtagaattctaggttaataaacattttccctccaaattttgaaggcattcctctattgtcctccagcttctactgttactattgtgaaatcctattctattatatataatctgttccttgtccctttcgaaatgttttagattgtttttccccacattctgaaatttcatgatgtgcccttttggtctttatcattcattatgctgagcacttgattaggtctttaaatctggagactcctatcctccagttctgggagattttcttttgttatgtttttggataactgccttctcttaattttcagttttcccactcgcttgtactttgaccattatcttaagtatttatcatgtgccaggcagtgggctaaacacttcctacagatcccattaatgcttaaaataaggaaagtggtattagtcttcttctataaataaggaaactgagattctaggaagttaagcactttgcataaattcctcaaactggtatgtgaaagatctgagattcaagtccaggtctgcttcatctaagtctgtgctttagccactgcatgataatgccagtcactctcttactgcaaaaatggggaggtctgattctcaaagactttcaaagtataaggaagatcaggaaagcaactgtggaatgataattcaagattcttcaaaaagcctctgctgagatctagtgaccgccagaaaacagattttagcaagcttaggaaatattggcccgcaaaggaagagaaggataagatgcctaggaaatctgttaggcaagtggcataatatggtggtgtggttgaaaaacacagagatgatccaagttcagatcctagccctggcactcattagctgtatgacgtttatatataaaatagagatataaactgtacagggttcttataaagatcagctagaataaactatgttaaagcatcagcgcacaagcaaacaataaatgttagctcccttcctttctagaaagcattcaagagtgcaaaggaaagattattcttatgggggaaaaatagaagatacgcaaagaaatatatagagatgagatacaaataagagaatgagatgccccagaagacaggccatgtgggaataaagaccatgatggcaacatgcatatagattctgaggatttgaggggaatagtctggatcacactgtggatcagaagggagcttttctcagactctctctctcagcattccctgatgtgatagcattatttatccttaaggtggcccaagtacatgcttgtttcttctagccttaaagttatttgaattggcccttgaaacataattttagagaagccacaaattagaagggtagtcatatttctttactcttgctcttctcagctgtttgtatgtgtgaaagtatgtgtgtgtgcatgtgcacatgcataaaaataagagtgtgagagacagacttgatgcagattctcatgggttattcttttgcagttagctttaagggcagctccatcctatgaagattttgtggccgcgttaaccgtaaaggaaggtgaccaccagaaagaagctttcagtattgggatgcagagggacctcagcctttacctccctgccatggagaagcagctggccatactggacactttatatgaggtccacgggctggaatctgatgaggtggtatgatggctgctgggcagcacctcctaacttcagggaataagtgctaaagtgttttgttgccctacttaatttccagcaacagcctcaaccctctccaaccccttcacctggggggatggacaggaggtggcaaaacccagtgcttttataatttttaaaatgcatatgtgttttgtttaaagatcaaggtgctatatatttcagttcagcaggcctactggaaaccaaatgataagctgctgtagacttgaacagcaagttataagagcagatttaacaaacaaatttgctgttattgtgtattgtattgtttttatattttagtctaatgggccacccaaacccaagctgaaaatcagcaaattccatattaagtaccataattcatagccagtgtttcagccaacttagactagacatttggaggtagtataagctgctttgttgaagctgtgtagagtttgctgttcctagatgttcttcagtggaccctcttcactg

SEQ ID NO: 37922 - DNA, 2300 bp, Homo sapien
aatattgttatgtgtgaatttgatcctgtcattatgatgttagctggttattttgctcgttagttgatgcagtttcttcctagccttaatggtctttacagtttggcatgttggtaccggtggctggtaccagttgttcctttccatgtttagtgcttccttcaggagctcttttagggcaggcctggtggtgacaaaatctctcagcatttgcttgtctgtaaagtattttatttctccttcacttatgaatcttagtttggctggatatgaaattctgggttgaaaattcttttctttaagaatgttgaatatcggcccccactctcttctggcttgtagagttactgccgagagatcagctgttagtctgatgaacttccctttgtgggtatcccgatctttctctctggctgcccttaacattttttccttcatttcaactttggtgaatctgataattatgtgtcttggaattgctcttcttgaggagtctctttgtggcgttctctgtatttcctgaatttgaatgttggcctgccttgctagattggggaagttctcctagataatatcctgcagagtgttttccagcttggttccattctccccatcactttcaggtacaccaatcagacgtagatttggtctttttacatagtcccatatttcttggaggctttgttcgtttctttttattcttttttctctaaccttctcttctcgcttcatttcattcatttcgtcttccattgctgataccctttcttccagttgatcacgttggctactgaggcttgtgcattcgtcacatagttctcgtgccgtggttttcagctccatcaggtcctttaaggacttctctgcattgattattctagttagccgtttgtctaatttttttgcaaggttttaacttctttgccattggttcgaacttcttcctttagcttggagtagtttgatcttctgaagcattcttctctcaactcgtcaaagtcattctctgtccagctttgttccgttgctggtgaggagctgcgttcctttggaggaggagaggcgctctgacttttagagtttctggtttttctgctctgttttttccccatctttgtggttttatctacctttggtctttgatgatggtgacgtacagatggatttttggtgtggatgtcctttctgtttgttagttttccttctaacagtcaggaccctcagctgcaggtctgttggagtttgctggaggtccactccagaccctgtttgcctgggtatcagcagcggtggctgcagaactgcagatattggtgaaccgcaaacgctgctgcctgatcgttcctctggaagttttgtctcagaggagtacccggccatgtgaggtgtcagtctgcccctactggggagtgcctcccagttaggctactcgggggtcagggacccacttgaggaggcagtctgcctgttctcagatctccagctgcgtgctgggagaaccactactctcttcaaagctgtcagacagggacatttaagtctgcagaggttactgctgccttttgtttgtctgtgccctgcccccagaggtggagcctacagaggcaggcaggcctccttgagctgtggtgggctccacccagttcgagcttcccggctgctttgtttacctaatcaaacaactaactcggcaatggcaggtgcccgtcccccagcctcgctgccgccttgcagtttgatctcagactgctgtgctagcaatgagcgaggctccgtgggcgtaggaccctccaagccaggtgcgggatataatctcctgttgtgccgtttgttaaacccgttggaaaagcgcagtattagggtgggagtgacccgattttccaggtgccatctgtcacccctttctttgactaggaaagggaattccttgacccttgcgcttcctgggtgatgcgatgttgcgccctgctttggctcacgcatggtgcgctgcacccactgtccggcactccccagtgagataaacccggtacctcagttggaaatgcagaaatcacccgtcttctgcgtcgctcacgctgggagctgtagactggagctgttcctattcggccatcttggctccacctcaacctggtctcgaactcctgacctcaggtgatccacctgcctcagcctcccaaagttctgggattacaggtgtgagccaccgtgcccagccttttctttctttttacaatttcttacaagtttttatttttataaagtacttaaatatctcaaatttcagaaaacaagat

SEQ ID NO: 37923 - DNA, 2300 bp, Homo sapien
tttgtacccaaaattttatttttcataagagtttttcattttctgacaaaaactatttgttaaataaacataacttcataattctgatcacatcacttggagcaaatttgactgatacattttaaaacacatggattaaaaaaaaaactccttctttcccgaaaaaggaaaaaaggaatgtatttttcatattttcatctccaatttaaggaattcatttttggaacacatattatgctttaaatggtggtgccaggtaaaactgcaaggaagcttgtgctatctggagacacccatactttttttttttaaggaccattttgtaactttacaacagcatattgcatttttatattcatgtgcctgtctccttcattgtcctgtgtattagttttctactgctgcatgaagaatttaaacagacctaacagcttaaaacaacacccatttaatagcccacagttctgaaagtcggaagtcccagcacagccatggcatcactgggttctcgctcaggttctgcgaaggctgcaatcatggtaatagtcaggctcagttcttgtctggaaaagacaacaagtttgagaaaaaaatctgcttttcaagctcattcgggttgttggcagaattcagttccttgcaacattggcctaggcaaataatttatgactaaaaccccaaaggaagtgcaacaaaaacaagaatagacaaatgggccttaattaaactaaaaagcttctgcacagtaaaagaaacaatcaacagagtaaatagacaacctacagaatgagagaaaatatttgcaaactacgcatctgacaaaggactaatatccagaatctacaaggaactcaaacaactcaacaagaaaaaaaaaaaacccattaaaaagtgggcaaaggacatgaacagatatttctcaaaaaagacatacaagtggccaacgaacatatgaaaaaatgctcaacatccactaattatcagagaaatgcacattaaaaccacaatgagatacaatctcacaccagtcaaaatggctatgattaaaaagtcaaaaaacagcagatgttggtgagggtgcagagaaaaggaaacatatatacgtgttggtgggaatgtaaattcgtgcacagtgcctggttcagaagacacactttacagaaaaaagctggctgaatgtttataacgtgtctgtgtttgtagtgttcaagtcctgagggcgaggaccctagtgcattttctgcaatccagtaatgcctgtccagtatatggcagccagtgagcactcaacaggtgcaatcgttgggccacacactcttgttttaaaatgtgctttatcctcttgacctttttaggttatgcaatgtgaattcaagctgaataatactgaagccagtcttatgaggctcatttctaagaaatattcagctttacgtaacgcaaataaaaaatcacacacgccctttgcaagtgaacattcatattagtgtctgataaatgcattaagaagacacattcccttaaatcaatcggagaacagaactttggtttctgcaaaaagaaaagctcccttttccttagattttctcagctcctccactgctagccccagacaaggtccaagttatctgcagttctatggcctcccttgcatttaaatcgcatttgggcaaacgcttcctgggctttctaactccacagaaacgctaaccaggtattgggcgctcgcaccgcttccaggtaacccgcggagctgcggattccaggctcgcgctgtgacgtcaccgggctcgcaagccgcggcgcggtctcaggctccggtgattggctggggcccatgacgtcacggcccggggcggcaccgcgatggccagggccccgggatgctccgggtttgtttaaaaataaagggggggcgggagcgcccaggaaaatccgggcgcccgcgggggtgccggccgctcctcccgccgccccgcgtcccggcccggccgcgccaacccccacggcggcccgcaagggggcggggggaggcggggcggaggaggagccgcgggcgcggcgccgcgctgtccccggccgccgcccgccccactccgcaccgcatgtaaacagtcccagccggcccagcccggccccggaggagcccgcgcaggccgagccgagcgccgcgctgcccgcccgggaggagggcgcctaggagcgggagggcgggcggcggcgggaggcgggcgcggggccgcgatggatttccagcagctggccgacgttgcggagaaatggtgctccaacacgccctt

SEQ ID NO: 37924 - DNA, 2300 bp, Homo sapien
gtcttccttcaacatatagtcctaaattgctctaaaaggagagtaatggaaattgtggtgtgaacaatctcttcatgaggttagaaatgccttagaaacacttagctaaatatactgtctgattaccaagcagtggtggctacactgcagtttatgattctgttattgtttgagtgatatacttttctaagtttactttgtaatttaaagcccagatgtacttactttttaacaaagtaggtttacaagcttttcataggtgcacctgcttctgaattaaccgcaacctgagttgcctcaggcagtgctctcagtgagtcacattgggtgtctgatttactcattgtgtgaccatagccttgtggcagatggtaagcccaccccttcccctctgtctcccccatcctcctgcagatgcaaagggggaaagaaggtacttaagtccaccatttactgaatattcactgcatgtcagctaggcactgtgccaggtacttactcagcttttaactctgtcatcttcacaagtctacagaggacaggcttcaagtttttgaaatgtggtggtagatgttaatcccctctttaacttggataataatttgaaataagctggaacttttacacatttgagtatgaaaatggatgctgagcagaacttactaagtagaacttttgttgttcttccagaatctccactgattaagaatcaactggcataatggatatacaagtactttgtaccattacacttttgtacaatggaagagactattacataaatgacattgtggtggtttgacagctttaagggtctctaattagtagggaagagcatttgagctgttcgctaaagctagagagcccagacgttgtctttattgggttggggaagcctctagagaagtctgctggcatgagagcaacgtgtgtcgaaaatggacctttgcaactatgaaacacagataattggggtataaagatggtacattggcacctagttattctcatttggatctgagcagtattttaagtctgtaggtctagttctcagaaaccctgcaatgagaagaaaggagaggaaatgtgtttattgagtgatagggatatggggccagtgtgtgcttggcatggaccatgtctccacataagtcttctatcctgctatctggccgctgcatcttgttcttatctgccagatgtctttctttctcccagacctcaatacttttttttttttttttttttttttgccagtgtttagccatcctggatccgtccccactaaagagtgattcttggtacctgacagatactctgatgttaccctggaagccccgtgtccctgacttgcttagatatgcagggcagggtattctgcattaagaatgctcaaacctatttcttggccttgttccaggtctttgaacatttatgagagaggcttgcctagtcttaaagatgtgctaaaatggatatcctcacatggaaaaaagccttacccagtcttcagaaaaaataaaacctagactgggcatggtggctcacgcctgtagtcccagcaatttgggaggctgaggcaggtggatcgagaccagcctgggcaacatggcgaaaccctgtctctaccaaaaatacaaagaattagtcaggtgtggtggtgcgcacctgtagttccacctacttgggtggccaagatgggagggtcacttgaatctggcaggaagaggttgcagtgagttaagatcatgccactgcactccagcctgggcaacagagcaaaaccctgtctgaaaaagaaaaagaaaaagaaacaaaaaatctaaaaccgatctcctcttagtatgtgttagattgtgaaatgatgcttcggtatgatgtccttttaaagcattttagggaagggaagttttcagaaagcctttgttttccagtgacatagtggtgacttggtgggttctcttaagttatttgcatttggaagtaaatttaccaccacgcctactcacaggccgatctgggtaaagaatgtcttgttccaagttaatgcttacaaactatgcttaattaatctttcagccgtagctgaaagcaaagttaaggattttgaaggcaaaggctctggtttctccttccccatgtctgaaaaccgcccttagcctgcacaaggtgaacagtggaaatcattggtgaggaatggccacccactgccctctttactgtgtaggagcagatctgatgatgaacagagcaggtgaggtatggaccaaaagctcgggggcttctatagattagacatt

SEQ ID NO: 37925 - DNA, 2300 bp, Homo sapien
ctcaaaaacccgttgcagttctacatgtgtgtatacctgtgtgtactcatttggatgaagcagcacttttaatttttgaagaactggtaggtatactaaagacgtgatggccaggcatggtggctcacgcctgtaatcccagcattttgggaagccgaggcgggtggatcacaagttctggagttagagaccatcctggccaacatggtgaaaccctgtctctactaaaagtacgaaaaaatgagctgggcatggtggcacgtgcctgtaacccagctactctggaggctgaggcaggagaattgcttgaacctgggaggcagaggttgcagtgagcccagatcgcaccactgcactccagcctggtgacagagcgagactctgtctcaaataaataaataaataaataagcgacacattttcaacgaagtcagaactgtttggttgacaataacacacattgacagcttcatgctggtgactggagagagatgagaggggtgaggagagaggaaagaaggccaaggaaagaacatagaaggccagcattttatctccagaaccttcgtggggaaagaaacaaggctcaccagagaggaggtggaaggggcacccaccacaagcgaaatgtcaaggagaataagaacatgataagttaatgagtgacattcaagaaagaatcgttttagtacaactggtgaggatacatgtattcactcactcattcattcattcattcacaaaacatttattgcaccatggcaagaccagacactgtgttaaacactggaggtacagacatgaagtttatcatggagccaattgagtagtgacaagcaagatatctaataataataataacatgatcagagctatgaaggaggtattgtacagcactgagtgggaacactgaagtcagtctgtgatgctgggatgggggaggaggtggcaggaaacatctataaggagagggcacttaaccaaaatgatgaccatatcttaacatgatactgcatataaagcactgggtacctttgtttttccatgtatatatgtgtgtttgtgtacacagatacacgtctttatatgtatacatatattctccatttgtttaaaaacttgattcccataccctaagagtgatgaaaatcattacataaatgacttattgcaaatagtgaaaagatgacaaagtatttctgtagttttataaaacaccacttgctattattattttcaagtagagactagacattttcataatgggagtctcagagcaggctgttccctgggtatccagaccctgctctgccgtgaagagaccacaccaacactgaggaaggcactgaggagaattttattacattttagagaagttataggattttaaagaggcaggtgccctaggatttaacacaaacagttcaggtaagaaacctaaagtcggcctggtgcggtacgtcacgcctgtaatcccagcactttggaaggccgaggcaggtggatcacttgaggacaggagttcaagactagcctggccaacatggtgaaagaccgtctctactaaaaatacaaaaattagccaggcgtggtggcacgtgcctgtaatcccagctactctggaggatgaggcaggagaatcgctcgaactcgggaggcggaggttgcagtgagccgagatcacaccattgcactccagcctgggtgactgagcgagactccgtctcaaaaacaaaaacaaaaataaacctaaagtccaaaaaagtaaaataatttgctcactacagataatttagtttggtgttgggcctagattctaggttttgtgagtcaggtgcagcgttcctggcaccacagtatttgccctaccacagagggtcaacctggattatcccgagttcttccaactctgcgcttcctcccaggttggtgtttcatgagtaagtctgagatcaagctggcttttgagcttctgtttttttttttaatcagtgtgtaacaccaacacccaccgaaaccaaacggctctgggcagaggacacagccattcacgccccctgccaggaaaagctgcagctgacacaggctcctacagcgtcggcgggccacgtgcgggaggaggggccgccttctggttggcgcccggtgtccgttcctcctatcggcgtaggccccgcgaggaagacaagggcgcgccctggctgggagggcgtggccagagacctgtccatcaccgagtccacgagtggcagcacctaccacaccgcagtaccttggcgaggcggagcaggggcaggcag
